United States Patent Application Publication US 2019/0348154 A1 - sequence listing, part 122

SEQ ID NO: 458195 - DNA, 1002 bp, Shigella boydii
atgattgatttacgcagtgataccgttacccgaccgagccgcgccatgctcgaagcgatgatggccgccccggttggggacgacgtttacggagacgaccctaccgttaatgctctgcaggactatgcagcagagctttccggtaaagaagccgccatttttctgcctaccggcactcaggccaacctggtcgctctgctcagtcactgcgaacgtggcgaagagtatattgtcggtcaggccgcgcataactatctgtttgaagccggtggcgcagcggtgctgggcagtattcagccgcaccccatcgacgcggctgccgacggcacgctaccgctggataaagtggcgatgaaaatcaaacccgacgatatccatttcgcccgcaccaaattactcagtctggaaaacacccacaacggcaaagtgctgccgcgtgaatacctgaaagaagcatgggaatttacccgcgagcgcaatctggcgctgcatgttgacggtgcgcgcatctttaatgccgtggtggcttacggctgcgaactgaaagagatcacgcaatattgtgattcgttcaccatttgcctgtcgaaaggtcttgggacgccagtcggttcattactcgtcggtaatcgtgattacattaaacgtgccatccgctggcggaaaatggccggtggcgggatgcgtcagtccgggattctggctgccgccgggatgtatgccctgaaaaataacgtcgcacggttgcaggaagatcacgacaacgccgcctggatggcggagcaactgcgtgaagcaggcgcggatgtgatgcgtcaggacactaatatgctgtttgttcgcgtcggggaagaaaatgctgccgcgttaggcgaatacatgaaagtgagaaacgtgctgattaacgcctcgccgattgtccgcctggtgacgcatcttgacgtctcgcgcgaacaactggcggaagtcgccgcccactggcgcgcattcctggcgcgttaa

SEQ ID NO: 458196 - DNA, 1431 bp, Shigella boydii
gtgccgcaacgcattttagttctcggtgccagtggctacattggtcagcatctggtgcgcacactcagccagcaagggcatcagatcctggcggcggcacgtcatgtcgacaggcttgcaaagctgcaactggcaaacgtcagttgccataaagtcgatctcagctggccggataaccttccggccctgttgcaggatatcgataccgtctattttctggtgcacagcatgggcgaaggcggcgattttatcgctcaggagcgccaggtggctctcaacgtccgcgatgcgctacgtgaagtaccagttaagcaattaatctttctcagttcgttgcaggccccgccacatgagcagtcggatcatctgcgtgctcgtcaggctacggcggacattcttcgtgaagcgaatgtacctgtgaccgaacttcgggccggaattatcgttggcgcaggttcagcggcgttcgaagtcatgcgcgatatggtctacaacctgccagtgttaacgccgccacgctgggtacgttcacgcaccacgcccatcgcgctggaaaacttgctgcactatctggtggcgttgttagatcatccggccagcgaacaccgcatcttcgaagccgccggaccagaggtgctcagttatcagcaacagtttgaacattttatggcggtgagcggtaagcgccgctggttgatccccatccccctccccacccgctggatttcggtgtggtttctcaatgtgattacttccgtaccgcccaccaccgccagggcgttgattcaggggctgaaacacgatctgctggcggatgataccgcgctacgtgcactcatcccacaacggctgatcgctttcgatgacgcggtacgtagcacgttgaaagaggaggaaaaactggtcaactccagcgactggggctacgacgctcaggcctttgcccgctggcgaccggagtacggttattttgccaaacaggcggggtttaccgttaaaacgtccgccagccttgctgctttatggcaggtagtgaaccaaatcggcggtaaagagcgttatttctttggcaatattttgtggcagacacgggcgttgatggaccgcgcgatcggtcataagctggcgaaaggccgcccggagcgcgaatatttacagactggcgatgcggtagatagctggaaagtgattgtcgttgaaccggaaaaacaacttacgttgttatttggcatgaaagcgccggggctgggacgactgtgttttagcctggaagataaaggcgactatcgtactatcgatgtccgcgctttctggcatccgcacggtatgccggggctgttttactggttattgatgatccccgcgcatctgtttatttttcgcggaatggcaaaacaaatcgccagactggcagaacaaagcacagattaa

SEQ ID NO: 458197 - DNA, 1014 bp, Shigella boydii
atgaaggtactggttaccggcgccaccagcggcttaggtcgaaacgcggtagagtttttatgccagaaaggcatcagcgtgcgagcgaccggtcgcaacgaggcaatgggcaaattgctggaaaaaatgggcgcagagtttgttccggcggatctgaccgagctggtttcatcacaagctaaagtgatgctcgcgggcattgatacgctgtggcactgctccagctttacctcaccctgggggacacaacaggctttcgatctggctaacgttcgcgccactcgccgcctgggtgaatgggctgtcgcctggggtgtgcgtaactttattcatatctcttccccctccctgtacttcgattatcaccaccatcgcgatattaaagaagattttcgccctcaccgcttcgccaacgagtttgcccgcagcaaagcagccagcgaagaagtgatcaatatgttttcgcaggcgaatccacaaacgcgctttactattctgcgcccacaaagtctgttcggaccgcacgataaagtctttattccccgtctggcgcatatgatgcaccactacggcagtattctgttaccgcatggcggcagtgcgctggtcgatatgacctactatgaaaatgccgtgcacgcaatgtggctggcaagccaggaagcctgcgataagctaccttccgggcgtgtgtacaacatcaccaacggcgagcatcgcacactgtgcagcatcgtgcagaagctgatcgacgagttgaatattgactgtcgtattcgttccgtcccctacccgatgctggatatgatcgcccgcagcatggagcgtttaggccgcaagtcagcaaaagagccgccgctgacccactacggcgtctccaagttgaattttgactttacgctggatattacgcgtgcgcaggaagagttaggttatcagccggtcatcaccctggatgaaggtatcgagaaaactgccgcctggctacgcgaccacggaaaactgccgcgctaa

SEQ ID NO: 458198 - DNA, 831 bp, Shigella boydii
atgagaagagtcttctggctggtcgctgccgctctgttattggcagggtgtgcaggcgaaaaaggcattgtcgagaaagagggatatcagcttgatacccgacgccaggcgcaggcggcgtatccgcgcattaaagtgctggtgatccactacaccgcagatgattttgatagctcgctggcgacactgaccgataagcaggtcagctcgcattatctggtccctgcggtaccaccgcgatacaacggtaaaccgcgcatctggcaactggtgccggaacaagaactggcctggcatgcggggattagcgcctggcgcggggcaacgcgccttaacgacacctctattggcattgagctggaaaaccgtggctggcaaaaatcggccggagtgaaatattttgccccgtttgaaccggcacagattcaggcgcttattccactggcgaaagatattattgcccgttatcacatcaagccggaaaacgtagtggcacatgcggatatcgcaccgcagcgcaaagacgatccggggccattatttccctggcagcaactggcgcagcaggggattggtgcctggccggatgcgcagcgggttaacttttaccttgccgggcgcgcgccgcacacaccggtagataccgcgtcattgctggagcttttggcgcgctacggttatgacgttaaacctgatatgacaccgcgcgagcagcggcgcgtgattatggcattccagatgcatttccgcccgacgttatataacggcgaagcggatgcagaaactcaggcgattgccgaagcattgctggagaaatacgggcaggattag

SEQ ID NO: 458199 - DNA, 324 bp, Shigella boydii
atgcaattttctacaaccccaactctggaaggccagaccatcgttgaatattgcggtgtggtgaccggcgaagcgattttaggtgccaatattttccgtgatttctttgccggtatccgcgatatcgttggcggacgttccggtgcgtatgaaaaagaactgcgtaaagcacgggagatcgcctttgaggaattaggctcccaggcgcgggcgctgggggccgatgccgtcgtcggtattgatatcgactacgaaacggtcgggcaaaacggcagtatgctgatggttagcgtcagcggtacggcggtgaaaacgcgtcgatga

SEQ ID NO: 458200 - DNA, 516 bp, Shigella boydii
atgcgctacagcaaattgacaatgcttatcccctgcgcactgctcctcagtgcctgcaccacagtcactccagcttataaagataacggcacacgcagtggtccttgcgttgaaggaggcccgggtaacgtggcccagcaattttatgactaccgcattttgcaccgcagcaacgacatcaccgccttgcgcccttatctgagcgacaaactggcgacactgcttagcgatgcctcccgggataataaccatcgggaactactgaccaacgatccattctccagtcgcacaaccttgccagagagcgcccgtgttgccagtgcctcaacaatcccgaatcgtgatgcgcgaaatattcctctgcgtgtggatctaaaacagggtgatcagagctggcaggatgaagtgttaatgattcaggaaggccagtgttgggtgatcgacgatgtacgctacttaggcggcagcgttcatgccacggcgggtacgctccgtcagtccatcgagaatcgctaa

SEQ ID NO: 458201 - DNA, 729 bp, Shigella boydii
atgagtattcaattaaacggcattaattgcttctacggcgcgcatcaggcgctgttcgatatcacgctggattgcccacagggcgaaacgctggtgttacttggccccagcggcgcgggtaaaagctcgctgctgcgtgtactcaatctgcttgagatgccgcgctccggtacgctcaacattgcaggcaaccatttcgatttcaccaaaacaccctctgacaaagcgattcgcgatttgcgtcgtaacgttggcatggtgtttcagcaatacaacctgtggccgcatctgaccgtgcagcaaaacctgattgaagcgccctgccgtgtactggggttgagtaaagatcaggcgctggcccgtgcagaaaaactgctggaacgtctgcgtctcaaaccttatagcgatcgttacccgctgcatctttctggtggtcagcagcagcgtgttgctattgcccgtgcgttgatgatggaaccgcaggtactgctgttcgatgaaccgaccgccgcactggacccggaaattacggcacaaatcgtcagcatcattcgtgagctggcagaaacgaatattacccaggtgatcgtcacccacgaagttgaagtggcgcgtaaaaccgccagccgagtggtgtatatggaaaatggtcatatcgtagaacaaggcgacgcgagctgctttaccgagccgcaaaccgaagcatttaaaaactatctctctcactaa

SEQ ID NO: 458202 - DNA, 732 bp, Shigella boydii
atgaaaaaagttctgattgccgcgttaattgcaggttttagtctttccgccacagctgccgaaaccattcgttttgctaccgaagcatcctatcctccgtttgaatcgattgatgcaaacaaccagatcgttggttttgacgtcgacctggcacaagcgctgtgtaaagagattgatgcaacctgcactttctctaaccaggcgtttgacagcctgatcccaagcctgaaattccgtcgcgtagaagccgtgatggcgggcatggatatcactccggagcgtgaaaagcaggtgctgtttaccaccccgtactatgacaactctgccctgtttgtgggtcagcaaggcaaatacaccagtgttgatcagctgaaaggcaaaaaagtcggcgtacagaacgggacgacacaccagaaattcattatggataagcacccggaaatcactaccgttccgtatgacagctaccagaacgcaaaactggatctgcaaaacgggcgtatcgacggcgtcttcggtgacaccgcagtggtcactgagtggctgaaagataacccgaaactggcggcggtgggcgacaaagtgaccgataaagattacttcggcactggcctcggcatcgcggtacgtcagggcaacactgagctgcagcagaaactcaacactgcgctggaaaaagtgaagaaagatggcacttacgaaaccatctacaacaaatggttccagaagtaa

SEQ ID NO: 458203 - DNA, 717 bp, Shigella boydii
atgaatgaattttttcctttagcaagcgccgccgggatgaccgtcggccttgccgtttgtgcattgattgtcgggctggcgctggcgatgttctttgcggtatgggagtcggaaaaatggcgtcctgtcgcgtgggcaggttcagcgctggtaaccattctgcgtggcctgccagaaattctggtggtgctgtttatctattttggctcctcgcagctgctgctgacgctttcggatggcttcactatcaatcttgggttcgtgcagatcccagtgcagatggacattgagaacttcgacgttagcccgttcctttgtggtgtcatcgctctgtcactgctgtatgccgcctatgcctcgcaaacgcttcggggcgcgttgaaagcggtgccggtgggtcagtgggagtctggtcaggcgctggggctgtcgaaatcggctatctttttccgtctggtgatgccgcagatgtggcgtcatgcgctgcctggcctcggtaaccagtggctggtgctgctgaaagataccgcgctggtcagtttgattagtgtgaatgatttaatgctgcaaacaaaaagcatcgctactcgtacccaggaaccatttacctggtacattgtggcggcggcgatttacctggtgatcaccctgctcagtcagtacattctcaaacgcattgacctgcgcgcgacacgttttgagcggaggcccagctaa

SEQ ID NO: 458204 - DNA, 669 bp, Shigella boydii
atgtttgagtatttacccgaactgatgaaagggctacacaccagcctgacgctaaccgttgcctcgctgattgtggcactgattctggcattgatttttaccatcatcctgacgctgaaaacgccggtgctggtgtggctggtgcggggttatatcacgctgtttaccggtacgccgctgctggtgcagatcttcctgatttattacgggccgggccagtttccgactttgcaggagtatccggcactgtggcatttgttgtcagaaccgtggttatgtgcgctgattgcgttatcgctgaacagtgcggcgtataccacgcagctgttttacggtgcaattcgtgcgatcccagaaggtcagtggcagtcctgtagcgccctgggaatgagcaaaaaagatacgctggcgatcctgctgccgtatgcctttaaacgctcgctctcttcttattccaacgaagtggtgctggtgttcaaaagtacctctctggcttacaccattacgctgatggaagtgatgggatacagccagttgttgtacggacgcacctacgatgtaatggtgttcggtgcggcagggattatttacctggtcgtcaacggcctgctgacgctgatgatgcgtctgatcgagcgcaaagcactggcattcgaacggcggaattaa

SEQ ID NO: 458205 - DNA, 732 bp, Shigella boydii
atgaaaaagttagttcttgccgctttacttgcttcctttactttcggtgcttctgccgcagagaaaatcaattttggcgtttcagccacctatccaccctttgaatctataggtgctaataatgagattgtcggctttgatatcgatctggcaaaagccttgtgcaaacaaatgcaggcagaatgtacttttactaatcacgcgttcgacagcctgatcccgtcactgaaattcagaaaatatgacgccgtaatctccggtatggatatcacgcccgagcgtagcaagcaggtatcgtttaccacgccctactatgaaaactcagccgtcgtgattgccaaaaaagatacctacaaagcgtttgccgatctgaaaggcaaacgtattgggatggaaaacggcaccacgcaccagaaatatattcaggatcagcaccccgaagtgaaaactgtctcctatgacagttatcagaatgcctttatcgatctgaaaaatggtcgtattgatggggtatttggtgacacagcggtggtaaacgaatggctgaaaaccaatccgcaactgggcgttgctactgaaaaagtgaccgatccgcaatacttcggcaccggtctgggcatcgctgtacgtccggataacaaagctctgctggaaaaactgaataacgcgctggcagcaattaaagctgacggtacatatcagaaaatcaatgaccagtggttcccgcagtaa

SEQ ID NO: 458206 - DNA, 1128 bp, Shigella boydii
atgcagtgcgcactttacgacgcgggtcgctgtcgttcctgtcagtggataacgcagctgattccagagcaactctccgctaaaaccgccgatcttaaaaatctgctcgccgattttccggttgaggaatggtgcgcgccggtgtcaggcccggaacaagggtttcgtaataaagccaaaatggtggtgagtggtagcgttgaaaaaccactgctcggtatgctgcatcgcgatggcacgccggaagacctttgtgactgcccgctttatcctgcctcttttgcgcccgtttttgcggcgctaaaaccgtttatcgcctgtgcggggttaacgccctacaacgtggcgcgtaagcgtggcgaactgaaatacattctgctgactgaaagccagagcgatggcggcatgatgctgcgctttgtactgcgttctgaaaccaaactggcacaactgcgtaaggcgctgccgtggttacaggaacaactaccgcaactgaaagttattaccgtcaatattcagccggtacatatggcgattatggaaggggagacggagatctacctgactgaacaacaggcgctggcagagcgttttaatgacgtaccgctgtggatccgtccgcaaagtttcttccagactaatccggcggtcgccagccagctgtacgctaccgcgcgcgactgggtacggcagctgccagttaaacatatgtgggatctgttctgcggtgtggggggctttggtttacactgcgcgacgcctgacatgcagttaaccgggatcgaaattgcgccagaggccattgcctgtgcaaagcagtcagccgctgaactgggcttaactcgtttacaatttcaggcgctggactccactcagtttgccactgctcagggggaggtgcaggagctggtgctggttaacccgccgcgccgcggcattggtaaaccgctgtgtgattatctctcaacgatggcaccgcgttttatcatctactccagctgtaacgcccaaactatggcgaaagatatccgcgaactgcctgggtttcgcatcgaacgggtacagctttttgatatgttcccgcacaccgcgcactatgaagtgctgacgctgctggtgaagcaataa

SEQ ID NO: 458207 - DNA, 489 bp, Shigella boydii
atggaagacgaaacgttgggattttttaagaaaacatcttcatctcatgctcgcctgaatgtgcctgcgctggtgcaggtagcggcgctcgccattattatgatccgtggcctcgacgtgctgatgattttcaatacgctgggcgtgcgcggtattggcgagttcattcatcgcagcgtacaaacctggagcttaacgctggtatttttaagcagtctggtgctggtttttatcgagatctggtgtgcgttttcactggtgaaagggcgtcgctgggcgcgctggctatatctgctgacacaaatcaccgccgcaagttacttgtgggcggcttcgctggggtatggttatccggagctgttcagcattcccggtgaatcaaaacgtgaaatcttccatagcctgatgctgcagaagctgccggatatgctcatcctgatgctgctgttcgttccctcgaccagtcggcggttcttccagttgcaataa

SEQ ID NO: 458208 - DNA, 846 bp, Shigella boydii
atgaataatttaccggtagttcgttcgccctggcggattgtgattttgctgctgggctttacctttctctacgcgccaatgctgatgctggttatctattcgtttaacagctcgaagctggtgacggtgtgggccggctggtcaacgcgctggtatggtgagttattgcgcgatgacgcgatgatgagtgcggttggtttaagcctgacaattgctgcctgtgcggcaacggcggcggcgatcctcgggactattgcggcggtggtgctggtgcgctttggcaggtttcgcggatcaaatggctttgcctttatgatcaccgcgccgctggtaatgccagatgtcatcacgggcttgtcgctgttgttattattcgtcgcgcttgctcatgccattggctggcctgcggaccgcggtatgcttaccatctggctggcgcatgtcactttctgtacggcttatgtggcggtcgttatttcgtcgcgtctgcgggaactggatcgctcgatagaagaagcagcgatggatctcggtgcgacgccgctgaaagtgtttttcgtcattacgctaccgatgatcatgcctgcgatcatttctggctggttactggcttttactttgtcgcttgatgatctggtgatcgccagctttgtttccgggccgggagccaccacgttaccgatgctggtcttttccagcgtgcggatgggggtgaatccggaaatcaacgcccttgcaacgttaattctcggtgcggtcggaattgtcggatttatcgcctggtatctgatggctcgcgcagaaaaacagcggatacgcgatatccagcgtgcaagacatggctga

SEQ ID NO: 458209 - DNA, 954 bp, Shigella boydii
atgaatacacttgaacctgctgcccagtcgaaaccgccgggcggatttaagctgtggttgtcgcagctgcaaatgaagcatgggcgcaaactggtcattgcgttgccatatatctggttgatcttgctgtttctgctgccatttctgattgtctttaaaataagcctggcggagatggcgcgcgctattccaccttataccgaactgatggagtgggctgacgggcaactgtccatcactcttaatctcggtaattttctgcaactgaccgacgatccgctatatttcgatgcttatctccagtcgctacaggtggctgcgatttcgacattttgctgtttactgatcggctatccgctggcgtgggcggtggcgcacagtaagccttcgacccgtaatattttattactactggtgatcctgccgtcgtggacctcgtttctgatccgcgtttatgcctggatgggaatattaaaaaacaacggtgtactgaataattttctgctgtggctgggggttatcgatcaaccgctgaccattcttcataccaatctggcagtttatattggcattgtttacgcctacgtgccgtttatggtgctgccgatttataccgcgttgattcgtattgattattcgctagtggaagcagcgctggatctcggtgcacgaccgctgaaaacgttctttactgtgatcgtgccgctgactaaaggtgggattattgccggatcgatgctggtgtttatcccggctgtgggcgagtttgtgatcccggaactgctcggtggcccggacagcatcatgatcgggcgcgtgctatggcaagagtttttcaataaccgcgactggccggtggccgcggcggtagcgatcatcatgttgctgctgctaattgtgccgataatgtggttccacaaacaccagcaaaaaagcgtgggagaacacggatga

SEQ ID NO: 458210 - DNA, 1134 bp, Shigella boydii
gtgaatgacgctatccctcgcccgcaggcgaaaacccgtaaggcgctgacgccgctattagaaatccgcaacctcaccaaatcctacgatggtcagcatgcggtcgatgatgtcagcctgaccatctacaaaggtgaaatcttcgcgctgctgggcgcttccggctgtggcaagtccacgctgctgcgtatgctggcaggttttgaacaaccttctgccgggcagataatgctcgatggcgtcgatttgtcacaggtgccgccttacctgcgccccatcaatatgatgtttcagtcttacgcgctgtttccgcatatgaccgtggaacagaacatcgcttttggcctgaaacaggacaaactaccgaaagcggaaattgccagtcgggtccatgagatgctcggcctggtgcacatgcaggagttcgccaaacgcaaaccgcatcagctttccggtggtcagcgacagcgtgtggcgctggcccgaagccttgccaagcgcccgaaactattactgctcgacgagccgatgggcgcgctggataaaaagctgcgtgaccggatgcagcttgaagtggtggatattctggagcgtgtcggcgtgacctgtgtgatggtcactcacgatcaggaagaggcgatgacgatggcgggacgtatcgccattatgaatcgcgggaaatttgtccagattggcgagccagaagagatctacgaacatccaaccacccgctacagtgctgaatttatcggttcggttaatgtctttgaaggtgtactcaaagagcgtcatgaggatgggcttgtgctttattcgcctgggctggtgcatccactgaaagtcgacgcggatgcctcggtggtcgataacgtgccggtacatgtggcgctgcgcccggaaaaaatcatgctttgcgaagagccgcccgccaatggttgtaacttcgcggtgggggaggtgatacacattgcctatctcggcgatctttcggtgtatcacgttcgtctgaaaagtgggcagatgattagcgcccagctacaaaacgcccatcgtcatcgtaaagggttaccgacctggggcgacgaagtgcgtttgtgctgggaagtggacagctgtgtggtgctgacggtttaa

SEQ ID NO: 458211 - DNA, 1107 bp, Shigella boydii
atgaccgccttaaataaaaaatggctttcgggtctggttgcgggtgctctgatggccgtctctgtcggcacgctcgcggctgaacaaaaaacactccacatttataactggtctgattatatcgcccctgacacggtggccaattttgaaaaagaaaccggtattaaagtcgtctacgatgttttcgactctaacgaagtactggaaggcaaattaatggcgggtagcaccggctttgacttggtggttccatctgccagctttcttgaacgccagttgactgcgggagttttccagccgctggacaaaagcaaattgccggagtggaagaatctcgacccggagctgctgaagctggtcgccaaacacgatcccgacaataaatttgctatgccctatatgtgggcgacgaccgggattggctataacgttgataaagttaaagctgtgctgggcgaaaacgcgcccgtcgatagctgggacttgatcctcaaacctgaaaatctggaaaaactgaaaagctgcggtgtctctttcctggatgcgccagaagaagtttttgctaccgtgttgaattatctcggcaaagatcccaacagcactaaagcggatgattacaccggaccggcaaccgatctgctgttaaagctgcgcccgaacattcgttatttccattcatctcaatacattaacgacctggcaaacggcgatatttgcgtcgctatcggctgggcaggtgatgtctggcaggcgtcaaaccgcgcgaaggaagcgaagaatggagtgaatgtctcgttctcgattccaaaagaaggggcgatggcgttctttgatgtattcgccatgcctgcggatgccaaaaacaaagacgaagcctatcagttcctgaattacctgctgcgcccggatgtagtagcgcatatttccgaccatgtgttctatgccaacgccaataaagcagccacgccgctggtgagtgcggaagtccgtgagaacccgggtatttatcctccggcggacgttcgtgcgaagctattcactctgaaagtaccgaaaatcgaccgtgtgcgcacccgcgcgtggaccaaagtgaagagcggaaaataa

SEQ ID NO: 458212 - DNA, 477 bp, Shigella boydii
atgacatcgctggtcgttcctggtctggatacgctgcgtcaatggctcgatgacctggggatgagtttttttgaatgtgataactgtcaggctctgcatctgccccatatgcagaatttcgacggtgtctttgatgccaaaatcgatctgatcgataacacgatcctgttttctgccatggcggaagtccgaccttcagccgtattgccgctggcggcggatttatctgccatcaatgccagttcgctgaccgtgaaagcatttcttgatatgcaggatgataatctgccaaagctggtggtttgccagtctttatccgttatgcagggcgtaacctacgagcagtttgcatggtttgtgcgtcagagcgaagagcagatttcgatggtcattcttgaagctaatgcccatcaactgctgttaccgactgacgatgaagggcaaaacaacgttaccgaaaactatttcctccactga

SEQ ID NO: 458213 - DNA, 903 bp, Shigella boydii
gtgaaaattgccatattgtcccgggatggaacgctctattcgtgtaagcggctgcgtgaagccgctatacagcgcggtcacctggttgaaattcttgatccgctttcttgctacatgaacataaatcctgcggcgtcttctattcactacaaaggccgcaagttaccccattttgacgcagtgatcccgcgtattggcaccgccattaccttttatgggacggcggcactgcgccagttcgagatgctggggagctatccgctcaatgagtcggtcgccattgcccgggcgcgtgacaaattgcgttccatgcaactgctggcgcgtcagggcatcgacctgcctgtcacgggcattgcgcattcgccggatgataccagcgatttaatcgacatggtcggtggtgcgccgctggtggtcaagttggttgaaggcacgcagggaattggcgtcgtgctggcggagacgcgtcaggcggcggaaagcgtgattgacgctttccgcggtctgaacgcgcatattctggtgcaggaatatatcaaagaggcgcaagggtgcgatatccgctgtctggttgttggcgatgaagtggtcgctgcgattgaacggcgggcgaaagagggcgattttcgttccaatttgcatcgtggcggcgcggcaagcgtcgccagtatcacaccacaggagcgtgaaatcgcgataaaagccgcgcgaacgatggcgctggacgttgctggtgtggatattctgcgtgctaatcgcgggccgttggtgatggaagtgaatgcgtcgccggggctggaaggaatagaaaaaaccactggtatcgacatcgcgggtaaaatgatccgctggatcgaacgctacgctacgacagaatattgcctgaaaacgggtggttag

SEQ ID NO: 458214 - DNA, 723 bp, Shigella boydii
atgacgccaaccattgaacttatttgtggccatcgctccattcgccatttcactgatgaacccatttccgaagcgcagtgtgaggcgattattaacagcgcccgtgcgacgtccagttccagttttttgcagtgtagtagcattattcgcattaccgacaaagcattacgtgaagaactggtgacgctgaccggcgggcaaaaacacgtagcgcaagcggcggagttctgggtgttctgtgccgactttaaccgccatttacagatctgtccggatgctcagctcggcctggcggaacaactgttgctcggtgtcgttgatacggcaatgatggcgcagaatgcattaaccgcagcggaatcgctgggattgggcggggtatatatcggcggcctgcgcaataatattgaagcggtgacgaaactgctgaaattaccgcagcatgttctgccgctgtttgggctgtgccttggctggcctgcggataatccggatctcaagccgcgtttaccggcctccattttggtgcatgaaaacagctatcaaccgctggataaagacgcactggcgcagtatgacgagcaactggcggaatattacctcacccgtggcagcaataatcgccgggatacctggagcgatcatatccgccgaacaatcattaaagaaagccgcccatttattctggattatttgcacaaacagggttgggcgacgcgctaa

SEQ ID NO: 458215 - DNA, 288 bp, Shigella boydii
atgcgcgcgatcggtaaattgcctaaaggcgtgttgatactggaatttatcggaatgatgctactggcggtggcgctgctgtcggtaagcgactccctgtcgctgcctgagccattttctcggccagaagtgcagattctgatgatttttctcggtgttttgctcatgcttcccgctgcggtggtggttattcttcaggtggcaaaacgtcttgccccacagctgatgaaccgtccaccgcaatattcacgttcagaaagagaaaaagataatgacgccaaccattga

SEQ ID NO: 458216 - DNA, 258 bp, Shigella boydii
atgcaaaccgttatttttggtcgttcggcttgcccttactgtgtgcgtgcaaaagatctggctgagaaattgagtaatgaacgcgatgattttcagtatcagtatgtagatattcgtgcggaagggatcactaaagaagatctacaacaaaaggcaggtaaacccgtagaaaccgtgccgcagatttttgtcgatcagcaacatatcggcggctataccgattttgctgcatgggtgaaagaaaatctggacgcctga

SEQ ID NO: 458217 - DNA, 378 bp, Shigella boydii
gtgaaacataaacaacgttgggcgggggcaatctgctgttttgtcctcttcattgtggtgtgcctttttctggcgacgcacatgaaaggcgcttttcgggctgccgggcatcctgaaatcggcttgctgtttttcattcttcctggagcagttgccagtttcttttcacagcgtagagaagtcctgaaacctctatttggcgcaatgctggcggcaccctgttcaatgctcattatgcggctgtttttttcaccgacgcgctcattctggcaagagctggcatggttactaagcgcggtgttctggtgtgcgctgggggcactgtgtttcttatttatcagtagtttgtttaaaccacagcacagaaaaaatcagtaa

SEQ ID NO: 458218 - DNA, 1686 bp, Shigella boydii
gtgaatataaacgtcgccgaattgttaaatgggaattacattctgttattatttgtggtcctcgcgcttgggctatgtctcggaaagttacgacttggttcgatccaactgggtaattccattggcgttttagtcgtatcgctgttattaggccaacaacatttcagcattaacaccgatgcgcttaatcttggctttatgctgtttattttctgcgtcggggtcgaagccggaccgaactttttttccattttttttcgcgatgggaaaaattacctaatgttagcactggtgatggttggcagtgcgctggtgatcgccttagggttaggtaagctgtttggctgggatattggcctgacggccggtatgttagcaggctctatgacgtcgacaccggttctggtcggtgctggcgatacactgcgtcattccggcatggaaagcaggcagctctcactggcactggataatctgagcctcgggtatgccttaacctatttaatcggtctggtgagtttgattgttggtgcgcgttacttgccgaaattgcagcatcaggacttacagaccagcgcccagcaaatcgcccgcgaacgtggcctggacactgatgccaaccgtaaggtttatttaccggtgatccgcgcctatcgcgtcggcccggagctggtggcctggaccgacggcaaaaatctgcgtgaactgggtatttatcgacaaaccggctgctacattgaacgtattcgacgtaacgggattctggcaaatccagacggtgatgccgtgctacaaatgggcgatgaaatagcgttggtaggctatcccgacgcccatgcccgactcgatcccagcttccgtaacggtaaagaagttttcgatcgtgaccttctcgacatgcgtatcgtcactgaagaagtggtcgttaaaaaccataacgctgtaggtaaacgtctcgcacaactgaagttgaccgatcacggttgcttccttaaccgcgtcattcgtagccagattgagatgccgatagatgacaacgtcgtgcttaacaaaggtgacgttttacaagtcagcggtgatgcccgtcgcgtaaaaaccatcgccgatcgcatcggctttatctcgattcacagccaggtcactgacctgctggcattttgcgccttctttgttattgggctgatgatcgggatgatcaccttccagttcagcacattcagtttcggcatggggaacgctgccgggttgttattcgccggaattatgctgggctttatgcgtgctaaccacccgaccttcggttacattccgcaaggtgcattaagcatggtgaaagagttcggcttgatggtgtttatggcaggcgttggtctgagcgccggtagcggtattaataacggcctgggcgcgattggcggtcagatgttgattgccggattaattgtcagtcttgtgcccgtggttatctgtttcttgttcggtgcttatgtattgcgaatgaaccgcgcactgttgttcggcgcaatgatgggcgcacgcacctgcgcgccggcaatggagatcatcagtgatacagctcgcagtaacatccctgcgctgggctatgcgggcacctacgcaatcgccaacgtcctgctgacgctggcagggacaatcatcgtcatggtatggccaggattaggataa

SEQ ID NO: 458219 - DNA, 219 bp, Shigella boydii; identical to SEQ ID NO: 10578

SEQ ID NO: 458220 - DNA, 1101 bp, Shigella boydii
gtgaatttcagctctgaactgcttaacaaaggcaacaaaactccggcattcagcatcagtattgaaggcagggatatcaccactgtgctggacaaccgcctgatggggctgacgctgacggataaccggggctttgaagcggaccagcttgatctggagctggacgacgccgatggaaaaatcgtgctgccgcgccgtggggctgtcattacgctggcgctgggctggaagggacagccgcttttcccgaaaggggcattcacggtggacgagattgaacacactggcgcaccggatcgcctgactatccgggcgcgaagtgctgattttcgtgaaacgctgaatacccgccgtgaaaagtcgtggcacaagaccaccgttggggaagtggtgaaggaaatagctgcgcggcacaaactgaagatggcattgggtgaagacttgtcggataaactcgtggagcatatagaccagactaatgagagtgacggcagttttttgatgcggctggcgcgccagtacggtgctattgcgtcggtgaaaaatggcaatctgttattcatccggcaggggcagggtaaaagcgccagcggtaaaccactaccggtgatcactatcacacgcaaggacggcgacagtcaccgctttaccctggcagatcgcggagcttacacgggcgtcattgccagctggttgcatacccgcgaacccgcgaagaaagaaagcaccacggtgaagcgtaagcgcaggactaagaagcagaagaaagagccggaagcgaagcagggcgattacctggtgggtacggatgaaaacgtgctggtacttaatcgcacttatgccaaccggagcaacgccgaacgggcagcgaaaatgcagtgggaacgcctgcaacgcggcgttgcatcattctcgctacaactggcggaagggcgggcagatctctacacagaaatgcctgtgaaggtcagtggctttaaacagccgatagatgatgcggaatggaccattacgactctgacgcatactgtcagcccggataacggttttacgaccagtctggagcttgaagtgaggattgatgatttcgaaatggaatga

SEQ ID NO: 458221 - DNA, 486 bp, Shigella boydii
atgatcatggtgctgggattgtacgtgtttatgctgcgcaccgtgccgtatcaggagctgcagtatcaacgcagctggcgacatgcggcaaacagccgggtaaaccgacgcccgtcaacgcagtttctgggaccggacaacgacatgctgacgctttctggtgttcttatgccggaggtaacgggcggcaggctgtcgttgctggctctggagcagatggcagaacagggaaaagcatggcccctgattgaaggcagcggcacgatttacggcatgtatgtgattgagggactgaatcagactaaaacggagtttttccgcgacggtatgccgcgccggattgagttcaccctgtcgctaaaacgcgtggatgaatccctgtccgatatgttcggtgatctcagtgcgcaactgaataatctgcagggaacggcaacatctgccttaagcgatatcagtaaaacggtgggagggctgctgtcgtga

SEQ ID NO: 458222 - DNA, 3078 bp, Shigella boydii
atgagtgacaataacctgcgtctgcaggtgattcttaatgcggttgacaaactcacccgcccatttcgatccgcgcaggccagttcaagagaactggctgctgctgtcaaaaaatcccgcgatgcaataaagcagcttgatcaggccgggagcagtctggacagcttccgaaagctgcaggcagaaaatcagaaattaggcgacaggctgaactatgcccgccagcgtgcaaatttgctcagtcaggaactgggagcgatggggccgccttcgcaacgtcaggttgttgctctgggccgtcaacggctggctgttcagcgcctggaagaacgccagaaaaagctgcagcagcagacggcgcttgtgcgtgcagaactttatcgtgctggtatttcagctaatgatggcgccagtgcgacggcccgcattacccgtgaaacgatgcgttataacaggcagctttctgagcaggaagcgaggttacgacgtgtcggggagcaacagcgaaaaatgcacgccgcccggggggcttacgccaggcgtcttgaggtaagggatcgtattgcaggtgccggagccaccaccacggctgcagggctggcaatgggcgcaccagtgatggcggcagtaaaaagctataccagcatggaagatgccatgaaaggtgtggcaaagcaggtcaatggtctgcgtgacgataatggcaaccgcactgcgcgtttttacgaaatgcagggtgccatcaaggctgccagcgaacagttgccgatggaaaacggtgctgtggacttcgccgcactggttgaaggtggtgcgcgcatgaacgtcgcaaaccctgacgacagctgggaagaccagaaacgtgacctgctggccttcgccagcacggcggcaaaggcggcaacagcctttgaactgccagcggatgaactgtcagaaagtctggggaaaatcgcccagctctacaaaatccctacccgcaatattgagcagctcggtgatgcgctgaactatctggatgataacgccatgtcgaaaggggcggacatcattgatgtcatgcaacgcctgggcggtgtggctgaccgtctggattatcgtaaagcggcggcgctgggttccaccttcctgacactcggcgctgcgcctgaggttgcagccagtgcagcaaacgcgatggtgcgtgaattgtccattgccaccatgcaaagcaagagtttctttgaagggatgaatctgctgaaactcaatccagaagtgattgaaaagcagatgacgaaggatgcgatgggaactatccagcgggtgctggagaaggtgaatgcgctgccacaggataagcgcctgtctgccatgaccatgttgtttggtaaagagtttggcgatgacgcagcgaaactggcaaacaacctgccggaacttcagcgccagttaaaactgactgcgggcaatgatgcgctcggttccatgcagaaagaatccgacatcaacaaggattcactttctgctcagtggttgctggtcaaaaccggagcacagaacaccttcagcagcctgggggaaacgctgcgccagccgctgatggatattctgtacacggtgaaaagcgtcacgggggcgttgcgtcgctgggtggaagctaacccggaactgacgggcactctgatgaaagtagccgctgtggtagctgccgttaccgtgggcctcggcaccttagcggtggcgctggctgcagtgctggggccgctggcagtcatccgtctgggattctctgtgctgggtatcaaaacgttaccttccgttacggcagcagtaacccgaaccagcaacgcgttgtcctggctggctggcgcaccactggcactgctgcgacgcgggcttgcttcatcgggcaacgctgcaggtttacttactgcgccgttgtcgtctttgcgccgcacggcatcactgacgggaaatgtcctgaaaactgtagcaggtgcgccggttgcacttttgcggtctggattatccggtttacgtgcggttgctgtgatgtttatgaatccactggcggtactacgcggcggactggctgccacaggcacggtgctgcgtatgctcgcatccggtccactggcgatgctgcgcgttgccctgtatgccgtctctggtctgttaggtgctctgctcagtctgataggtcttgtggttactgcactggcgggtgtggcgctggttgtctggaaatactggcagcccatcaccgcatttctcggtggcgtggtggaaggattcaaagcggcggcaggtcctgtcagtgccgcgttcgaaccgcttaagcctgtgttccagtggattggcgacaaagtacaggcgctgtggggctggtttactgatctgctgacgcccgttaagtcgacctctgccgaactgcagagtgcagcggcaatggggcgacgattcggggaggctctggcggaagggctgaatatggtcatgcatccgctggactccctgaaatccggcgtttcctggttgctggagaaacttggcattgtcagtaaagaggccgcaaaggcgaaactgccggaaagcgtgacgcgtcagcaacctgcgacggtgaatgcagacggtaaagtgatgatgccatcgggtggttttccgtcatggggatatggctttgcggggatgtatgacagcggcgggtatatcccgcgcgggcagtttggcatcgtcggtgaaaacgggccggaaattgttaacggcccggcaaatgtgaccagccggagaaatacagctgcactggctgccgttgttgccggaatgatgggtgttgctgctacgccagcagagcttccaccgttgcaccctttggcacttcccgcgaaaggcggtgaagcgatggtgagtcgtgcagccactgtgccgcccgttcaacggattgaggcaccgatgcagatcatcattcaaacgcagccaggacaaagtgcgcaggatattgcgcgggaggtggcccgccagcttgatgaacgtgaacgcaggctgaaggcaaaagccaggagtaactacagcgatcaggggggatacgacgcatga

SEQ ID NO: 458223 - DNA, 303 bp, Shigella boydii
atgagcgataagcagactgaaaagaccattcaactggatactcccatcatgcgcggtaaaacagaaattaccgaaattgtgttgcgtaaaccgcagtccggtgcgctgcgcggcacacgcctgcaggccattatggatatggatgtgaacgcgatgatgaccgtgatcccccgcatctccagtccggcactgactgcacaggaaattgcagagatggacccggcagatctcactgccatgtcggttgaggttgtcacttttttgttgaagaagtcggtgcttgccggtttaccgacagcctga

SEQ ID NO: 458224 - DNA, 516 bp, Shigella boydii
atggctttaccacgcaaattaaaacacctgaacctgtttaacgacgggaacaactggcaggggatcgttgagtcgctgacgctgccgaaattcacccgcaaatatgagaagtatcgcggcggcggtatgcccggagcggtggatgtggatctgggactggatgacagtgcactggatacagaattttccattggtggtactgaactgctgctgtttaagcagatgggcaaagccacggtggatggcatccagctgcgctttaccggctctattcagcgtgatgataccggggaagtgcaggccgtggagcttgtggtgcgtggacgtcacaaagaagtagattccggcgagtggaagacgggcgaaagcaacactaccaaagtgaccagtaccaacagctacgcgaagctgaccatcaatggtgaggtgctctatgaagtggacctgatcaacatggtggaaattgtggacggtgtggacctgatggaagcgcaccgcaacgccctcggcctctga

SEQ ID NO: 458225 - DNA, 1173 bp, Shigella boydii
atggctcaggattaccaccacggggtgcgcgttgttgaagtcaacgaaggcacccgatccattaccacggtgagcaccgccatcgtgggtatggtctgcacgggcgatgatgccgatgcaaaaatgtttcctcttaataaacctgtgctgatcactgatgtgctgaccgccagcggtaaagcgggtgagtctggcacgctggcccgttcgctggatgccatcgctgaccaggcaaaacccgtgaccgttgttgtgcgtgtgccgcagggtgaaacggaagaagaaaccacaaccaatatcattggcgcagtgaccgccgagggtaaaaaaacaggtatgaaagccctgttatctgcccagtcacagctcggcgttaaaccgcgcattctcggcgtgccaggtcacgacacgaaggcggtagctactgagttgctgagcgtggcgcaaagcctgcgtggatttgcttacctgtcagcgtatggttgcaagacggtgcaggaagcaatcacttaccgtgaaaacttcagtcagcgtgaaggaatgctgatctggcccgactttactggctgggacacggtgctgaatgccgaagcaacggcttatgccaccgcccgtgcgctcggtctgcgcgctaaaattgatgagcagaccggatggcacaaaagcctgtccaacgtgggcgtgaacggtgtcaccggaatttctgctgatgtgttctgggatctgcaggacccggcaaccgatgcaggtctgcttaaccagaacgatatcaccacgcttatccgcaaagacggtttccgcttctggggttcccgctgtctgagcgatgatccgctctttgccttcgaaaactacacccgcacggcgcaggtgctgatggacacgatggcagaagcgcacatgtgggcggtggacaaaccgctgaacccgtcgctggcccgcgacattatcgaaggtatccgcgccaaaatgcgtagcctggtcagtcagggctatctcattggtggtgattgctggctggacgagtcggtgaacgataaagacacgctgaaagccgggaaactcaccatcgattacgactacacgccagtgccgccacttgaaaacctgatgctgcgtcagcgcatcaccgatcagtacctagtgaatttctccagccaggtcagcgcgtaa

SEQ ID NO: 458226 - DNA, 303 bp, Shigella boydii; identical to SEQ ID NO: 458125

SEQ ID NO: 458227 - DNA, 1254 bp, Shigella boydii
gtgccacttcatcctggcacgacctcattggctgaaggtttaccttatgttggcctgaacgaacaggatgttcaggacgcccatgcgcgcttatcccgttttgcaccctatctggcaaaagcatttgctgaaactgctgccactggggggattattgaatcagaactggttgccattccagctatgcaaaaacggctggaaaaagaatatcagcaaccgatcagcgggcaactgttactgaaaaaagatagccatttgcccatttccagctccataaaagcacgcggcgggatttatgaagtcctggcacacgcagaaaaactggctctggaagcggggttgctgacgcttgatgatgactacagcaaactgctttctccggagtttaaacagttctttagccaatacagcattgctgtgggctcaaccggaaatctggggttatcaatcggcattatgagcgcccgcattggctttaaggtgacagttcatatgtctgctgatgcctgggcatggaaaaaagcgaaactgcgcagccatggcgttacggtcgtggaatatgagcaagattatggtgttgccgtcgaggaaggacgtaaagcagcgcagtctgacccgaactgtttctttattgatgacgaaaattcccgcacgttgttccttgggtattccgtcgctggccagcgtcttaaagcgcaatttgcccagcaaggccgtatcgtcgatgctgataaccctctgtttgtctatctgccgtgtggtgttggcggtggtcctggtggcgtcgcattcgggcttaaactggcgtttggcgatcatgttcactgcttttttgccgaaccaacgcactccccttgtatgttgttaggcgtccatacaggattacacgatcagatttctgttcaggatattggtatcgacaaccttaccgcagcggatggccttgcagttggtcgcgcatcaggctttgtcgggcgggcaatggtgcgtctgctggatggcttctatacccttagcgatcaaaccatgtatgacatgcttggctggctggcgcaggaagaaggtattcgtcttgaaccttcggcactggcgggtatggccggacctcagcgcgtgtgtgcatcagtaagttaccaacagatgcacggtttcagcgcagaacaactgcgtaataccactcatctggtgtgggcgacgggaggtggaatggtgccggaagaagagatgaatcaatatctggcaaaaggccgttaa

SEQ ID NO: 458228 - DNA, 1539 bp, Shigella boydii
atggcaatcactaaatcaactccggcaccattaaccggtgggacgttatggtgcgtcactattgcattgtcattagcgacatttatgcaaatgttggattccactatttctaacgtcgcaataccgacaatatctggctttctgggagcatcaacagacgaaggcacctgggttatcacctcgtttggtgtagcaaatgccattgcgatccctgttactggcaggttggcacaaagaataggcgaattaagattatttttactttcagtaacctttttttcgctgtcttcattaatgtgtagcctatcgaccaatcttgatgtgctgatattttttagagtcgttcaggggttaatggcggggccgttaattccactgtcacagagtttattattaaggaattatccgccagaaaaaagaacatttgctctggcattatggtcaatgaccgtgattatcgctccgatatgtgggccgatattgggcggttatatttgtgataactttaactggggttggatatttttaatcaatgtccctatggggattatcgtcctgacattatgcttaaccttacttaaaggaagagaaactgagacttcaccggtcaaaatgaatctaccaggactgaccctgttagtgctcggtgttggtggcttgcaaattatgcttgataaagggcgcgatctggattggttcaactcgagtacaataataatattaacagtagtatcagttatttctctgatctctttagtcatttgggagtcgacctcagagaacccgattcttgatctcagtttgtttaagtcccgtaacttcaccattggtattgtgagtatcacatgcgcgtatttattttactctggagcgatcgtccttatgccgcagttactccaggaaacgatggggtataatgcgatatgggccggacttgcttatgcgcccatcggcatcatgccactattaatttcacctttgataggacgttatggcaacaaaatagacatgcggttgttagtgacatttagttttttgatgtatgcggtttgctattactggcgttctgtgacatttatgccaacgattgattttacaggcatcattttgccgcagttttttcagggattcgccgttgcctgtttctttttacccttaacaacgatttcgttttcaggcttgccagataataaatttgccaatgcctcgagtatgagtaatttttttcgtaccttgtcaggatcagttggtacgtcgttgacaatgacgctgtggggacgacgcgaatcgttacaccatagtcagttgacagcaaccatcgatcaatttaaccccgtgtttaattcatcgtcacaaattatggataaatattatggttcgctttcaggagttcttaatgaaattaataatgaaataacccagcagtcactttctatttctgcaaatgagattttccgtatggcggctattgcttttatcttacttacggttttggtttggtttgcgaaaccgccgtttacagcgaaaggcgttgggtga

SEQ ID NO: 458229 - DNA, 1164 bp, Shigella boydii
gtggaacagattaattcaaataaaaaacattctaacagaagaaaatacttttctttattggtggtagttttatttattgcgttttcaggtgcctatgcctattggtcaatggaattagaagacatgattagtacagatgacgcctatgtcacggggaatgcagatccaatttctgcacaagtctcaggtagtgtcactgtcgttaatcataaagatacgaactacgttcgacaaggtgacattttagtttcactggataaaactgatgccactatcgcactcaataaagctaaaaataatctggcaaatattgttcggcaaacgaataaactatacttacaggataaacaatacagtgccgaagtcgcttcagcacgtattcagtatcaacaatctttagaagattataaccgtcgagtgccgttagcgaagcagggggttatttcaaaagaaacgctggagcataccaaagatacgttaataagtagcaaagcggcattgaatgccgctatccaggcttataaagcgaataaagctttagtaatgaacacaccattaaaccgtcagccacaagtcgttgaagcggcggatgcaactaaagaagcctggttggcgcttaaacgtacggatattaagagtccggttaccggctatattgcccagagaagtgttcaggtcggcgaaacagtgagccccggacaatcgttaatggctgtcgtaccggcacgtcaaatgtgggttaatgccaactttaaagaaacacaactcacggatgtgcggattggtcaatcggtcaatattatcagcgatctttatggtgaaaatgttgtgtttcatggtcgggtgacagggatcaatatgggaaccggcaatgcgttctccttattacctgcacaaaatgcgacagggaactggatcaaaatcgttcagcgtgtaccggttgaagtttctcttgatccaaaagaactcatggaacatcccttgcgtattggtttatcgatgacagcaactattgatacgaagaacgaagacattgccgagatgcctgagctggcttcaaccgtgacctccatgccggcttataccagtaaggctttagttatcgataccagtccgatagaaaaagaaattagcaacattatttcgcataatggacaactttaa

SEQ ID NO: 458230 - DNA, 615 bp, Shigella boydii
atgaacgcaataattattgatgaccatcctcttgctatcgcagcaattcgtaatttattgatcaaaaacgatattgaaatcttagcggagttgactgaagggggaagcgccgttcagcgggtggaaacacttaagcctgatatcgtcatcattgatgtcgatatccccggagttaacggtatccaggtgttagaaacgctgaggaagcgccaatatagcggaattattattattgtctccgctaaaaatgaccatttttacgggaaacattgtgctgatgctggcgctaatggattcgtgagtaaaaaagaaggcatgaacaatatcattgcggctattgaagctgcaaaaaatggctactgctatttccccttctctctcaaccggtttgttggaagtttaacgtccgaccagcaaaaactcgactccttatcgaaacaagaaattagtgtcatgcggtatattcttgatggcaaggataataatgacattgctgaaaaaatgttcatcagcaacaaaactgtcagcacttataaaagtcgcctgatggaaaaattagaatgtaaatcactgatggatctttacacattcgcgcaacgtaacaaaatcggctaa

SEQ ID NO: 458231 - DNA, 3594 bp, Shigella boydii
atgaagtttttaccctatttttttcttctctgttgtggtctttggtcgaccataagtttcgcagacgaagattacatcgaatatcgtggcatcagtagtaacaaccgtgtcacacttgatccagtacgtctgagcaacaaggaattacgttggttagcgagcaaaaaaaatcttgtgattgcagtacacaagtcccaaacggctaccttgttgcataccgattcgcagcaacgggttcgtggtattaatgctgattatttaaatcttttaaaaagagcgttaaatatcaaattaacactccgggaatacgccgatcatcaaaaagcaatggacgcgctggaagaaggtgaagtcgatatagtgttatcacatttagttgcttcgccgcctcttaatgatgacattgctgcaaccaaaccactgataattacctttccggcgctcgtcaccacccttcacgattcaatgcgaccgcttacctcatcaaaaccagtaaatattgctcgagtagcaaattatccccctgacgaggtaattcatcaatcatttccaaaagcaacaattatctcttttacaaatttatatcaggcattagcatccgtctcagccggacagaatgattactttattggtagtaacatcattaccagcagtatgatttcccgctatttcactcactccttaaatgtagtgaaatattataactcaccgcgtcaatataattttttcttgaccagaaaagaatctgtcgttcttaatgaagtactcaatcgatttgttgatgctttaacaaatgaagttcgctatgaagtttcacaaaattggcttgatacaggaaacctggcctttctgaacaaaccattagaactcactgaacatgaaaaacagtggattaagcaacatcccgatttaaaggtgctggaaaatccttactctcctccctattctatgacggatgaaaatggctcggttcggggcgttatgggggatattcttaatattattaccttgcaaacaggtttaaatttttctccgatcaccgtttcacacaatatccatgccggaacacagcttaaccccggtggatgggatataatacctggcgctatttatagtgaagatcgagaaaataatgtttcatttgcagaagctttcataacaacgccatacgtttttgtcatgcaaaaagcacctgacagtgaacaaacattaaaaaaaggaatgaaagttgccattccatattattatgagctgcattcgcaattaaaagagatgtatccggaggttgagtggataaaagtcgataacgccagcgctgcatttcacaaggtcaaggaaggtgaacttgatgctctggtcgcgacacagctaaattcgcgttacatgatcgatcattactatcctaatgaactgtatcattttcttattcccggcgttccgaatgcatcgctttcgttcgcttttcctcgcggagaaccggaacttaaggatattattaataaagcactgaatgcaattcccccaagcgaagttctgcgcctgacggaaaaatggattaaaatgcccaatgtgaccattgacacatgggacctctatagcgagcaattttatattgttacgacattatccgttttattagttggcagtagccttttatggggattctacctgttacgctcagttcgtcgtcgtaaagtcattcagggtgatttagaaaaccaaatatcattccgaaaagcactctcggattccttaccaaatccaacttatgttgtaaactggcaaggtaatgtcattagtcataatagtgcttttgaacattatttcactgcggattactacaaaaatgcaatgttaccattagaaaacagtgactcaccctttaaagatgttttttctaatgcgcatgaagtcacagcagaaacgaaagaaaatcgaacaatatacacacaggtatttgaaattgataatggcatcgagaaaagatgcattaatcactggcatacattatgcaatctgccagccagcgatcatgctgtttatatttgtggttggcaagatattaccgagacgcgtgatttaattcatgcactcgaagtagagagaaataaagcgatcaatgcaactgtcgcaaaaagtcagtttctggcaacaatgagtcacgaaataagaacaccaataagctccattatgggcttcctggaacttctgtcgggttctggtcttagcaaggagcaacgggtggaggcgatttcacttgcctacgccaccggacaatcactcctcggcttaattggtgaaatccttgatgtcgacaaaattgaatcgggtaactatcaacttcaaccacaatgggtcgatatccctactttagtccagaacacttgtcactctttcggtgcgattgctgcaagcaaatcgatcgcattaagttgcagcagtacatttcctgatcattacctggttaagatcgaccctcaggcgtttaagcaggtcttatcaaatttactgagcaatgctctcaaatttacctccgagggggcagtaaaaattacgacctccctggttcacattgatgacaaccacgctgttatcaaaatgacgattatggattctggaagtggattatcgcaggaagaacaacaacaactctttaaacgctacagccaaacaagtgcaggtcgccagcaaacaggatctggcttaggcttaatgatctgcaaagaattaattaaaaatatgcagggcgatttgtcattagaaagtcatccaggcataggaacaacatttacgatcacaatcccggtagaaattagccagcaagtggcgactgtcgaggcaaaagcagaacaccccatcacactacctgaaaagttgagcatattaatcgcggatgatcatccgaccaacaggctattactcaaacgccagctaaatctattaggatatgatgttgatgaagccactgatggtgtgcaagcgctacacaaagtcagtatgcaacattatgatctgcttattactgacgttaatatgccgaatatggatggttttgagttgactcgcaaactccgtgagcaaaattcttccttacccatctgggggcttacagccaacgcacaggctaacgaacgtgaaaaagggttaagttgcggcatgaacttatgtttgttcaaaccgttgaccctggatgtactgaaaacacatttaagtcagttacaccaggttgcgcatattgcacctcagtatcgccaccttgatatcgaagccctgaaaaataatacggcgaacgatctacaactgatgcaggagattctcatcactttccagcatgaaacgcataaagatctacccgctgcgtttcaagcactagaagctggcgataacagaactttccatcagtgtattcatcgcatccacggtgcggctaacatcctgaatttgcaaaagttgattaatattagccatcagttagaaataacacctgtttcagatgacagtaagcctgaaattcttcagttgctgaactctgtaaaagaacacattgcagagctggaccaggagattgctgttttctgtcagaaaaatgactaa

SEQ ID NO: 458232 - DNA, 1146 bp, Shigella boydii
atgacaaataatgaaagcaaagggccgtttgaaggcttattagttatcgatatgacacatgtccttaatggacctttcggaactcaacttctttgtaatatgggcgcaagggtaattaaagttgagccgccgggtcatggtgatgatacccgcacatttggtccctatgtggatggacagtcactctattacagttttattaatcatggcaaagagagtgtggttcttgatttaaagaatgattacgataaaagtatatttataaatatgctcaaacaagctgatgtattagctgagaattttcgcccaggtacaatggaaaaactggggttttcatgggaaacgcttcaagaaatcaacccgagcctcatatatgcttcatcgtcaggtttcggacataccggtccgctaaaagatgctcctgcctacgataccatcattcaggcaatgagcgggataatgatggaaacaggatatcctgatgctccgccagtgcgcgttggtacatctcttgcggatctatgcggcggtgtctatttattcagcggaatagtgagtgcactttatggccgcgaaaagagccagagaggggcgcatgtcgatatagcgatgtttgatgccacgctgagttttctggagcatggtctgatggcatatatcgcgacagggaagtcaccacaacgtctgggaaatcgccatccctacatggcaccttttgatgttttcaatactcaggataagccgattacgatttgttgtggtaatgacaagcttttttctgcgttatgccaggcactggagcttacggaactggttaatgatccccgatttagcagcaatattttacgcgtacaaaaccaggctattcttaaacaatatattgagcggacgttaaaaacgcaggcagctgaagtttggttagccagaatacatgaagttggtgtacccgtcgcgccgttattaagtgtggctgaggccattaaattgccacaaactcaggcgagaaatatgttgattgaagccgggggaataatgatgccgggtaatccgataaaaatcagcggctgcgcggacccgcatgttatgccgggagcggcaacgctcgaccagcatggggaacaaattcgccaggagttctcatcataa

SEQ ID NO: 458233 - DNA, 945 bp, Shigella boydii
atgctaacattttttattggcgatttattgcctattatcgtaatcatgctgttgggttattttagcggcagacgagaaactttttcagaagatcaagcccgcgcatttaataaactggtattaaactacgcgcttcctgcggctctatttgtatctattactcgggcaaacagggaaatgatttttgcggacactcgtctgacccttgtatcacttgtggttattgtcggatgtttctttttctcctggttcggttgctacaaattttttaaacgtacccatgcagaagcagctgtatgtgcattaattgcaggttcacctaccattggattcctagggtttgcagttctcgatcctatttatggtgattccgtatcaacaggtttagtggtagcaattatttctattattgttaacgcaattactattcctattggtctgtatttgctgaatccttcttcaggagcggatggtaagaagaatagtaatctgagtgcattaatttctgcggcaaaggagccagtagtatgggcacctgttctggcaacgatcctggtgttggttggggtaaaaattccggcagcatgggacccaacctttaatctgattgcgaaggctaactcaggggtagcggtattcgctgcggggttgactctggctgcacataaattcgagttcagtgccgaaattgcttataacaccttcctgaagctgattctgatgccactggcactgcttctcgttggtatggcatgtcatttgaacagcgaacatctgcagatgatggtactggcaggcgcattaccgccggcattctccggaattattattgccagccggtttaatgtctacacccgtactggtacagcgtcattggctgtgagcgtactgggctttgtcgtcacggctcccttgtggatttatgtcagtcgactggtttcataa

SEQ ID NO: 458234 - DNA, 1695 bp, Shigella boydii
atgtcagatcaacttcaaatgacagatggtatgcatatcatcgttgaagcattaaaacagaataatattgacactatttatggtgttgtaggtattcctgtgacggatatggcacgccatgcccaggcggaaggcattcgttatattggttttcgtcatgagcagtcggcaggctatgccgctgcggcaagcggttttcttacccaaaaaccggggatctgcctgacagtttctgcgccaggattcctcaatggtttgacggcattggccaacgcaacggtaaatggttttccgatgatcatgattagcggctccagcgaccgcgcgatcgtcgacctacagcaaggtgattatgaagagctggaccaaatgaatgcggcaaaaccgtatgccaaagcagcatttcgtgttaatcagccgcaggatcttggcattgcattggcacgcgctatccgggtctctgtatcgggtcgccctggcggagtttatcttgatttgccagcaaatgtcctggccgcgacgatggaaaaagacgaagcgttaaccacgattgttaaagttgaaaatccgtcgccagcattattgccatgcccgaagtcagtcactagcgcaatttcgcttttagcaaaagctgaacggccattaattatccttggcaaaggcgcggcgtattcacaagctgatgaacagcttcgtgaatttattgaaagtgctcagattccattcctgccaatgtctatggcgaaagggatccttgaagatacgcatccactttctgcggcagctgcgcgttcgtttgccctggcaaatgctgacgttgtcatgcttgttggtgcacgactgaattggttattggcacacggtaaaaaaggatgggcggcagatacacagtttattcaactggatattgaaccgcaggaaattgacagcaaccgccccattgctgtgccagtcattggtgatattgcatccagtatgcaaggtatgctggcagaactgaaacaaaacacatttacgactccactggtatggcgcgatattttaaatatccacaagcagcaaaatgcacaaaaaatgcatgaaaaattaagtacagatactcaaccattaaattactttaatgcattaagtgctgtgcgcgacgtattgcgcgagaaccaggatatttatttagttaatgaaggtgcaaataccctggataatgcacgaaatattattgatatgtataaaccacgtcgtcgtctggattgtggtacctggggtgtcatgggcatcggtatgggctatgccatcggtgctagcgtgacttctggttctccggttgtcgccattgaaggtgatagtgcttttggtttcagtgggatggaaattgaaacgatttgtcgatataacctgccggtgacgatcgttatttttaataatggcggcatctacagaggagacggtgttgatctcagtggcgctggtgcaccatcaccaacggatctgttgcaccatgcaaggtatgacaaattaatggatgcgtttcgtggcgttggctataacgtcaccacgaaagatgaacttcgtcatgctttaaccaccggtattcagtcgcgcaaaccgaccattattaatgtggtcatcgaccctgcagcaggaactgaaagtggccatattaccaaacttaacccaaaacaagtcgctggtaattaa

SEQ ID NO: 458235 - DNA, 1251 bp, Shigella boydii
atgtcaactccacttcaaggaattaaagttctcgatttcaccggtgtgcaatctggcccatcttgtactcaaatgctggcctggtttggcgctgacgttattaaaattgaacgtcccggcgttggtgacgtaacgcgtcaccagctgcgagatattcctgatatcgatgcgctttacttcaccatgcttaacagtaacaaacgttctattgagttaaataccaaaacagcggaaggcaaagaggtaatggaaaagctgatccgcgaagctgatatcttagtcgagaactttcatccaggggccattgatcacatgggcttcacctgggagcatattcaagaaatcaatccacgtctgatttttggttcgatcaaagggtttgatgagtgttcgccttatgtgaatgtaaaagcctatgaaaacgttgctcaggcagcgggtggcgcggcatccactacgggtttttgggatggtccgccgctggtaagcgctgcagcgttgggtgacagcaacaccggaatgcatttgctgatcggtttacttgctgctttgctgcatcgcgaaaaaacggggcgtgggcaacgagtcaccatgtcaatgcaggatgccgtattgaacctttgccgcgtgaaattacgtgaccagcagcgtctcgataaattgggttatctggaagaatacccgcagtatccgaatggtacatttggtgatgcagttccccgcggtggtaatgcaggtggtggcggtcagcctggctggatcctgaaatgtaaaggctgggaaaccgatcctaacgcctatatttatttcactattcaggagcaaaactgggaaaacacctgtaaagccatcggcaaaccagaatggattaccgatccggcatacagtacagcccatgcccgacagccacatattttcgatatttttgctgaaatcgaaaaatacactgtcactattgataaacatgaagcggtggcctatttgactcagtttgatattccttgtgcaccggttttaagtatgaaagaaatttcacttgatccctctttgcgccaaagtggcagtgttgttgaagtggaacaaccgttgcgtggaaaatatctgaccgttggttgtccaatgaaattctctgcttttacgccggatattaaagctgcgccgctattaggtgaacataccgctgttgtattgcaggagctaggttatagcgacgatgaaattgctgcaatgaagcaaaaccacgccatctga

SEQ ID NO: 458236 - DNA, 633 bp, Shigella boydii
atgaaacgtttaattatggctacgatggtcacagcaattctggcatcttcaactgtatgggctgctgataatgcaccggtagcggcacaacagcaaactcagcaagttcagcaaacccagaaaacggcagcagcagagcgtatctctgaacaaggtttatatgcgatgcgtgacgtgcaggtagcgcgcctggctctgtttcatggcgatccagaaaaggcaaaagaactgaccaatgaagcttccgctttgctgtcagatgacagtaccgaatgggcaaagttcgctaagccaggtaaaaagaccaatctcaatgatgaccaatatattgtcattaatgcatctgtcggaatttctgagagttatgtagcaactcccgaaaaagaagccgcgataaaaattgccaatgaaaaaatggcgaaaggggataaaaagggcgcaatggaagaacttcgcctggccggtgttggcgtaatggaaaaccaatatctgatgccgcttaaacagactcgtaatgcacttgctgatgcgcagaaactgcttgataaaaagcaatactacgaggcaaacctggcgcttaaaggtgcggaagatggaatcatcgtcgacagcgaagcactgtttgtgaactaa

SEQ ID NO: 458237 - DNA, 276 bp, Shigella boydii
atgaaagtaaacttaatacttttcagcttatttttattggtctctattatggcatgcaatgtttttgcattttccatttctggtggtgtaagtgagaggagctataaagagactgaaaaaacatcagcgatgacgaccacacactctacaaaacttcagccatcacaggcgattttgtttaagatgagagaagatgcgccaccattaaacctcacagaagaaatcacgcctacttatccgacaaaggcgaattatcttattcatcctgtgcgatag

SEQ ID NO: 458238 - DNA, 243 bp, Shigella boydii
atgatttatttatggatgtttctcgccctgtgtattgtctgcgtaagcggctacatcggtcaggtactgaacgtggtatcggcggtctcttctttcttcggcatggtgatcctcgctgcactcatttattacttcaccatgtggttaactggcggtaatgaactagtgacggggatatttatgtttcttgccccggcttgtggcttgatgattcgctttatggtggggtatggcaggcgatag

SEQ ID NO: 458239 - DNA, 921 bp, Shigella boydii
atgtttccacaatgcaaattttcccgcgagtttctacatcctcgctactggctcacatggtttgggcttggtgtactctggctttgggtacagcttccttatcctgttctctgctttctcggcacgcgtattggcgcaatggcgcgaccattcctgaaacgtcgtgaatctatcgcccgtaaaaacctggaactttgtttcccgcagcattctgcggaagaacgcgagaagatgattgccgaaaactttcgttcactcggcatggcgctggtagaaaccggcatggcatggttctggcccgacagtcgcgtacgtaaatggtttgatgttgaagggttggataaccttaaacgcgcacaaatgcaaaatcgcggcgtaatggttgtcggcgtccattttatgtcgctggaactgggcggccgcgtgatgggactgtgccaaccaatgatggctacctatcgtccacataataatcagctgatggaatgggtgcaaacccgtgggcgcatgcgctctaacaaagcaatgatcggcagaaataatctgcgcggcattgtcggtgcactgaagaaaggtgaagcggtatggtttgctcccgatcaggattatggtcgtaaaggcagctccttcgcgccgttctttgcggtggaaaatgtcgccacaaccaatggcacctatgttctctcccgtctctctggcgcagccatgttgaccgtaacgatggtaagaaaagcggattacagcggatatcgtttgttcatcaccccagagatggaaggctacccgacagatgaaaatcaagccgctgcctatatgaacaagattatcgagaaagagatcatgcgcgcaccggagcagtacctctggatccactgtcgctttaaaacgcgcccggtgggagaatcgtcgttgtacatttaa

SEQ ID NO: 458240 - DNA, 1239 bp, Shigella boydii
atggctgacactcgccctgaacgtcgctttacgcgcattgatcgtctcccgccctacgtttttaacatcaccgctgaactgaaaatggctgcgcgtcggcgcggcgaagatattatcgatttcagcatgggtaacccggacggtgcgactccgccgcatatcgtcgaaaaattatgtactgtggcccagcgcccggacacgcatggttactccacttcacgcggcattccgcggttacgtcgcgccatttcccgctggtatcaggatcgctacgacgttgaaatcgacccggaatcagaagccatcgtcactattggttcgaaagagggcctggcgcatctgatgctggcgacgctggatcatggtgacatggtgctggtgccgaatccaagttacccgatccatatttatggcgcggtgattgccggggcgcaggtacgctcagtgccgctggtggaaggtgtcgatttcttcaacgaactggagcgcgccattcgtgaaagttatccgaaaccgaagatgatgatcctcggcttcccgtcgaatccaaccgcgcaatgcgtggagctggagttcttcgaaaaggttgtggcgctggcgaaacgctacgatgtgctggtggtccacgacctggcctatgccgatatcgtctacgatggctggaaagcgccgtcaatcatgcaggtaccgggtgcacgcgatgtggcagtcgagttctttacgctgtcgaaaagctacaacatggcgggctggcgtatcggctttatggttggcaacaaaacgctggtcagcgccctggctcgtattaaaagctatcacgattacggcacctttacgccgttgcaggtggcggcgattgcggcgctggagggcgatcaacagtgcgtgcgcgacattgccgaacagtacaaacgccgccgtgatgtattggttaaagggctgcatgaagcgggctggatagttgaaatgccgaaggcttcgatgtatgtctgggcgaaaataccggaaccgtatgctgccatgggctcgctggtatttgccaagaaattgcttaacgaagcgaaggtctgtgtctcgccggggattggctttggcgactatggtgatacgcatgttcgctttgcactgattgaaaaccgcgaccgtattcgtcaggccatcagagggattaaagcgatgttccgtgccgacggtttactacccgccagcagcaaacatattcacgaaaacgcggaataa

SEQ ID NO: 458241 - DNA, 1698 bp, Shigella boydii
gtgcacgaaatattcaacatgctgctggcggtcttcgatcgggcagcgttaatgcttatctgcctgttctttctcatccgtatccgcctgtttcgcgagctgttgcacaagtcggcacactccccaaaagagttgcttgctgttaccgccattttctcgctgttcgccctgttcagcacctggtccggcgttcccgtagaaggctcgctggtgaacgtacgtattatcgcggtgatgtccggcgggattctgtttggcccgtgggtaggcatcattaccggcgtgattgcgggtattcaccggtatttaattgatatcggcggcgtgacggcgatcccctgctttatcaccagcattctggcgggttgtatatcaggctggataaacctgaaaatccccaaagcacagcgctggcgcgtcggtattctcggcggcatgttgtgtgagacgttgaccatgattctggtaattgtctgggcaccaactaccgcgttggggatcgatatcgtctctaaaatcggcattccaatgatcctcggtagcgtctgtatcggctttattgtgcttctggtgcaaagcgttgagggcgaaaaagaggccagcgccgcgcggcaggccaagctggcgctggatatcgccaacaaaacgctaccgctgtttcgccatgtcaatagcgagtcattacgcaaggtctgcgaaattatccgcgatgacattcacgccgatgcggtggcgattactaataccgatcatgtgctggcctatgttggcgtgggtgaacataactatcagaatggcgatgacttcattagcccgactacccgtcaggcgatgaattacggaaaaatcatcattaaaaacaatgatgaagcccaccgcacaccagagattcattccatgctggtgatcccattgtgggagaaaggcgttgtgaccggaacgctgaaaatttactactgccacgcgcatcagataacctcgtcattacaggaaatggcggttggtctgtcgcaaatcatctccacgcaactggaggtttcacgcgccgagcagctacgtgaaatggcaaataaggcagagcttcgcaccctgcaaagcaaaattaatccccattttctgtttaacgctctgaacgctatttcatcgtcaatccgtctgaatccggataccgctcgccagttgatctttaatctgtcgcgttatctgcgctataacattgaattaaaagacgatgagcaaatcgatatcaaaaaagagctgtatcaaattaaagactatattgccattgagcaggcccgctttggtgacaagctgacggttatctatgatattgatgaagaggtgaattgctgcattcccagcctgctgatccagccgttggtggagaacgccattgtccacggtattcagccttgcaaaggtaaaggcgttgtcaccatcagtgttgcagagtgcggaaatcgggtacgcattgcggtgcgagataccgggcacggcatcgatccaaaggtgattgagcgggtcgaagcgaatgaaatgccgggcaataaaattggcctgctgaatgtccatcatcgcgtgaagttattgtatggcgaggggctgcatatccgccgcctggagccggggacggaaattgcgttttacattcctaaccaacgcaccccagtcgcctcacaggctacgttattgctttga

SEQ ID NO: 458242 - DNA, 735 bp, Shigella boydii
gtgaaagtcatcattgttgaagacgaattcctggcacaacaggaactgagctggctaattaaagagcacagccagatggagattgtcggcacctttgacgacggtctggacgtgttgaagtttttgcagcataaccgcgtcgacgccatttttctggatatcaatattccgtcgctggatggcgtgttgctggcgcaaaacatcagccagttcgcccataaaccgtttattgtgttcatcaccgcgtggaaagaacatgcggtagaagcgtttgaactggaggcgtttgactacattctcaaaccgtatcaggagtcacgtattaccgggatgctgcaaaaactggaagcggcctggcaacaacagcagaccagcagtacgcctgccgcgacggtaacgcgtgagaatgacaccattaatctggtgaaagatgagcgaataatcgtcacgccaattaacgatatctattacgccgaagcgcacgagaaaatgacctttgtctatacgcggcgtgaatcctacgtaatgccgatgaacattaccgaattttgcagcaaactgccgccgtcgcattttttccgctgccatcgctcattttgtgtcaatctgaacaaaatacgcgaaatcgaaccgtggtttaataacacctacattctgcgactgaaagatctggattttgaagtgccggtcagccgcagcaaagtgaaagaatttcgccagttaatgcatctttaa

SEQ ID NO: 458243 - DNA, 858 bp, Shigella boydii
atgaaagcaccaggcttgcccgccgatcaacaatttttcgccgatctgttcagcggcctagtgcttaacccgcaactactggggcgcgtctggtttgccagccagcctgcctcgttaccggtgggcagtttatgtattgattttccccgtctggatatcgtgctgcgcggcgaatacggcaacctgctggaagcaaagcagcagcgaatggtggaaggagaaatgctgtttattccggcacgcgcggctaatttaccgatcaacaacaaaccggtgatgctgttaagcctggtgttcgcaccgacctggcttgggttatcgttttacgatagccgcaccacgtcgttgttgcatcctgctcgccagatccagcttcccagcctgcaacgcggtgaaggtgaagcgatgcttaccgccctcactcatcttagccgttcgccgctggagcagaatatcattcagccactggtgttaagtttgctgcatctttgccgcaacgtggtgaatatgccgccgggtaattcgcaaccgcgcggcgattttctctatcacagcatttgtaactgggttcaggataattatacccagccgctcacccgcgagagcgtggcgcagttttttaatatcacgcccaatcatctgtcaaaactgtttgctcagcatggaacgatgcgttttatcgagtatgtgcgttgggtgcgaatggcgaaggcgaggatgattttgcagaaatatcatctgtcaattcatgaagtggcacagcgttgcggttttccggatagcgactatttttgtcgcgttttccggcgtcagtttggtctgacgccgggagagtacagcgcccgttttcagggctaa

SEQ ID NO: 458244 - DNA, 1494 bp, Shigella boydii
gtgctggcgattaacccgaatgacgcggtgagcggttattatcaggtcgcacagacgctggcggataaacgccaaaaacaacaggcgcaggccgccgcgcagctggcctattcccgtgataacaagcgtattgatattgcggcgaatatcggcaccgctctggaagcgccaggcgcgtttgccaacggcgcggaaggcgttggactgttccgtactgaaatgctctatatggatcgcgacagcgcgccggacgagcaggagcaatttgaagcctaccagcaggtgctactggcagcgggcgacaagccgattatcttccgcacaatggacatcggtggcgataaaagcattccttatctgaatattccccaggaagagaacccgttcctcggctatcgcgcggtacgtatttacccggaatttgctggcctgttccgcactcaactacgggcgattttgcgcgccgccagttttggcaacgcccagttgatgatcccgatggtccacagtctcgatcagatcttatgggtgaagggcgagatccaaaaagcgatcgttgagcttaagcgcgatggcctgcgtcatgcagagacgattacgcttgggatcatggtggaagtgccgtcggtgtgctacatcatcgaccacttctgcgatgaggtcgatttcttcagtatcggctccaacgatatgacccagtatctgtatgcggtcgatcgtaataacccgcgcgtatcgccgctatataacccgattacgccatcgttcctgcgcatgttgcagcaaatagttaccactgcgcatcagcggggcaaatgggtaggcatttgcggtgaactgggcggtgaaagccgttatctgccgctactgcttgggctgggcctggatgagctgagtatgagtagcccgcgtattccggcggtgaaaagccagcttcgtcaactggatagcgaggcgtgtcgggaactggcgcgtcaggcatgtgaatgccgcagtgcgcaggaaattgaagcgttactcaccgcctttacgccggaagaagacgttcgcccactgctggcgctggagaatatctttgttgatcaggattttagcaataaagagcaggcgatccagttcctgtgcggcaacctcggcgttaacgggcgcactgaacatccgtttgagctggaagaagatgtctggcagcgggaagagattgttaccaccggcgttggttttggcgtagcgatcccgcacaccaaatctcagtggatccgtcattccagtatcagcattgcccggctggcgaaaccgattgactggcagtcagaaatgggcgaagtcgaactggtgatcatgctgacgctgggtgctaacgaagggatgaatcatgtgaaagtcttctcgcagctggcgcgtaaactggtgaataaaaacttccgccagtcgttgtttgccgcgcaagatgcacaaagtatcctgacgctgctggaaacagaattaaccttctga

SEQ ID NO: 458245 - DNA, 1032 bp, Shigella boydii
atgttaacgattcaatttctctgtcctttgccaaacggtcttcatgctcgtccggcgtgggaacttaaagaacagtgcagccagtggcaaagcgaaatcacctttatcaaccatcgccagaacgcaaaggccgatgcgaaaagctcgctggcgctgattggcaccggtactttatttaatgacagttgcagcctgaacattagcggcagcgatgaagagcaggcgaagcgcgtgttggaagagtacatccaggtgcgctttatcgacagcgacagcatccagccaacgcaggcagaactgacggcgcatccgctgccgcgttcattaagccgcctgaacccggatttactgtacggcaatgtgctggcaagcagcgtcggcgtgggtacgctgaccctgttacaaagcgacagcctcgacagttatcgggcaatccccgccagtgcgcaagattccacccggctggagcacagccttgcaacgcttgccgagcaactgaaccagcaattgcgtgagcgtgacggcgaaagcaaaactatccttagcgcccatttgtcgctgattcaggatgatgaattcgcgggcaatatccgtcgtctgatgacagaacagcatcaagggctgggggcggcgatcatcagcaatatggagcaggtttgcgccaaactttctgcttctgccagtgattatctgcgcgaacgtgttagcgacattcgcgatattagcgaacagttgctgcatatcacctggccggaactgaagccgcgcaacaatctggtgctggaaaaaccgactattctggtagccgaggatttaaccccaagccagtttttgagcctcgatttaaaaaatcttgcaggcatgattctggagaaaactgggcgcacctcgcataccctgattctggcccgcgcctcggcgatcccggtactgagcggcctgccgctggatgcgattgcccgttatgccgggcaaccggcgggcttgacgcccagtgcggcgtgctggcgattaacccgaatgacgcggtga

SEQ ID NO: 458246 - DNA, 960 bp, Shigella boydii
atggatttatcgctattaaaagcgttgagcgaggcagatgcgatcgcctcctcggaacaggaagtgcggcagatcctgctggaagaagcggatcgcctgcaaaaagaagtgcgatttgatggtctgggatcggtgcggatccgcctcaatgaatcgacagggccgaaggtgatgatctgcgcccatatggacgaagtgggatttatggtgcgcagcatctcccgcgaaggggcaattgatgtgctgccggttggcaacgtgcgcatggctgcccgccagctgcagccggtgcgcatcaccacccgtgaagagtgcaaaattccaggcctgcttgacggcgaccggcaggggaatgacgtcagcgccatgcgcgtggatattggtacgcgctcgtatgacgaagtgatgcaggcgggaattcgtccaggcgatcgcgtcacctttgatacaacttttcaggttctccctcaccagcgggtgatggggaaagcctttgatgaccgcctcggttgctacctgctggtgacgttactgcgcgaactacacagcgctgaactgcctgcggaagtgtggctggtggccagttccagcgaagaggtgggggtacgcggcgggcaaactgccacccgcgcggtgtcgccggatgtcgccattgtgcttgataccgcctgctgggcgaaaaactttgattatggcgcggctaaccatcgtcagatttgtaacgggccgatgctggtgttaagcgacaagtcgctgattgcgccgccaaaacttaccgcgtggatcgaaaccgtggcggcagaaattggcgtgccgttacaggcagatatgttcagcaacggcggcacggacggcggagcggtgcacttaaccggcaccggcgtgcctacagtggtgatggggccagcaacccgccacggacattgcgccgcatcgattgccgattgccgattgccgtga

SEQ ID NO: 458247 - DNA, 1086 bp, Shigella boydii
atgacattactcgcttcgctgcgcgactggcttaaggcgcaacaactggatgcagtgcttctctcctcacggcagaacaaacagccgcatctggggatctccaccggatcaggctatgtggttattagccgtgaaagtgcgcacattctggtagattcgcgctatttcgttgaggtggaagcccgtgcgcaaggctaccagctgcatttgcttgacgcgacgaacacgcttaccactatcgtcaatcaaatcattgccgatgagcagttgcaaacgctcggttttgaaggccagcaggtgagttgggaaacagcgcaccgctggaagtctgaactcaatgcgaaactggttagcgccacgccggatgtgctgcggcaaatcaaaacgccagaggaggtggagataatccgcctcgcctgtgggattgccgatcgcggagcggagcatattcgccgctttattcaggcggggatgagcgagcgcgagatagccgctgaactggagtggtttatgcgccagcagggcgcagaaaaagcctcttttgacaccattgtcgccagcggctggcgcggggtgctgccgcacggcaaagccagcgacaagattgttgcagcgggcgagtttgtcactctcgattttggtgcgctgtatcagggctactgctctgatatgacgcgcaccttgctggtgaatggcgaaggggtgagcgccgaatctcacccgctgtttgacgtctatcagattgtcctgcaggcacagctcgcggcaatctctgcaattcgccccggcgtgcgctgccagcagattgacgacgccgcgcgccgggtcattaccgaggctggatttggcgactatttcggtcataacactggtcacgctatcggcattgaagtccatgaagatccgcgtttttcaccgcgggggaccaagacgctacagccaggcatgttgctgaccgtggagccggggatttatttgccagggcaagggggcgtgcgcatcgaagatgttgtgctggttaccccgcaaggcgcagaagtgctctacgccatgccgaaaacagtgttgctcacgggagaggcataa

SEQ ID NO: 458248 - DNA, 1248 bp, Shigella boydii
atggccattaaaaaacgcagtgcaaccgttgtgcctggcgcatccggtgcggcagcggcagttaagaatccgcaggcctctaaaagcagcttctggggtgaactcccgcagcatgtgatgtcagggatttcacgcatggtgccgaccttaattatgggcggtgtgatcctcgctttcagccagctgattgcttatagctggcttaaaattcctgctgagatcggcatcatggatgctcttaatagcgggaaattctccggtttcgacctctccttactgaaatttgcctggctgtcgcagtccttcggcggcgtgttgtttggttttgccattccgatgtttgctgcttttgtggcgaactctatcggtggcaaactggcgttcccggctggttttatcggcggcttgatgtctacccagccgacgcaactgctgaacttcgatcccagcactatgcaatgggcgacctcttcgccggtgccgtccaccttcattggtgcgctgattatttctatcgtcgcgggttaccttgtgaagtggatgaaccagaaaatccagttaccggatttcctgttagcgttcaaaaccacatttttgctaccgattctttccgccatttttgtcatgctggcgatgtactacgtcattaccccctttggcggctggatcaacggcggtatccgtaccgtgctgactgccgcaggtgagaagggcgcgctgatgtacgcaatggggatcgccgcggcgacagcaatcgaccttggtggcccgatcaacaaagccgcaggtttcgttgccttcagctttaccactgaccacgtattaccggtcaccgctcgttctatcgctatcgttattcctccgattggtctggggctggcgaccattattgaccgtcgtttaaccggcaaacgcctgttcaacgctcaactttatccgcagggtaagaccgcgatgttccttgcctttatggggattagtgagggtgcgattccgtttgcgctggaaagccccatcaccgccattccgtcgtatatggtcggcgcgattgtcggctcaaccgccgctgtctggctgggcgcagtgcaatggttcccggaatccgctatctgggcatggccgctggtcactaaccttggcgtctatatggcggggatcgcgctgggggcagtcataactgcgctgatggtggtgttcctgcgtctgatgatgttccgtaaaggcaaattgttaatcgatagcctgtaa

SEQ ID NO: 458249 - DNA, 327 bp, Shigella boydii
atgagtaagaaactgattgccttatgtgcctgcccaatgggcctagctcacacctttatggccgctcaggcgttggaagaagcggcggtagaagccggttatgaagtgaaaattgaaacccagggcgcggacggtatccagaatcgcctgacggcgcaggatatcgccgaagcaaccatcatcatccactccgtggcagttaccccggaagataatgagcgtttcgaatcacgcgacgtttatgaaatcactttgcaggacgcaattaaaaacgctgcgggcatcatcaaagaaatcgaagagatgattgcctctgaacaacagtaa

SEQ ID NO: 458250 - DNA, 966 bp, Shigella boydii
atgataaagtatgcattagtcggtgatgtgggcggcaccaacgcacgtcttgctctgtgtgatattgccagtggtgaaatctcgcaggctaagacctattcagggcttgattaccccagcctcgaagcggtcattcgcgtttatcttgaagaacataaggtcgaggtgaaagacggctgtattgccatcgcttgcccaattaccggtgactgggtggcaatgaccaaccatacctgggcgttctcaattgccgaaatgaaaaagaatctcggttttagccatctggaaattattaacgattttaccgctgtatcgatggcgatcccgatgctgaaaaaagagcatctgattcagtttggtggcgcagaaccggtagaaggtaaacctattgcggtttacggtgccggaacagggcttggggttgcgcatctggtccatgtcgataagcgttgggtaagcttgccgggcgaaggcggtcacgttgattttgcgccgaatagtgaagaagaggccattatcctcgaaatattgcgtgcggaaattggtcatgtttcggcggagcgcgtgctttctggccctgggctggtgaatttgtatcgcgcaattgtgaaagctgacaaccgcctgccagaaaatctcaagccaaaagatattaccgaacgcgcgctggctgacagctgtaccgattgccgccgcgcgttgtcgctgttttgcgtcattatgggccgttttggcggcaatctggcgctcaatctcgggacatttggcggcgtgtttattgcgggcggtatcgtgccgcgcttccttgagttcttcaaagcctctggtttccgtgctgcatttgaagataaagggcgctttaaagaatatgtccatgatattccggtgtatctcatcgtccatgacaatccgggtcttctcggttccggtgcacatttacgccagaccttagggcacattctgtaa

SEQ ID NO: 458251 - DNA, 1257 bp, Shigella boydii
atgctccatccgcgagccagaaccatgttgttattatcgctccccgccgtggcaattgggattgcgtccagtcttattctgattgtggtgatgaaaatcgcctcggtattacagaatttgctctggcaacgactgccgggaactctggggatagcccaggattcacctctctggatcatcggtgtattaacgctaacgggtattgcggtggggttggttatccgtttcagccagggtcatgccggaccagaccccgcctgtgaaccgctgatcggcgcaccagttccgccctctgcgctaccaggacttatcgtagcattaattctcggtcttgctggcggcgtcagcctggggccggaacatccgatcatgaccgtcaatatcgcccttgccgtcgccattggcgctcgtctgttaccgcgcgtcaaccgaatggagtggactattttagcctctgccggaaccatcggcgcgctgtttggcacacctgttgcagcggcgttgatattttcgcaaaccttaaatggcagtagtgaagttccgctatgggatcgtctctttgcgccgttaatggcggcagcagctggtgcactaactaccggattatttttccatccccatttttcactgcccattgcgcattacggacagatggaaatgaccgatattctcagcggtgcaattgtcgcggcgattgccatcgcagcagggatggtcgccgtatggtgcttaccacggttgcacgcgatgatgaatcaaatgaaaaatccggtgctcgtgctgggtattggcggatttattctcggtattctgggggttattggtggaccagtttcgctgtttaaagggctggatgagatgcagcagatggtggcaaatcaggctttcagcaccagcgattactttttgctagcggtaattaaacttgccgccctggtcgttgctgccgccagtggctttcgcggtgggcgaatcttcccggcagtgtttgtcggcgtggcattagggttgatgctgcatgagcacgtacccgccgtaccagcggcaataaccgtttcttgcgctattctcggcatcgtgctggtggtaacacgcgatggctggttaagtctttttatggcggcggtcgttgtacccaataccacattgctaccgctgctctgtatcgtcatgcttccggcatggctgttattagcaggtaagccgatgatgatggtcaatcgtccgaagcaacagccaccccacgataacgtttag

SEQ ID NO: 458252 - DNA, 327 bp, Shigella boydii
atgttcaggtcactgtttctggcggccgccctgatggcatttaccccgcttgcagcaaacgcaggtgaaatcaccctactgccatcaatcaaattacaaattggcgatcgcgatcattacggtaattactgggacggtggtcactggcgcgaccgtgactactggcatcgcaattatgagtggcgcaaaaaccgttggtggcgtcatgataatggctatcatcgtggctgggataagcgtaaagcgtatgagcgtggctatcgtgaaggctggcgcgatcgtgacgatcatcgcggaaaaggccgcggacatggacaccgccattaa

SEQ ID NO: 458253 - DNA, 1239 bp, Shigella boydii
atgacgaactatcgcgttgagagtagcagcggacgggcggcgcgcaagatgaggctcgcattaatgggacctgcgttcattgcggcgattggttatatcgatcccggtaactttgcgaccaatattcaggcgggtgccagcttcggctatcagctactgtgggttgtcgtttgggccaacctgatggcgatgctgattcagatcctctctgccaaactagggattgccaccggtaaaaatctggcggagcagattcgcgatcactatccgcgtcccgtagtgtggttctattgggttcaggcagaaattattgcgatggcaaccgacctggcggaatttattggtgcggcgatcggttttaaactcattcttggtgtttcgttgttgcagggcgcggtgctgacggggatcgcgactttcctgattttaatgctgcaacgtcgcgggcaaaaaccgctggagaaagtgattggcgggttactgttgtttgttgccgcggcttacattgtcgagttgattttctcccagcctaacctggcgcagctgggtaaaggaatggtgatcccgagtttacctacttcggaagcggtcttcctggcagcaggcgtgttaggggcgacgattatgccgcatgtgatttatttgcactcctcgctcactcagcatttacatggcggttcgcgtcaacaacgttattccgccaccaaatgggatgtggctatcgccatgactattgccggttttgtcaatctggcgatgatggctacagctgcggcggcgttccacttttctggtcatactggtgttgccgatcttgatgaggcttatctgacgctgcaaccgctgttaagccatgctgcggcaacggtctttgggttaagtctggttgctgccggactgtcctcaacggtagtggggacactggcagggcaggtggtgatgcaggggttcattcgcttccatatcccgctgtgggtgcgtcgtacagtcaccatgctgccgtcatttattgtcattctgatgggattagatccgacacggattctggttatgagtcaggtgctgttaagttttggtatcgccctggcgctggttccactgctgattttcaccagtgacagcaagttgatgggcgatctggtgaacagcaaacgcgtaaaacagacaggctgggtgattgtagtgctggtcgtggcgctgaatatctggttgttggtggggacggcgctgggattgtag

SEQ ID NO: 458254 - DNA, 1203 bp, Shigella boydii
atggaccgcgtccttcattttgtactggcacttgccgttgttgcgattctcgcactgctggtaagcagcgaccgcaaaaaaattcgtatccgttatgttattcaactgcttgttatcgaagtgttactggcgtggttcttcctgaactccgacgttggtttaggcttcgtgaaaggcttctccgaaatgttcgaaaaactgctcggatttgccaacgaagggactaacttcgtctttggtagcatgaatgatcaaggcctggcattcttcttcctgaaagtgctgtgcccaatcgtctttatctctgcactgatcggtattctccagcacattcgcgtgttgccggtgatcatccgcgcaattggtttcctgctctccaaagtcaacggcatgggcaaactggaatcctttaacgccgtcagctccctgattctgggtcagtctgaaaactttattgcctataaagatatcctcggcaaaatctcccgtaatcgtatgtacaccatggctgccacggcaatgtccaccgtgtcgatgtccatcgttggtgcatacatgaccatgctggaaccgaaatacgtcgttgctgcgctggtattgaacatgttcagcacctttatcgtgctgtcgctgatcaacccttaccgtgttgatgccagtgaagaaaacattcagatgtccaacctgcacgaaggtcagagcttcttcgaaatgctgggtgaatacattctggcaggtttcaaagttgccattatcgttgccgcgatgctgatcggctttatcgccctgatcgctgcgctgaacgcactgtttgccaccgtgactggctggtttggctacagcatctccttccagggcattctgggctacatcttctatccgattgcatgggtgatgggtgttccttccagtgaagcactgcaagtgggcagtatcatggcgaccaaactggtttccaacgagttcgttgcgatgatggatctgcagaaaattgcttccacgctctctccgcgtgctgaaggcatcatctctgtgttcctggtttccttcgctaacttctcttcaatcgggattatcgcaggtgcagttaaaggcctgaatgaagagcaaggtaacgtggtttctcgcttcggtctgaaactggtttacggctctaccctggtgagtgtgctgtctgcgtcaatcgcagcactggtgctgtaa

SEQ ID NO: 458255 - DNA, 504 bp, Shigella boydii
atgggaatgattggttattttgcagaaattgactcagaaaagattaaccaactgcttgagtctactgaaaaacctttgatggataatatacatgacacgctttcaggattacgccgactggatattgataaacgctgggattttttacactttgggctgacaggcacccctggttttgatcccgcgaagaatgatccgctgagtcgtgccgtgcttggtgaacacagcctcgaagatggcatagatggcttcctgggattgacctggaatcaggaattagccgcgacaatcgaccgactggaatcactggatcgaagtaagctgcgtaaacagttttccattaagcgactcaatgaaatggagatttatccgggagtgaccttttcagaagagttagaggggcaactctttgcctcgatcatgcttgatatggaaaagctgattagcgcgtatcgacgtatgctgcgacaagggaatcatgcgctgacggttattgttcggtga

SEQ ID NO: 458256 - DNA, 1458 bp, Shigella boydii
atgacaataactccacaaaacctgatcgcactgctaccgttgctgatcgtcggcttaacggtggtggttgtgatgctctccattgcgtggcgacgcaatcatttcctcaacgctacgctctcggttattgggcttaacgcggcgctggtttcgctctggtttgttggccaggcgggcgctatggacgttacgccgctgatgcgcgttgatggtttcgccatgctttacaccgggctggtattgttggcgagcctcgccacctgtactttcgcctacccgtggcttgaaggctataacgacaacaaggatgagttctacctgttggtgttaattgccgcgctgggcgggatcctgctggcgaatgcaaaccatctggcgtctctgttcctcggtattgaactgatctctttgccgctgtttggcctggtcggttacgctttccgccagaaacgttcgctggaagccagtatcaaatacaccatcctttctgccgcagcgtcttctttcctgctgttcggtatggcgctggtgtatgcgcagtctggcgacctgtcgtttgtcgcgctgggtaaaaacctcggcgacggtatgctcaacgagccgctgttgctggcaggtttcggcatgatgattgttggcctcggcttcaaactctctctggtgccgttccacctgtggacgccagacgtataccaaggcgcgcctgcgccggtttccactttcctggcgacggcgagcaaaatcgctatcttcggtgtggtgatgcgtctgttcctctatgcaccggtgggtgacagcgaagcgattcgcgtagtactggcgattatcgcctttgcctccatcatcttcggtaacctgatggcgttgagccagaccaacatcaaacgtctgctcggttactcatctatctctcacctcggctatctgctggtggcgctgattgcgctgcaaaccggcgagatgtcgatggaagcggtagggggttacctggccggttatctgttcagcagcctcggcgcgttcggcgtggtcagcctgatgtccagcccgtatcgtggcccggatgctgattccctgttctcttaccgcggtctgttctggcatcgtccgatcctcgcggcagtgatgacggtgatgatgctgtctctggccggtatcccgatgacgctgggctttatcggtaagttctacgtgctggcggtcggtgtccaggcacacttgtggtggctggtgggtgccgtggttgtcggttcggcaatcggcctctactactacctgcgcgtggcggtgagcctgtacctgcacgcaccggaacaaccgggtcgcgatgcaccgtcaaactggcagtacagcgcgggcggtatcgtggtgctgatttctgcactgttggtactggtgctgggtgtatggccacaaccgctgattagtattgtgcggttagcaatgccgctgatgtaa

SEQ ID NO: 458257 - DNA, 1530 bp, Shigella boydii
atgttactaccctggctaatattaattccctttattggcggcttcctgtgctggcagaccgaacgctttgacgtcaaggtgccacgctggatcgcgctgatcaccatgggattgacgctggcgctgtcgctgcaactgtggttgcagggcggttattcactgacgcaatccgccggaattccgcagtggcagtctgaattcgacatgccgtggatcccgcgttttggtatctctattcatctcgccattgacggtctgtcgctgctgatggtcgtgctgaccggtctgctcggtgtgctggcggtactctgttcgtggaaagagatcgaaaaatatcagggcttcttccacctcaacctgatgtggatcctgggcggcgttatcggcgtgttccttgccatcgacatgttcctgttcttcttcttctgggaaatgatgctggtgccgatgtacttcctgatcgcactgtgggggcataaagcctctgacggtaaaacgcgtatcacggcggcaaccaagttcttcatttacacccaggcgagtggcctggtgatgttgattgccatcctggcgctggtttttgttcactacaatgcgaccggcgtctggaccttcaactatgaagagctgctgaatacgccaatgtccagtggtgtggaatacctgttaatgctgggcttcttcatcgccttcgcagtcaaaatgccggtggttccgctgcatggctggctgccggatgcgcactcccaggctccgaccgccggttccgttgacctcgcggggatcttgctgaaaactgccgcttacggtttgctgcgtttctccctgccgctgttcccgaacgcgtcggcagagttcgcgccaattgctatgtggctgggtgttatcggcatcttctacggtgcgtggatggccttcgcccagaccgatatcaaacgtctgatcgcctacacctcggtttcccacatgggcttcgtgctgattgctatctacaccggcagccagttggcctaccagggcgcggtaatccagatgattgcgcacggtttgtcggcggcgggtctgtttattctttgtggtcagctttatgaacgtatccatacccgcgacatgcgcatgatgggcggtctgtggagcaagatgaaatggctgccagcattgtcgctgttctttgcggtggcaacgcttgggatgcctggcaccggtaacttcgtcggcgaatttatgattctgttcggcagcttccaggttgtcccggtgattaccgttatctctacctttgggctggtctttgcatctgtttattcgctggcgatgttgcatcgcgcttacttcggtaaagcgaaaagccagattgccagccaggaactgccagggatgtcgctgcgtgagctgtttatgatcctgttgctggtggtgctgctggtactgctgggcttctatccgcagccgattctggatacctcgcactccgcgattggcaatatccagcagtggtttgttaattccgttactactacaaggccgtaa

SEQ ID NO: 458258 - DNA, 1842 bp, Shigella boydii
atgaacatgcttgccttaaccattattttgccattgattggcttcgtcctgctggcgttctcccgtgggcgctggtctgaaaacgtttcggcgatcgtcggcgttggctctgtgggcctggcggcgctggtaaccgcctttatcggcgttgatttcttcgctaacggcgagcaggcatacagccagccgctgtggacgtggatgtcggtaggcgactttaacatcggttttaacctggtgctggacggcctgtcgctgaccatgctctcggtggtcactggtgtgggtttccttattcacatgtacgcctcctggtacatgcgcggtgaagagggctactctcgcttcttcgcctacaccaacctgttcatcgccagcatggtagttctggttctcgccgataacctgctgctgatgtacctcggctgggaaggcgtgggcctgtgctcctatctgctgatcgggttctattacaccgatccgaagaatggcgcagcggcaatgaaagcgttcgtcgtgacccgtgtgggtgacgtgttcctcgctttcgcgctgttcattctttacaacgaactgggcaccctgaacttccgcgaaatggtggaactggcaccagcgcactttgctgacggcaataacatgctgatgtgggcgacgctgatgctgctgggcggtgcggtcggtaaatctgcgcagttgccgttgcagacatggcttgccgacgcgatggcgggcccgacgcctgtctccgcgctgatccacgccgcaaccatggtaaccgcgggtgtctacctgatcgcccgtacccacggcctgttcctgatgacgccggaaattctgcatctggtgggcattgtcggggcggttacgctgctgctggccggttttgccgcgctggtacagaccgacatcaaacgtgttctcgcttactctaccatgagccagattggctacatgttcctcgcgcttggcgtgcaggcatgggatgcggcgattttccacttgatgactcacgcgttctttaaagcgctgctgttcctggcatccggttccgtcattctggcctgccatcacgaacagaacatcttcaagatgggcggtctgcgtaaatctattccgctggtttatttctgcttcctggtgggcggcgcagcactgtcggcactaccgctggtcactgcgggcttcttcagtaaggatgagatcctcgcgggtgcgatggcgaatggtcatatcaatctgatggtggcaggtctggtcggtgcgtttatgacctcgctctacaccttccgtatgattttcatcgtcttccacggaaaagaacaaattcacgctcacgccgtgaaaggggtaactcacagcctgccgctgattgtgctgctgatcctttccaccttcgttggcgcactgattgtaccgccgctgcagagcgtgcttccgcaaacgacggaactggcgcacggcagcatgttgaccctggaaattacctctggcgtggtcgcggtggtcggtattctgctggcagcctggctgtggcagggtaaacgtactctggtgacctccattgccaacagtgcgccgggccgtctgctgggcacctggtggtacaacgcctggggctttgactggctgtacgacaaagtgttcgtcaagccgttcctgggtattgcctggttgctgaaacgcgatccgctgaactcaatgatgaacattccggcggttctttcccgctttgcaggtaaaggcctgctgttaagcgagaacggttatctgcgctggtatgtggcatccatgagcatcggtgcggtcgtggtgctggcactgttgatggtactgcgttga

SEQ ID NO: 458259 - DNA, 303 bp, Shigella boydii
atgatccccttacaacatggattgatcctctcggcaatcttattcgttcttggcttaaccggtctggttatccgtcgcaatctgctgtttatgctgattggtctggaaatcatgattaacgcctccgcgctggcctttgtggtcgccggaagctactggggtcagaccgacggtcaggtgatgtacattctcgccatcagcctcgcggcggcagaagcgagtatcggccttgcgctgctgctgcaacttcaccgtcgtcgccagaacctgaacatcgattcagtaagtgagatgcgcggatga

SEQ ID NO: 458260 - DNA, 555 bp, Shigella boydii
atggagttcgctttttatatctgtggcctgatagccatacttgcgaccttgcgagtgatcacccataccaatccggtacacgcactgctgtacctgattatttcgctgctggcgatttccggggtgttcttctcactgggcgcttacttcgccggtgcgctggaaattatcgtctacgcgggtgccattatggtgctgttcgtgttcgtggtgatgatgctcaacctgggcggttcagaaatcgaacaggaacgccagtggctgaaaccgcaggtgtggattggtccggcaattttgtcggccatcatgctggtggtgattgtttacgccatccttggtgttaatgatcagggtatcgacggtacgccaatcagtgctaaagcagtgggtattacgctgttcgggccttacgtactggcggtggaactggcttctatgctgctgctcgcgggtctggttgtggccttccacgtcggtcgtgaagagcgtgcgggtgaagtgctgagcaatcgtaaagacgacagcgcgaaaagaaaaacggaggagcacgcatga

SEQ ID NO: 458261 - DNA, 543 bp, Shigella boydii
atgaccttaaaagaattgttagtaggtttcggcacccaggttcgtagtatctggatgatcggcctgcacgcgttcgccaaacgcgaaacgcgaatgtacccggaagagccggtctatctgccgccccgttatcgtggtcgtatcgttctgacccgcgacccagacggcgaagagcgttgcgtagcctgtaacctctgcgcggtagcctgcccggtcggctgtatctcgctgcaaaaagcagaaaccaaagacggtcgctggtacccggaatttttccgcatcaacttctcacgctgcattttctgtggtctgtgcgaagaagcctgtccgaccacggcgattcagttaaccccggatttcgaaatgggggaatacaagcgccaggatctggtttacgaaaaagaggatctgctgatctccggtccgggcaaatacccggaatataacttctaccggatggcaggtatggcaatcgacggcaaagataagggcgaagcagagaacgaagccaagcctatcgacgtcaagagcctgttaccgtaa

SEQ ID NO: 458262 - DNA, 978 bp, Shigella boydii
atgagttggatatcaccggaactgattgagatcctgctgaccatcctcaaagcggtggtgatcctgctggtggttgtcacctgtggggcattcatgagctttggcgaacgtcgcctgctgggtctgttccagaaccgttatggacctaaccgtgttggctggggcggttcgctccagctggttgcggacatgatcaaaatgttctttaaagaagactggatcccgaaattctcggatcgcgtcatctttaccctggcaccgatgattgcctttacctcgctgctgctggcctttgcgattgtgccagtcagtccgggttgggtggttgccgacctgaacatcgggattttgttcttcctgatgatggcaggtctggcggtttacgcggtgctgtttgcgggctggtcaagtaacaacaaatactcgttgctgggtgcgatgcgtgcttctgcgcagaccctgagctacgaagtgttcctcgggctttccctgatgggcgtggtggcgcaggccggttcattcaacatgaccgacatcgtcaacagccaggcgcatgtgtggaacgttatcccgcaattctttggttttattacctttgccatcgcgggcgtggcggtatgtcaccgtcacccgtttgaccagccggaagccgagcaggaactggcggatggttaccacattgaatattccggtatgaagttcggtctgttcttcgtgggtgagtacatcgggattgtgaccatctctgcattgatggtgacgctgttcttcggtggctggcaaggcccgttgttaccgccattcatctggttcgcgctgaaaaccgcgttctttatgatgatgttcattttgattcgtgcgtcgttaccgcgtccgcgttatgaccaggtaatgtccttcggctggaaaatctgcctgccgctgacgctgatcaacttgctggtaacggcggctgtcattctctggcaggcgcaataa

SEQ ID NO: 458263 - DNA, 2727 bp, Shigella boydii
atggctacaattcatgtagacggcaaagaatacgaggtcaacggagcggacaacctgctggaagcttgtctgtctctgggccttgatattccttacttttgctggcatccggcgctgggaagcgtcggtgcttgccgccagtgtgcggtgaagcaataccaaaacgcggaagacacgcgtggtcgcctggtgatgtcctgtatgacaccggcttccgatggcacctttatttccattgacgacgaagaagcgaaacagttccgtgaaagtgtggtcgagtggttaatgaccaaccacccgcacgactgtccggtatgtgaagaaggcggtaactgccatcttcaggatatgaccgtgatgaccggacacagcttccgtcgctaccgtttcaccaaacgtacccaccgtaatcaggatttggggccattcatctctcacgaaatgaaccgctgcatcgcctgctatcgctgtgtgcgttactacaaagattacgctgacggtacagatctgggcgtttatggcgcgcacgacaacgtctacttcggtcgcccggaagacggcacgctggaaagcgaattttccggtaacctggtcgaaatttgcccgaccggcgtatttaccgacaaaacgcactccgagcgttacaaccgtaaatgggatatgcagtttgcgccgagcatctgccagcaatgttccatcggctgtaacatcagccccggtgaacgttacggcgaactgcgtcgtatcgaaaaccgttacaacggtacggtaaaccactacttcctctgcgaccgtggtcgtttcggttacggttacgtcaacctgaaggatcgtccgcgtcagccagtacagcgtcgtggcgatgatttcattaccctcaacgccgaacaggcaatgcagggcgcggcagatattctgcgtcagtcgaagaaagtgatcggtattggttctccgcgtgccagcgtggaaagcaactttgcactgcgtgaactggtgggcgaagaaaacttctacaccggtatcgctcacggtgagcaggaacgtctgcaactggcgctgaaagtgctgcgtgaaggcggcatttatactccggctctgcgcgaaatcgaatcttacgatgcggtactggtgctgggcgaagacgttacccagaccggcgcgcgcgtcgcgctggcagtgcgtcaggcggtgaaaggtaaagcgcgcgaaatggcggcagcacagaaagtggctgactggcagattgcggcaatccttaacatcggtcaacgtgcgaagcatccgctgtttgttaccaacgttgatgacacccgtctggatgatatcgcggcgtggacttaccgcgcaccggttgaagatcaggcgcgtttaggttttgccatcgcccatgcgctggataactctgcaccagcggttgacggtatcgaacctgagctgcaaagcaaaatcgacgtcatcgtgcaggcactggcaggtgcgaagaaaccgttgattatctccgggacgaacgccggtagcttagaggtgattcaggcggcggctaacgtcgcgaaagccctgaaaggtcgcggcgctgacgtcggtatcaccatgattgcccgttccgtcaacagcatggggctgggcattatgggtggcggttcgcttgaagaagcgttaaccgaactggaaaccggacgcgccgacgcggtggtggtgttggaaaacgatctgcatcgtcacgcttctgctacccgcgtgaatgctgcgctggctaaagcaccgctggtgatggtggttgaccatcagcgtacagcgatcatggaaaacgcccatctggtactttccgccgccagctttgctgaaagcgacggtacggtaattaataatgaaggtcgcgcccaacgtttcttccaggtttacgatccggcttattacgacagcaaaactgtcatgctggaaagctggcgctggctgcactcgctgcacagcaccctgctgagccgtgaagtggactggacgcagctcgaccatgtgattgacgctgttgtggcgaaaatcccggaactggcaggtatcaaagatgctgcgccggatgcgacattccgtattcgtgggcagaaactggcccgtgaaccgcaccgttacagcggtcgtaccgccatgcgcgccaatatcagcgttcatgagccgcgtcagccgcaggatattgacaccatgttcaccttctcgatggaaggtaacaaccagccgaccgcgcaccgttcgcaagtgccgtttgcctgggcaccgggctggaactccccgcaggcgtggaacaaattccaggacgaagtgggcggcaaactgcgctttggcgatccgggcgtgcgtctgtttgaaaccagcgagaatggtctggattacttcaccagcgtaccggtacgcttccagccgcaggacgggaaatggcgtattgcgccgtattaccacctgtttggcagcgatgaattgtcacagcgtgctccggtcttccagagccgtatgccgcagccgtacatcaaactcaacccagcggatgccgcgaagttgggtgtgaacgcaggtacacgcgtctcctttagttacgatggcaacacggtcacgctgccggttgaaatcgccgaaggactgacggcagggcaggtgggcttgccgatgggtatgtccggcattgctccggtgctggctggcgcgcatcttgaggatctcaaggaggcacaacaatga

SEQ ID NO: 458264 - DNA, 1338 bp, Shigella boydii
atgaaaaacattatccgtactcccgaaacgcatccgctgacctggcgtctgcgcgatgacaaacagccagtgtggctggacgaataccgcagcaaaaacggttacgaaggggcgcgtaaggcgctgaccgggctgtctccggacgaaatcgttaatcaggtaaaagacgctggtctgaaagggcgcggcggagcgggcttttcgactggcctgaagtggagcctgatgccgaaagacgaatccatgaacatccgttacctgctgtgtaacgccgatgaaatggagccgggcacctataaagaccgcctgttgatggagcaactgccgcacctgctggtggaaggtatgctcatctccgcgtttgcgctgaaagcttaccgtggctacatcttcctgcgtggcgaatatatcgaagcggcagtaaatctgcgccgcgccattgccgaagccactgaagcgggcttgcttggcaaaaacattatgggaacaggtttcgacttcgaactgttcgtccataccggggcagggcgctacatctgcggggaagaaacagcgttaatcaactccctggaagggcgtcgtgctaacccacgctcgaaaccccccttcccggcaacctccggcgtatggggcaaaccgacctgtgtcaacaacgtcgaaaccctgtgtaacgttccggcgatcctcgctaacggcgtggagtggtatcagaacatctcgaaaagtaaagatgctggcaccaagctgatgggcttctccggtcgggtgaaaaatccgggactgtgggaactgccgttcggcaccaccgcacgcgagatcctcgaagattacgccggtggtatgcgtgatggtctgaaatttaaagcctggcagccaggcggcgcggggactgacttcctgaccgaagcgcaccttgatctgccgatggaattcgaaagtatcggtaaagcgggcagccgtctgggtacggcgctggcgatggcggttgaccatgagatcaacatggtgtcgctggtgcgtaacctggaagagtttttcgcccgtgagtcctgcggctggtgtacgccgtgccgcgacggtctgccgtggagcgtgaaaattctgcgtgcgctggagcgtggcgaaggccagccgggcgatatcgaaacacttgagcaactgtgtcgattcttaggcccgggtaaaactttctgtgcccacgcacctggtgcagtggagccgttacagagcgccatcaaatatttccgcgaagaatttgaggcgggaatcaaacagccgttcagcaatacccatttgattaatgggattcagccgaacctgctgaaagagcgctggtaa

SEQ ID NO: 458265 - DNA, 501 bp, Shigella boydii
atgcacgagaatcaacaaccacaaaccgaggcttttgagctgagtgcggcagagcgtgaagcgattgagcacgagatgcaccactacgaagacccgcgtgcggcgtccattgaagcgctgaaaatcgttcagaagcagcgaggctgggtgccggatggtgcgatccacgcgatcgccgatgtgctgggtattccggcaagcgacgtcgaaggtgtggcaacgttctacagtcagatcttccgccagccggttggtcgccatgtgatccgttattgcgacagcgtggtctgtcatatcaacgggtatcagggtattcaggcggcgctcgagaaaaagctgaacatcaaaccagggcaaacgacatttgatggccgctttacgctgctgccaacttgctgcctggggaactgtgataaagggccaaacatgatgatcgatgaggacactcacgcgcatctgaccccggaagcgatccctgaactgctggagcggtataaatga

SEQ ID NO: 458266 - DNA, 1803 bp, Shigella boydii
atggtgaacaatatgaccgacttaaccgcgcaagaacccgcctggcagacccgcgatcatcttgatgatccggtaattggcgaactgcgcaaccgttttgggccggatgcctttactgttcaggcgactcgcaccggggttcccgttgtgtggatcaagcgtgaacaattactggaagttggcgatttcttaaagaaactgccgaaaccttacgtcatgctgtttgacttacacggcatggacgaacgtctgcgcacacaccgcgaagggttacctgccgcggatttttccgttttctaccatctgatttctatcgatcgtaaccgcgacatcatgctgaaggtggcgctggcagaaaacgacctgcacgtaccgaccttcaccaaactgttcccgaacgctaactggtatgagcgtgaaacctgggatctgtttggcattactttcgacggtcacccgaacctgcgccgcatcatgatgccgcaaacctggaaaggtcacccgctgcgtaaagattacccggcgcgcgctaccgaattctcgccgtttgagctgaccaaagccaaacaggatctggagatggaagccctgaccttcaaaccggaagagtgggggatgaagcgcggcaccgaaaacgaggacttcatgttcctcaacctcggtccgaaccacccgtcggcgcacggggctttccgtatcgttttacaactcgacggcgaagagattgtcgactgcgtaccagacatcggctaccaccaccgtggtgcggagaaaatgggcgagcgccagtcctggcacagctacattccgtataccgaccgtattgaatacctcggcggctgcgttaacgaaatgccttacgtgctggcggtagagaaactggccgggatcaccgtgccggatcgcgttaacgtcattcgcgttatgctctccgaactgttccgtatcaacagccacctgctgtacatctcgacctttattcaggacgtcggcgcaatgacgcccgtgttcttcgcctttaccgatcgtcagaaaatttacgatctggtggaagcgatcacgggtttccgtatgcacccggcgtggttccgtattggcggcgtagcgcacgacctgccgcgcggctgggatcgcctgctgcgtgagttcctcgactggatgccgaaacgtctggcgtcttacgagaaagcggcgctgcaaaataccattctgaaaggtcgttcccagggcgttgccgcctatggcgcgaaagaggcgctggagtggggcaccactggcgcgggcctgcgtgctaccgggatcgacttcgacgtgcgtaaggcgcgtccttattctggctatgaaaacttcgactttgaaatcccggttggtggtggtgtttctgactgctacacccgcgtaatgctgaaagtggaagagctgcgccagagtctgcgcattcttgagcagtgcctcaacaacatgccggaaggcccgttcaaagcggatcacccgctgaccacgccgccgccgaaagagcgcacgctgcaacatatcgaaaccctgatcacccacttcctgcaagtgtcgtgggggccggtgatgcctgccaatgaatctttccagatgattgaggcgaccaaggggatcaacagttactacctgaccagcgacggtagcaccatcagttatcgcactcgtatccgcacgccgagttatgcgcatttgcagcaaattccggcggcgatccgcggcagcctggtgtctgacctgattgtttatctgggcagtatcgattttgttatgtcagatgtggaccgctaa

SEQ ID NO: 458267 - DNA, 663 bp, Shigella boydii
atggattatacgctcacccgcatagatcccaacggtgagaacgaccgttaccccctgcaaaagcaggagatcgtaaccgaccctctggagcaagaagttaacaaaaacgtgtttatgggcaagctcaatgacatggttaactggggtcgtaaaaactcaatttggccgtataacttcggtctttcctgctgttacgttgagatggtgacttcgtttaccgcggtgcatgacgtggcgcgttttggcgcagaagtattgcgtgcttcgccgcgtcaggctgacctgatggtggttgcaggaacctgctttaccaaaatggcaccggttattcagcgtctgtatgaccagatgctggaaccaaaatgggttatctcaatgggtgcctgtgccaactctggtggtatgtacgatatttattccgttgtgcagggcgtcgataaattcatcccggttgatgtgtatatcccgggctgcccgccgcgtcctgaagcgtacatgcaggcactgatgctgttgcaggaatctatcggcaaagaacgtcgtccgctctcctgggtggttggcgatcagggcgtttatcgcgccaatatgcaatcagagcgcgaacgcaagcgcggtgaacgcattgccgtaaccaacctgcgtacacctgacgagatttaa

SEQ ID NO: 458268 - DNA, 444 bp, Shigella boydii
atgagtatgtcaacatccactgaagtcatcgctcatcactgggcattcgctatctttcttatcgttgccattggcctgtgttgcctaatgctggtaggcggttggtttttaggcggtcgcgcacgcgcgaggtcgaaaaacgtgccgtttgaatccggtatcgactcggtcggctccgcccgcttacgcctgtccgccaagttttatctggtggccatgttcttcgttatcttcgacgttgaagcgctgtatctgttcgcatggtcaacctctatccgcgaaagcggctgggtaggctttgtggaagctgcaatttttatttttgtgttactggcaggtctggtttatctggtgcgtattggcgcgctggactggacgcccgcgcgttcacgccgcgagcgtatgaacccggaaacgaacagtatcgctaatcgtcaacgctaa

SEQ ID NO: 458269 - DNA, 165 bp, Shigella boydii; identical to SEQ ID NO: 36102

SEQ ID NO: 458270 - DNA, 939 bp, Shigella boydii
atgataagtgcaaatcgtccgataattaacctcgacctcgatctgctgagaacatttgttgctgttgccgatctgaacacttttgctgccgcagctgccgctgtgtgtcgtactcagtccgccgtaagtcagcaaatgcagcgtctggaacaactcgttgggaaagaactgttcgctcgtcacggtcgcaacaaactgttaactgaacatggcattcaacttcttggttacgccaggaaaatcctgcgttttaatgatgaggcctgctcatcattaatgttcagtaatcttcagggcgtgttaactatcggtgcttcagatgaatctgccgatacgatcttacctttcctgttaaatcgcgtgagttcggtttatccgaaattagcgctggatgtccgcgttaaacgtaatgcctatatggcagaaatgctggaatcccaggaagtggatttgatggtaaccacccatcgtccttcagcgtttaaggcattgaacctgcgtacctcgccaacacactggtactgcgcagcggaatacgtattgcaaaaaggcgagccgatccctcttgtattgctggatgatccaagtccgtttcgcgatatggtgctggcaacgcttaataaagcagatattccatggcgactggcttatgtcgcctcgacgcttccggccgttcgtgcggcagtgaaagccggtcttggcgtgacggcaaggccggttgagatgatgagcccggacctgcgtgtgctgagtggagtagatggcttaccgccgctacctgataccgaatatttgctgtgctatgacccgtccagtaataatgagctggcccaggtgatctatcaggcgatggagagctaccataatccgtggcaatacagcccaatgtctgctccggaaggggatgattcattgttgattgaaagggatatcgagtaa

SEQ ID NO: 458271 - DNA, 1218 bp, Shigella boydii
atgtcccccattgaaaaatccagcaaattagagaatgtctgttatgacatccgtggtccggtgctgaaagaagcaaaacgcctggaagaagaaggtaacaaggtactgaaactgaacatcggcaacccagccccgttcggttttgacgcgccagatgaaatcctcgttgacgtgatacgcaacctgcctaccgctcaagggtattgcgattccaaaggtctttactccgcgcgtaaagccatcatgcagcactaccaggctcgtggcatgcgtgatgttaccgtggaagatatttacatcggcaatggtgtatcggagcttatcgttcaggcaatgcaggcattgctgaacagcggggacgaaatgttggttcctgcaccagattacccactatggaccgcggcggtttcgctttccagcggtaaagcggtgcattatctttgcgatgaatcctctgactggttcccggacctcgatgatattcgcgctaaaattacgcctcgtacgcgtgggatcgttattatcaacccaaataacccaaccggcgcggtatattccaaagagcttttaatggagattgtggagattgcacgtcagcataatctcattatcttcgccgatgaaatttatgacaaaattctttacgacgacgctgagcatcactcaattgcgccgctggcacctgacctgctgaccattacctttaacggactgtcgaaaacgtaccgcgttgcaggcttccgtcaggggtggatggtgttgaacgggccgaaaaaacacgccaaaggctacatcgaaggtctggaaatgctggcttcaatgcgcctgtgtgctaacgttcctgcgcaacacgccattcagaccgcgctgggtggttatcagagcatcagtgaatttattacccctggaggtcgtctttatgagcagcgtaaccgcgcgtgggaactgatcaacgatattccgggcgtttcctgcgtgaaacctcgtggtgcgctgtatatgttcccgaaaatcgacgccaaacgctttaacattcacgacgatcagaaaatggtgctggatttcctgttgcaggaaaaagttctgttggtgcaagggacggcattcaactggccgtggccggatcacttccgcattgtcacgctaccgcgtgtcgatgatatcgagctgtctttgagcaagttcgcgcgtttcctttctggttatcatcagctgtaa

SEQ ID NO: 458272 - DNA, 600 bp, Shigella boydii
atgaaacagagccatttttttgcccatctctcccgcctgaaactcattaaccgctggccgctaatgcgcaacgtgctgacggaaaatgtgtccgaacacagtttgcaggtagcgatggtcgcccatgcgctggcagctatcaaaaatcgaaaatttggcggtaatgtcaacgccgaacgtatcgctttactggcgatgtaccacgatgcctcagaagtgctcaccggcgatctccctactccggtgaaatacttcaattcgcaaatcgctcaggagtacaaggctattgaaaaaatcgctcagcaaaaactggtcgatatggttccggaagagctgcgggatatctttgcgccgttaattgacgagcatgcatatagcgatgaagaaaaatcgctggtgaaacaggcagatgcactgtgtgcatatctgaaatgtctggaagaactcgcggccggaaataatgaattcttgctggcaaaaacgcgactggaagcgacgcttgaagcgcgtcgcagccaggagatggactacttcatggaagtatttgttcccagcttccatctttcgctcgatgagattagccaggattcaccgctgtaa

SEQ ID NO: 458273 - DNA, 1833 bp, Shigella boydii
gtgaacggtgaattgatttgggttctttcattactggccgttgccatcgtcttgtttgcgacgggcagagtgcgtatggatgcggtcgctttgtttgttattgtcgcgtttgcattaagcggaacgctgacggtccccgaagtattttccggcttttctgatcctaacgttgtcctgattgccgccttgtttattattggcgatggtttggtccgtaccggtgttgccaccgtaatgggaacatggctggtcaaagtggcgggcaacagtgaaatcaaaatgttggttttgttgatgctgaccgtcgcggggcttggcgcgtttatgagttcaaccggcgttgtcgctatctttattcccgtggtgttaagcgttgccatgcgtatgcaaacttcgccgtcacgtctgatgatgccgttaagttttgccgggctgattagcggcatgatgacgctggtggcgacgccgccgaacctggtagtcaacagtgaattgctgcgtgaaggctatcacggcttcagtttctttagcgtaacacctgttggcctggtcgtgctggtgctgggtattttgtatatgttagtgatgcgtttcatgctgaaaggggatacccagaccccgcagcgcgaaggctggacgcgtcgaacctttcgcgatcttatccgtgaatatcgactgaccgggcgtgcgcgacgtctggctattcgccccggatcggcaatgattggtcaacggctggatgatctcaaattacgtgagcgttatggcgctaacgtcatcggtgttgaacgctggcggcgttttcgtcgcgttatcgtgaacgttaatggggtttctgagtttcgcgcgcgtgacgttttgcttattgatatgtctgcggctgatgtcgatctccggcaattttgtagtgagcaattgctggagccgatggtactgcgcggcgagtatttttctgaccaggcccttgatgtgggcatggcagagatttcattaattcctgagtcagaactgattggtaaatcggtgcgcgaaattggttttcgtacccgctacggactgaatgtggtggggctaaagcgcaatggcgtggcgctggaaggttcgctggcggatgagcctctgctgctgggcgatatcatcctggttgtgggtaactggaaactgatcggtatgctggccaaacagggccgcgacttcgtagcgctgaacttaccggaagaggtgagtgaagcatcgcccgcgcacagccaggcaccccatgccattttctgtctggtgctaatggtggcgttaatgctgacagatgaaattcctaatcctgttgccgctatcatcgcctgcctgctgatggggaaattccgctgtatagatgctgaaagcgcctataaatccattcactggccgagcattattttgatcgttgggatgatgccgtttgctgtggcattacagaaaacgggaggtgtcgcgctggcggtgaaagggctgatggacattggcggtggttacgggccacatatgatgctggggtgtttgtttgtcttgtcggcggttattgggctatttatctctaataccgcgacggcggtgttgatggctccgattgcgctggctgctgccaaaacgatgggggtgtcgccttatccattcgcgatggtcgtggcgatggcagcatccgccgcctttatgacaccggtttcttcacctgttaacacactggttttaggtccgggaaattacagcttcagtgactttgtgaagttgggggtaccgttcaccattatcgtgatggcggtttgtgtggtgatgatcccgatgctgtttccgttttga

SEQ ID NO: 458274 - DNA, 651 bp, Shigella boydii
gtgcggtgcaaaggttttctgtttgatcttgatggaacgctggtggattccctgcctgcggtagaacgggcgtggagcaactgggccagacgtcatgggttagcgccggaagaggtgctggctttcattcacggtaaacaggcgatcacctctttgcgccattttatggcgggcaaatccgaggctgatattgccgccgagtttacgcgtctggagcacatcgaggccacggaaaccgaaggtattaccgcgcttccgggggcaatcgccttactcaatcatttgaataaagcaggtattccgtgggccattgtgacttctggctccatgccggtagcgcgagcgcgccataaaatagctgggcttcccgcaccagaggtgtttgtaaccgctgagcgagtgaagcgcggaaaaccagaacctgatgcgtatctgttaggtgcgcagctgctggggcttgcgccgcaggagtgtgtggtggcggaagatgctcccgctggcgtgctttctggcctggcggcgggttgccatgtcattgcggttaacgctccggcagataccccgcgcctgaatgaggtcgatttggtcctccacagtctggagcaaattactgtgaccaaacagctaaatggcgatgttattattcagtga

SEQ ID NO: 458275 - DNA, 495 bp, Shigella boydii
atggaaatgaccaacgcgcaacgtcttattttgtctaatcagtacaagatgatgactatgctcgatccggcaaatgctgaacgttaccgtcgcctgcaaacaattattgagcgtggttacggattacagatgcgtgaattggatcgcgagtttggcgagctgaaagaagaaacctgccgcactatcatcgacattatggagatgtatcatgcgttgcatgtttcctggtctaatttgcaggaccagcaatccatcgatgaacgtcgtgtcaccttcctcggctttgacgccgccactgaagcacgttacctcggttatgtccgctttatggttaatgtggaagggcgctatacccattttgacgctgggactcatggttttaacgcccagacgccaatgtgggaaaaatatcagcgcatgcttaatgtgtggcatgcctgcccgcgtcagtaccatttgagcgccaacgaaattaatcaaattatcaacgcctga

SEQ ID NO: 458276 - DNA, 456 bp, Shigella boydii
atgtcaacgccggataatcgttctgttaatttttttagcttgtttcgccggggacagcattactcaaagacgtggccgctggaaaaacgccttgccccggtctttgtcgaaaatcgcgttatcaagatgacgcgttatgcgatccgttttatgccgccgatcgccgtatttactctctgctggcagattgccctgggcggtcagcttgggccggcagttgccactgcgctgttcgccttaagtttacccatgcagggattatggtggctgggcaagcgttctgtaacgccattaccccctgctatcctcaactggttttatgaagttcgcggtaaattgcaggagtctggacaggtgttggcacccgttgaaggcaagcctgattaccaggcattagctgacacgcttaagcgcgccttcaaacaactggataaaactttccttgatgatttgtaa

SEQ ID NO: 458277 - DNA, 1203 bp, Shigella boydii
atgtcgagtaagttagtactggttctgaactgcggtagttcttcactgaaatttgccatcatcgatgcagtaaatggtgaagagtacctttctggtttagccgaatgtttccacctgcccgaagcacgtatcaaatggaaaatggacggcaataaacaggaagcggctttaggtgcaggcgccgctcacagcgaagcgctcaactttatcgttaatactattctggcacaaaaaccagaactgtctgcgcagctgactgctatcggtcaccgtatcgtacacggcggcgaaaagtataccagctccgtagtgatcgatgagtctgttattcagggtatcaaagatgcagcttcttttgcaccgctacacaacccggctcacctgatcggtatcgaagaagctctgaaatctttcccacagctgaaagacaaaaacgttgctgtatttgacaccgcgttccaccagactatgccggaagagtcttacctctacgccctgccttacaacctgtacaaagagcacggcatccgtcgttacggcgcgcacggcaccagccacttctatgtaacccaggaagcggcaaaaatgctgaacaaaccggtagaagaactgaacatcatcacctgccacctgggcaacggtggttccgtttctgctatccgcaacggtaaatgcgttgacacctctatgggcctgaccccgctggaaggtctggtcatgggtacccgttctggtgatatcgatccggcgatcatcttccacctgcacgacaccctaggcatgagcgttgacgcaatcaacaaactgctgaccaaagagtctggcctgctgggtctgaccgaagtgaccagcgactgccgctatgttgaagacaactacgcgacgaaagaagacgcgaagcgcgcaatggacgtttactgccaccgcctggcgaaatacatcggtgcctacactgcgctgatggatggtcgtctggacgctgttgtattcactggtggtatcggtgaaaatgccgcgatggttcgtgaactgtctctgggcaaactgggcgtgctgggctttgaagttgatcatgaacgcaacctggctgcacgtttcggcaaatctggtttcatcaacaaagaaggtacccgtcctgcggtggttatcccaaccaacgaagaactggttatcgcgcaagacgcgagccgcctgactgcctga

SEQ ID NO: 458278 - DNA, 2145 bp, Shigella boydii
gtgtcccgtattattatgctgatccctaccggaaccagcgtcggtctgaccagcgtcagccttggcgtgatccgtgcaatggaacgcaaaagcgttcgtctgagcgttttcaaacctatcgctcagccgcgtaccggtggcgatgcgcccgatcagactacgactatcgtgcgtgcgaactcttccaccacgacggccgctgaaccgctgaaaatgagctacgttgaaggtctgctttccagcaatcagaaagatgtgctgatggaagagatcgtcgcaaactaccacgctaacaccaaagacgctgaagtcgttctggttgaaggtctggtcccgacacgtaagcaccagtttgcccagtctctgaactacgaaatcgctaaaacgctgaatgcggaaatcgtcttcgttatgtctcagggcactgacaccccggaacagctgaaagagcgtatcgaactgacccgcaacagcttcggcggtgccaaaaacaccaacatcaccggcgttatcgttaacaaactgaacgcaccggttgatgaacagggtcgtactcgcccggatctgtccgagattttcgacgactcttccaaagctaaagtaaacaatgttgatccggcgaagctgcaagaatccagcccgctgccggttctcggcgctgtgccgtggagctttgacctgatcgcgactcgtgcgatcgatatggctcgccacctgaatgcgaccatcatcaacgaaggcgacatcaatactcgccgcgttaaatccgtcactttctgcgcacgcagcattccgcacatgctggagcacttccgtgccggttctctgctggtgacttccgcagaccgtcctgacgtgctggtcgccgcttgcctggcagccatgaacggcgtagaaatcggtgccctgctgctgactggcggctacgaaatggacgcgcgcatttctaaactgtgcgaacgtgctttcgctaccggcctgccggtatttatggtgaacaccaacacctggcagacctctctgagcctgcagagcttcaacctggaagttccggttgacgatcacgaacgtatcgagaaagttcaggaatacgttgctaactacatcaacgctgactggatcgaatctctgactgccacttctgagcgcagccgtcgtctgtctccgcctgcgttccgttatcagctgactgaacttgcgcgcaaagcgggcaaacgtatcgtactgccggaaggtgacgaaccgcgtaccgttaaagcagccgctatctgtgctgaacgtggtatcgcaacttgcgtactgctgggtaatccggcagagatcaaccgtgttgcagcgtctcagggtgtagaactgggtgcagggattgaaatcgttgatccagaagtggttcgcgaaagctatgttggtcgtctggtcgaactgcgtaagaacaaaggcatgaccgaaaccgttgcccgcgaacagctggaagacaacgtggtgctcggtacgctgatgctggaacaggatgaagttgatggtctggtttccggtgctgttcacactaccgcaaacaccatccgtccgccgctgcagctgatcaaaactgcaccgggcagctccctggtatcttccgtgttcttcatgctgctgccggaacaggtttacgtttacggtgactgtgcgatcaacccggatccgaccgctgaacagctggcagaaatcgcgattcagtccgctgattccgctgcggccttcggtatcgaaccgcgcgttgctatgctctcctactccaccggtacttctggtgcaggtagcgacgtagaaaaagttcgcgaagcaactcgtctggcgcaggaaaaacgtcctgacctgatgatcgacggtccgctgcagtacgacgctgcggtaatggctgacgttgcgaaatccaaagcgccgaactctccggttgcaggtcgcgctaccgtgtttatcttcccggatctgaacaccggtaacaccacctacaaagcggtacagcgttctgccgacctgatctccatcgggccgatgctgcagggtatgcgcaagccggttaacgacctgtcccgtggcgcactggttgacgatatcgtctacaccatcgcgctgactgcgattcagtctgcacagcagcagtaa

SEQ ID NO: 458279 - DNA, 1479 bp, Shigella boydii
atgcccgatacgttggtgattatcttttttgttgctattttaaccagccttgccacctgggtagttccggtggggatgtttgacagtcaggaagtgcagtatcaggttgatggtcaaacaaaaacacgcaaagtcgtagatccacactcatttcgcattctgactaacgaagcaggcgaacctgagtatcaccgcatacagctgttcacgacgggcgatgaacgcccgggcctgatgaacttcccgtttgaaggattaacctcaggatcgaaatacgggacagctgttggcatcatcatgtttatgcaggtgattggcggcgcgtttggcattgtgatgcgtacaggaaccattgataacggtatcctggcgcttattcgccatacccgcgggaatgaaattctctttattcctgcgctgtttattctgttttcacttggcggcgcggtatttggtatgggagaagaggccgtcgcctttgccattatcatcgcaccgctaatggtccggctgggctatgacagtattaccaccgtcctggtgacctatattgccacgcaaatcggttttgccagttcgtggatgaacccgttttgtgtggtcgttgctcaggggattgccggcgttccggtgctttctggctccgggttgcgcatcgtggtgtgggttatcgccactatgattggcctgatctttaccatggtgtacgcctcacgagtgaaaaagaatcctcttctgtcacgcgtgcatgagtccgaccgcttctttcgtgaaaagcaggcggatgttgaacaacgtccgtttacctttggtgactggctggtattgattgtcctgaccgccgtaatggtctgggtgatttggggcgtgatcgttaatgcctggtttattccagaaattgccagccagttcttcaccatgggtctggtgattggcatcatcggcgttgttttccgccttaacggcatgacggttaataccatggcttcatcctttaccgaaggggcgcgaatgatgatcgcccctgccctgctggtgggtttcgccaaagggattttgctgctggtcggtaatggtgaagcgggtgatgccagcgtgttaaataccatcctcaacagcattgccaatgccattagcggtctggacaacgcggtcgcggcctggtttatgttgctcttccaggcggtatttaatttcttcgtgacgtccggttctggtcaggcggcgttaaccatgccgttactggcaccgcttggcgatctggtcggtgttaaccgtcaggttaccgtgctggcattccagtttggtgatggcttcagtcacatcatttacccaacctcagcttcgttaatggcaactctcggtgtgtgcagggtggacttccgtaactggctgaaggtgggcgcgcccctacttggactgctgtttattatgtccagcgtcgtagtgatcggcgctcagttgatgggctaccactaa

SEQ ID NO: 458280 - DNA, 543 bp, Shigella boydii
atggaacagcgtcgtttggcaagtactgaatgggtggatattgtcaatgaagagaacgaagtcattgcacaagccagccgggaacaaatgcgggcacagtgtctgcgtcatcgtgcaacttacatcgtcgtgcatgatggcatgggcaaaattctggtccagcgtcgtaccgagacaaaagactttttacccggcatgttagatgcgaccgcaggcggtgtggttcaggccgatgagcaactgctggaatccgcgcgtcgcgaagcggaagaagagttgggcattgccggtgtcccctttgccgagcacgggcagttctatttcgaagataaaaattgccgtgtctggggcgcgttgttcagctgcgtctctcacggtcccttcgccctacaggaagatgaagtcagtgaagtttgctggctgacgccggaagaaatcaccgcacgctgcgatgagttcactccagactcgctgaaagcgctggcgttgtggatgaagcgcaatgccaaaaatgaagccgtagagactgaaacggcagaatga

SEQ ID NO: 458281 - DNA, 552 bp, Shigella boydii
atgaaactgatgtttgcatcggacattcatgggtcgttaccggcgacggaacgtgttctggagttgtttgcccaaagcggtgcccagtggctggtgatccttggcgacgtgttgaatcacggcccgcgtaatgctttaccggagggttacgcgccagccaaagtcgctgaacggcttaatgaagtggcacataaggttatcgctgtgcgcggcaactgcgacagcgaagtggatcaaatgctgctgcatttcccgataaccgcgccgtggcaacaggtattactggaaaaacaacgtctgtttttgacgcatggtcatctttttggcccggaaaatctacctgctttaaaccagaacgatgtgctggtgtacggtcatacccatctgccagtggcagaacagcggggggagattttccacttcaaccccggctcggtgagtattccgaaaggcggtaatccggcgagttatggcatgctggataatgacgtacttagtgtaatcgcactcaatgatcaaagtatcattgcgcaggtcgcgattaatccgtaa

SEQ ID NO: 458282 - DNA, 645 bp, Shigella boydii
atgagtaaacccgctatcacgctttggtcagatgcccactttttctccccttatgtgttatccgcttgggtggcgttgcaggaaaaaggcctgtcgtttcatatcaagaccatcgacctcgacagcggtgaacatttgcagccgacgtggcaaggttacggtcagacacgccgtgtgccgttattacaaatcgatgattttgagttgagtgaatcttctgccattgcggagtatctggaagatcgatttgcgccaccgacctgggaacgtatttatccgcttgatttagaaaatcgtgcgcgtgcacgacagattcaggcctggctgcgcagcgatctgatgcccatccgcgaagagcgtccgacggatgttgtctttgcgggggcgaaaaaagcgccactaacggccgagggaaaagccagtgcagagaaactgttcgcgatggcagaacatttgttagcactgggtcagccgaatttatttggtgaatggtgcattgctgatactgatctggcgctaatgattaaccgcctggtactacatggcgatgaggtgccagaacgcctggtggattatgcgacattccagtggcagcgagcgtctgtccagcgttttattgcactttcggcgaagcaatctggctga

SEQ ID NO: 458283 - DNA, 648 bp, Shigella boydii
atgatcgatctctatttcgccccgacacccaatggtcacaaaattacgctgtttctcgaagaagcagagcttgattatcgcttgattaaggtagacctggggaaaggcggtcagtttcgtccggaatttttgcgcatttcgcccaacaacaaaattccggcaattgttgatcattctcctgccgatggcggcgaaccgctaagcctctttgaatctggtgccattttgttgtatctggctgagaaaacggggctctttttgagtcatgaaacgcgtgaacgcgccgccacattacagtggttattctggcaggtaggcggactggggccgatgcttgggcaaaatcatcattttaatcacgcagccccccaaaccattccttacgctattgaacgttatcaggttgaaactcagcgtctttaccatgtactaaacaagcggctggaaaactcgccctggctgggaggcgagaactacagcattgcggatattgcctgctggccgtgggttaatgcctggactcgccagcgaattgacctcgcaatgtatccggcagtcaagaactggcatgagcggatccgttcgcgccctgccaccgggcaggcactgctaaaagcacaactcggtgatgagcgttcggatagttaa

SEQ ID NO: 458284 - DNA, 363 bp, Shigella boydii
atggcacaacctgccgctattattcgtataaagaaccttcgtttacgtacgtttatcggaattaaggaagaagaaattaacaaccgtcaggatattgttatcaatgtgacgatccactaccccgccgataaagcgcgcactagcgaagatatcaacgatgcgctgaattatcgcaccgtaacgaaaaacattattcagcatgtagagaataaccgtttctctttgttggaaaaattaactcaggatgtgctcgatatcgcacgtgaacatcactgggtgacgtatgctgaagtggagatcgataaactgcacgcgctgcgctacgccgattcggtatccatgaccttaagctggcagcgttaa

SEQ ID NO: 458285 - DNA, 894 bp, Shigella boydii
atgaacatagtgatcaccggagggacgggattaattggtcgccatttgattccgcgtttgctggagctgggccatcaaatcacggtagtgacgcgtaacccacagaaagccagttccgttctcggccctcgggtgacgctatggcaagggctagccgatcaaagcaacctcaacggcgttgatgcggtaatcaacctggccggagaaccgattgctgataaacgctggactcacgagcaaaaagagcgtctctgccaaagccgctggaatatcacgcaaaaactggtcgatttgattaatgccagcgacacgccgccgtcggtactcatttccggctcggcaacgggctattatggcgacttaggtgaagtggtggttaccgaagaggaaccgccgcataacgaatttactcataaactctgcgcccgctgggaagagattgcctgccgggcgcaaagtgacaaaacgcgagtgtgcctgctgcgaaccggcgtgctactggcaccggacggcggtattctcggtaaaatgctgccaccgtttcgtcttggcctgggcgggccgattgactctggtcggcagtatctggcctggattcatattgatgatatggtcaacggtattctctggctgctggataacgagctgcgcgggccatttaatatggtttcgccctccccggtacgcaatgaacaatttgcccatgcgctcggtcacgcgctgcatcgcccggccattttgcgcgtccccgcgaccgccattcgactgttaatgggcgaatcttcagtactggtattaggtggacaacgcgcgatgcctaaacggctggaagaagcgggttttgcgtttcgctggtacgatttagaagaggcgctggcagatgtcgttcgctga

SEQ ID NO: 458286 - DNA, 543 bp, Shigella boydii
gtgatcccgatgctgttttatcatggttgcagaagtccttatccttattcactctgctggcttgatgaatttgccgagcctgctatagcccgcaaaatatattcatcagcgtttccgttggtggatattaccgtggtgccggatgacgagattatgcaacaccgcaaaatggcgctgttggagttaattcagaaacatattcgtcagcgcgatctgttgggattagtcgaccaaattgtttcgctgctagttacagggaacactaatgacagacagctaaaagccctgtttaattacgtattacaaacaggggatgcccagcgttttcgtgcatttattggtgagatagcggaacgcgcaccacaagaaaaggagaaactgatgaccattgctgacagattacgtgaagaaggcgcaatgcagggcaaacacgaagaagccctgcgtattgctcaggagatgctggatagaggtttagacagagagttagttatgatggtgacccgactttcaccagacgatcttatcgcgcaaagccactaa

SEQ ID NO: 458287 - DNA, 1641 bp, Shigella boydii
atggcaatccacaatcgtgcaggccaacctgcacaacagagtgatttgattaacgtcgcccaactgacggcgcaatattatgtactgaaaccagaagcagggaatgcggagcacgcggtgaaattcggtacttccggtcaccgtggcagtgcagcgcgccacagctttaacgagccgcacattctggcgatcgctcaggcaattgctgaagaacgtgcgaaaaacggcatcactggcccttgctatgtgggtaaagatactcacgccctgtccgagcctgcgttcatttccgtactggaagtgctggcagcgaacggcgttgatgtcattgtgcaggaaaacaatggcttcactccaacgcctgccgtttccaatgccatcctggttcacaataaaaaaggtggtccgctggcagacggtatcgtgattacaccgtcccataacccgccggaagatggtggtatcaagtacaatccgccaaatggtggcccggctgataccaacgtcaccaaagtggtggaagacagggccaacgcactgctggccgatggcctgaaaggcgtgaagcgtatctccctcgacgaagcgatggcatccggtcatgtgaaagagcaggatctggtgcagccgtttgtggaaggtctggccgatatcgttgatatggcggcgattcagaaagcgggcctgacgctgggcgttgatccgctgggcggttccggtatcgaatactggaagcgtattggcgagtattacaacctcaacctgaccatcgttaacgatcaggtcgatcaaaccttccgctttatgcaccttgataaagacggcgcgatccgtatggactgctcctccgagtgtgcgatggcgggcctgctggcactgcgtgataagttcgatctggcgtttgctaacgacccggattatgaccgtcacggtatcgtcactccggcaggtttgatgaatccgaaccactacctggcggtggcgatcaactacctgttccagcatcgtccgcagtggggcaaagatgttgctgtcggtaaaacgctggtttcttctgcgatgatcgaccgtgtggtcaatgacttgggccgcaagctggtagaagtcccggtaggtttcaaatggtttgttgatggtctgttcgacggcagcttcggctttggcggcgaagagagcgcaggggcttccttcctgcgtttcgacggcacgccgtggtccaccgacaaagacggcatcatcatgtgtctgctggcggcggaaatcaccgctgtcaccggtaagaacccgcaggaacactacaacgaactggcaaaacgctttggtgcgccgagctacaaccgtttgcaggcagctgcgacttccgcacaaaaagcggcgctgtctaagctgtctccggaaatggtgagcgccagcaccctggcaggcgacccgatcaccgcgcgcctgacggcggcaccgggcaatggtgcttctatcggcggtctgaaagtgatgactgacaacggctggttcgccgcgcgtccgtcaggcacggaagacgcatataagatctactgcgaaagcttcctcggtgaagaacatcgcaagcagattgagaaagaagcggttgagattgttagcgaagttctgaaaaacgcgtaa

SEQ ID NO: 458288 - DNA, 546 bp, Shigella boydii
atgaaaacgattgaagttgatgatgaactctacagctatattgccagccacactaagcatatcggcgagagcgcatccgacattttacggcgtatgttgaaattttccgccgcatcacagcctgctgctccggtgacgaaagaggttcgcgttgcgtcacctgctatcgtcgaagcgaagccggtcaaaacgattaaagacaaggttcgcgcaatgcgtgaacttctgctttctgacgaatacgcagagcaaaagcgagcggtcaatcgctttatgctgctgttgtctacactatattctcttgacgcccaggcgtttgccgaagcaacggaatcgttgcacggtcgtacacgcgtttactttgcggcagatgaacaaacgctgctgaaaaatggtaatcagaccaagccgaaacatgtgccaggcacgccgtattgggtgatcaccaacaccaacaccggccgtaaatgcagcatgatcgaacacatcatgcagtcgatgcaattcccggcggaattgattgagaaggtttgcggaactatctaa

SEQ ID NO: 458289 - DNA, 765 bp, Shigella boydii
atgaaattgaatatccgcgcgcaaactgcacaaaaccagcacaataattctcccatcgttcttgtccatggtctgtttggtagcctcgacaaccttggcgtactggctcgcgatctggtaaacgatcacaatatcatccaggttgatatgcgtaaccacggtctttcaccgagagatccggtaatgaattacccggcgatggcgcaggatcttgttgatactctggatgcacagcagatcgacaaagcaacatttatcggtcactccatgggcggtaaagcagtaatggcacttacggcactggcccgcgatcgcatcgataaactggtggcgatcgatatcgcaccggtcgactatcacgtacgccgtcatgatgagattttcgcggctatcaacgcggtcagtgaatcggacgcacaaactcgccagcaagcagcagcaataatgcgccagcatcttaatgaagaaggggtgattcagtttctgttgaaatcttttgttgacggggagtggcgctttaacgtgccggtattgtgggatcagtatccgcatattgtgggttgggagaaaatcccggcatgggatcaccctgccctgtttatccctagcggcaattctccgtatgttagcgagcagtaccgtgatgatttactggcacaatttccacaggcacgggcgcatgtgattgcaggcgcgggtcactgggtccatgctgaaaaaccggatgcggtattacgcgctatccgtcgctatctcaatgattaa

SEQ ID NO: 458290 - DNA, 363 bp, Shigella boydii
atgtattatggcgcgctatccatccgggcagaggcctggctgattgtttcccccgaagtcaccaagatcatggccaaagaacaaacggaccgtacgacattagatctgttcgcgcacgagcgtcgaccgggacgaccgaaaactaatccgctttcgcgcgatgaacagctgcgtattaataaacgcaaccagctaaaacgcgacaaagtacgtggccttaagcgtgtcgaactgaagctgaacgcggaagctgtcgaggcgctgaacgagctggcggagtcgcgcaatatgagccgtagcgaactgatcgaagagatgttaatgcagcaactggcggcgctgcgtagtcagggcatcgtttaa

SEQ ID NO: 458291 - DNA, 531 bp, Shigella boydii
atggctatcactggcatctttttcggcagcgacaccggtaataccgaaaatatcgcaaaaatgattcaaaaacagcttggtaaagacgttgccgatgtccatgacattgcaaaaagcagcaaagaagatctggaagcttatgacattctgctgctgggcatcccaacctggtattatggcgaagcgcagtgtgactgggatgacttcttcccgactctcgaagagattgatttcaacggcaaactggttgcgctgtttggttgtggtgaccaggaagattacgccgaatatttctgcgacgcattgggcaccatccgcgacatcattgaaccgcgcggtgcaacgatcgttggtcactggccaactgcgggctatcatttcgaagcatcaaaaggtctggctgatgacgaccactttgtcggtctggctatcgacgaagaccgtcagccggaactgaccgctgaacgtgtagaaaaatgggttaaacagatttctgaagagttgcatctcgacgaaattctcaatgcctga

SEQ ID NO: 458292 - DNA, 447 bp, Shigella boydii
atgactgataacaataccgccctaaagaaagctggcctgaaagtaacgcttcctcgtttaaaaatcctggaagttcttcaggagccggacaaccatcacgtcagtgcggaagatttatacaaacgtctgatcgatatgggtgaagaaattggtctggctacggtatatcgcgtactgaaccagtttgacgacgctggtatcgtcacccgccacaattttgaaggcggtaaatccgtatttgaactgacacagcaacatcaccacgatcacctgatctgcctcgactgcggcaaggttatcgaatttagtgatgattccatcgaagcgcgtcagcgtgaaattgccgcaaaacatggcattcgcctgactaaccacagtctctatctttacggtcactgtgccgaaggcgattgccgcgaagatgaacatgcgcacgaaggcaaataa

SEQ ID NO: 458293 - DNA, 327 bp, Shigella boydii
atgaaaaaactgattctcatcgccataatggcatcggggctggtagcttgtgcgcaatcaaccgcgccacaggaagacagtcgtctgaaagaggcatacagcgcctgtatcaacaccgcacaaggttcgccagaaaaaattgaagcctgccagagcgtgttaaacgtgctgaagaaagagaaacaacatcagcattttgccgaccaggaaagtgtccgcgtactggattatcagcagtgtctgcgtgcaacgcaaaccggaaatgatcaggcggtgaaagccgattgtgataaagtttggcaggaaattcgcagtaataacaaataa

SEQ ID NO: 458294 - DNA, 1407 bp, Shigella boydii
atgcgtacgtttagtggcaaacgtagtacgctggcgctggctatcgccggtgttacagcaatgtcgggctttatggcaatgccggaggctcgcgccgaaggattcatcgacgattcaaccttaaccggcggtatatattactggcagcgtgaacgcgaccgtaaagatgttaccgacggcgacaaatacaaaaccaacctttctcactccacctggaatgccaacctcgattttcagtccggttatgctgctgatatgttcggccttgatattgctgtgtttacggcgattgaaatggcggaaaacggcgacagctcccacccgaacgaaatcgcgttttcaaaaagtaataaagcctatgacgaagactggtccggcgacaaaagcggtataagcctgtataaagctgcggccaaatttaaatacggtccggtttgggcgagggcaggttacattcagccaactggtcaaacgctgttagcgccgcactggagctttatgccaggtacttatcagggggcggaagccggggcgaattttgattacggcgatgctggtgcgttgagtttctcctacatgtggaccaacgaatacaaagcgccgtggcatctggaaatggatgagttttatcagaacgataaaaccaccaaagttgattatctgcactcccttggggcgaaatacgacttcaaaaataacttcgtactggaagcggcatttggtcaggcggaagggtatatcgatcaatattttgccaaagccagctacaaatttgatatcgccggtagcccgttaaccaccagctaccagttctatggtacgcgcgataaagttgacgatcgcagcgtcaacgacctttatgacggcaccgcctggctgcaagcgttgacctttggttaccgggcggctgacgtagtggatttgcgcctcgaaggcacctgggttaaggctgacggtcagcagggatacttcctgcaacgtatgactccaacctacgcttcctccaacggccgcctggatatctggtgggataaccgttccgacttcaacgctaacggcgaaaaagcggtcttcttcggtgcgatgtatgacctgaaaaactggaatcttccaggcttcgccatcggcgcttcctacgtttacgcatgggatgctaaacctgcgacctggcagagcaatccggatgcgtactacgacaaaaaccggactattgaagagtctgcatacagcctggatgcggtctacaccattcaggacggtcgcgccaaaggcacgatgttcaaactgcacttcaccgaatacgacaaccactccgacatcccaagctggggcggtggttacggcaacatcttccaggatgagcgtgacgtgaaatttatggtaatcgcaccattcaccatcttctga

SEQ ID NO: 458295 - DNA, 1665 bp, Shigella boydii
atgagtgaggcagaagcccgcccgactaactttatccgtcagatcatcgatgaagatctggccagtggtaagcacaccacagtacacacccgtttcccgccggagccgaatggctatctgcatattggccatgcgaaatctatctgcctgaacttcgggatcgcccaggactataaaggccagtgcaacctgcgtttcgacgacactaacccggtaaaagaagatatcgagtatgttgagtcgatcaaaaacgacgtagagtggttaggttttcactggtctggtaacgtccgttactcctccgattattttgatcagctccacgcctatgcgatcgaactgatcaataaaggcctggcgtacgttgatgaactgacgccggaacagatccgcgaataccgcggcaccctgacgcaaccgggtaaaaacagcccgtaccgcgaccgcagcgttgaagagaacctggcgctgttcgaaaaaatgcgtgccggtggttttgaagaaggtaaagcctgcctgcgtgcgaaaatcgacatggcttcaccgtttatcgtgatgcgcgatccggtgctgtaccgcattaaatttgctgaacaccaccagactggcaacaagtggtgcatctacccgatgtacgacttcacccactgcatcagcgatgccctggaaggtattacgcactctctgtgtacgcttgagttccaggacaaccgtcgcctgtacgactgggtgctggacaacatcaccattcctgttcacccgcgccagtacgaattctcgcgcctgaatctggaatacactgtgatgtccaagcgtaagctgaacctgctggtgaccgacaagcacgttgaaggctgggatgacccgcgtatgccgaccatttccggtctgcgtcgtcgtggttacactgctgcttctattcgtgagttctgcaaacgcatcggcgtgaccaagcaggacaacaccattgagatggcgtcgctggaatcctgcatccgtgaagatctcaacgaaaacgccccgcgcgcaatggcggttatcgatccggtgaaactggttatcgaaaactatcagggcgaaggcgaaatggttaccatgccgaaccatccgaacaaaccggaaatgggtagccgccaggtgccgtttagcggtgagatttggatcgatcgcgccgatttccgcgaagaagctaacaagcagtacaaacgtctggtgctgggtaaagaagtgcgtctgcgtaatgcttacgtcattaaggcagaacgcgtggagaaagatgccgaaggcaatatcaccaccatcttctgtacttatgacgccgacaccttaagcaaagatccggcagatggtcgtaaagtcaaaggtgttattcactgggtgagcgcggcacatgcgctgccggttgaaatccgtctgtacgaccgtctgttcagcgtgcctaacccaggtgctgcggatgatttcctgtcggtgattaacccggaatcgctggtgatcaaacagggctttgctgaaccgtcgctgaaagatgcggttgcgggtaaagcattccagtttgagcgtgaaggttacttctgcctcgacagccgccattccacagcggaaaaaccggtatttaaccgcaccgttgggctgcgtgatacctgggcgaaagtaggcgagtaa

SEQ ID NO: 458296 - DNA, 123 bp, Shigella boydii; identical to SEQ ID NO: 11206

SEQ ID NO: 458297 - DNA, 1947 bp, Shigella boydii
atgaatattttaggttttttccagcgactcggtagggcgttacagctccctatcgcggtgctgccggtggcggcactgttgctgcgattcggtcagccagatttacttaacgttgcgtttattgcccaggcgggcggtgcgatttttgataacctcgcattaatcttcgccatcggtgtggcatccagctggtcgaaagacagcgcaggtgcggcggcgctggcgggtgcggtaggttactttgtgttaaccaaagcgatggtgaccatcaacccagaaataaacatgggtgtactggcgggtatcattaccggtctggttggtggcgcagcctataaccgttggtccgatattaaactgccggacttcctgagcttcttcggcggcaaacgctttgtgccgattgccaccggcttcttctgcctggtgctggcggccatttttggttacgtctggccgccggtacagcacgctatccatgcaggaggcgagtggatcgtttctgcgggcgcgctgggttccggtatctttggtttcatcaaccgtctgctgatcccaaccggtctgcatcaggtgctgaacaccatcgcctggttccagattggtgaattcaccaacgcggcgggtacggttttccacggtgatatcaaccgcttctatgccggtgacggcaccgcggggatgttcatgtccggcttcttcccgattatgatgttcggtctgccgggtgcggcgctggcgatgtacttcgcagcaccgaaagagcgtcgtccgatggttggcgggatgctgctttctgttgctgttactgcgttcctgaccggtgtgactgagccgctggaattcctgttcatgttccttgcaccgctgctgtacctcctgcacgcactgctgaccggtatcagcctgtttgtggcaacactgctgggtatccatgctggcttctctttctctgcgggggctatcgactacgcgttgatgtataatctgccggccgccagccagaacgtctggatgctgctggtgatgggtgttgtcttcttcgctatctacttcgtggtgttcagtttggttatccgcatgttcaacctgaaaacgccgggtcgtgaagataaagaagacgagatcgttactgaagaagccaacagcaacactgaagaaggcctcaatcaactggcgaccaactatattgctgcggttggtggcactgacaacctgaaagcaattgacgcctgtatcacccgtctgcgcctgaccgtggctgactctgcccgcgtcaacgatacgatgtgtaaacgtctgggtgcttctggtgtagtgaaactgaacaaacagactattcaggtgattgttggcgcgaaagcagaatccatcggcgatgcgatgaagaaagtcgttgcccgtggtccggtagccgctgcgtcagctgaagcaactccgtcaactgccgcgcctgtagcaaaaccgcaggctgtaccaaacgcggtatctatcgcggagctggtatcgccgattaccggtgatgtcgtggcactggatcaggttcctgacgaagcattcgccagcaaagcggtgggtgacggtgtggcggtgaaaccgacagataaaatcgtcgtatcaccagccgcagggacaatcgtgaaaatcttcaacaccaaccacgcgttctgcctggaaaccgaaaaaggcgcggagatcgtcgtccatatgggtatcgacaccgtagcgctggaaggtaaaggctttaaacgtctggtggaagagggtgcgcaggtaagcgcagggcaaccgattctggaaatggatctggattacctgaacgctaacgcccgctcgatgattagcccggtggtttgcagcaatatcgacgatttcagtggcttgatcattaaagctcagggccatgttgtggcgggtcaaacaccgctgtatgaaatcaaaaagtaa

SEQ ID NO: 458298 - DNA, 801 bp, Shigella boydii
atgagactgatccccctgactaccgctgaacaggtcggcaaatgggctgctcgccatatcgtcaatcgtatcaatgcgttcaaaccgactgccgatcgtccgtttgttctgggcctgccaactggcggcacgccgatgaccacctataaagcgttagtcgaaatgcataaagcaggccaggtcagctttaagcacgttgtcaccttcaacatggacgaatatgtcggtctgccgaaagagcatccggaaagctactacagctttatgcaccgtaatttcttcgatcacgttgatattccagcagaaaacatcaaccttctcaacggcaacgccccggatatcgacgccgaatgccgccagtatgaagaaaaaatccgttcttacggaaaaattcatctgtttatgggcggtgtaggtaacgacggccatattgcatttaacgaaccggcgtcttctctggcttctcgtactcgtatcaaaaccctgactcatgacactcgcgtcgcgaactctcgtttctttgataacgatgtcaatcaggtgccaaaatatgccctgactgtcggtgttggtacattgctggatgccgaagaagtgatgattctggtgctgggtagccagaaagcactggcactgcaggctgcagttgaaggttgcgtgaaccacatgtggaccatcagctgtctgcaactgcatccaaaagcgatcatggtgtgcgatgaaccttccaccatggagctgaaagttaagactttaagatatttcaatgaattagaagcagaaaatatcaaaggtctgtaa

SEQ ID NO: 458299 - DNA, 1149 bp, Shigella boydii
atgtatgcattaacccagggccggatctttaccggccacgaatttcttgatgaccacgcggttgttatcgctgatggcctgattaaaagcgtctgtccggtagcggaactgccgccagagatcgaacaacgttcactgaacggggccattctctcccccggttttatcgatgtgcagttaaacggctgcggcggcgtacagtttaacgacaccgctgaagcggtcagcgtggaaacgctggaaatcatgcagaaagccaatgagaaatcaggctgtactaactatctgccgacgcttatcaccaccagcgatgagctgatgaaacagggcgtgcgcgttatgcgcgagtacctggcaagacatccgaatcaggcgttaggtctgcatctggaaggtccgtggctgaatctggtaaaaaaaggcacccataatccgaattttgtgcgtaagcctgatgccgcgctggtcgatttcctgtgtgaaaacgccgacgtcattaccaaagtgaccctggcaccggaaatggttcctgcggaagtcatcagcaaactggcaaatgccgggattgtggtttctgccggtcactccaacgcgacgttgaaagaagcgaaagccggtttccgcgcggggattacctttgccacccatctgtacaacgcgatgccgtatattaccggtcgtgaaccgggcctggcgggcgcgatcctcgacgaagctgacatttattgcggtattatcgctgatggcctgcatgttgattacgccaacattcgtaacgctaaacgccttaaaggcgacaaactgtgtctggttaccgacgccaccgcgccagcaggtgccaacattgaacagttcatttttgcgggtaaaacaatatactaccgtaacggactttgtgtggatgagaacggtacgttaagcggttcatccttaaccatgattgaaggcgtgcgtaatctggtcgaacattgcggtatcgcactggatgaagtgctgcgtatggcgacgctctatccggcgcgtgcgattggcgttgagaaacgtctcggcacactcgccgcaggtaaagtagccaacctgaccgcattcacacctgattttaaaatcaccaagaccatcgttaacggtaacgaggtcgtaactcaataa

SEQ ID NO: 458300 - DNA, 1221 bp, Shigella boydii
atgacaccaggcggacaagctcagataggtaatgttgatctcgtaaaacagcttaacagcgcggcggtttatcgcctgattgaccagtacgggccaatctcgcggattcagattgccgagcaaagccagcttgcccccgccagcgtaaccaaaattacgcgtcagcttatcgaacgcgggctgatcaaagaagttgatcagcaggcctccaccgggggccgccgcgctatctccatcgtcaccgaaacccgcaatttccacgcaatcggcgtacggcttggtcgtcacgacgccaccatcaccctgtttgatctcagcagcaaagtgctggcagaagaacattacccgctgccggaacgtacccagcaaacgctggaacatgccctgttgaatgccattgctcagtttattgatagctaccagcgcaaactgcgcgagctgatcgcgatttcggtgatcctgccagggcttgttgacccggacagcggcaaaattcattacatgccgcatattcaggtagaaaactgggggctggtagaagctctggaagaacgttttaaagtgacctgtttcgttggtcacgatatccgtagtctggcgctggcggagcactacttcggtgcaagtcaggattgcgaagactccattctggtgcgtgtccatcgcggaaccggggccgggattatctctaacgggcgcatttttattggccgcaacggtaacgtcggtgaaattggccatattcaggtcgaaccgctgggtgaacgctgccactgcggcaactttggctgcctggaaactatcgccgccaacgctgccattgaacaacgggtgttgaatctgttaaagcagggctaccagagccgcgtgccgctggacgactgcaccatcaaaactatctgcaaagccgcgaacaaaggcgatagtctggcgtcggaagtaattgagtatgtcggtcgtcatctgggtaaaaccatcgccattgctatcaacttatttaatccgcaaaaaattgttattgccggtgaaatcaccgaagccgataaagtgctgctccctgctattgaaagctgcattaatacccaggcgctgaaggcgtttcgcactaatctgccggtggtacgttctgagctggatcaccgctcggcaatcggcgcttttgcgctggtaaaacgcgccatgctcaacggtattttgctccagcatttgctggaaaattaa

SEQ ID NO: 458301 - DNA, 753 bp, Shigella boydii
atgaccattaaaaatgtaatttgcgatatcgacggcgtgctgatgcacgataacgtcgccgtaccgggtgcagcggaatttttgcacgggattatggataaaggcctgccgctggtgttgctgaccaactatccttcgcagactgggcaagatctggcgaaccgctttgccaccgcaggtgtcgatgtacctgacagcgtgttttatacctctgcgatggcgactgccgatttcctgcgtcgccaggaaggcaagaaagcgtatgtggtgggcgaaggcgcactgattcatgaactgtacaaagccggtttcactattaccgatgtgaaccctgatttcgtgattgttggcgaaacgcgttcctacaactgggacatgatgcataaagcagcctatttcgtcgctaacggtgcacgttttatcgccaccaatccggacacccacgggcgcggtttttatcccgcgtgtggcgcgttgtgtgcaggcatcgaaaaaatctccgggcgtaaaccgttctatgttggtaaaccgagtccgtggatcatccgcgcggcattaaacaaaatgcaggcgcattcggaagaaacggtgattgtcggcgataacctgcgtaccgatattctggcgggcttccaggcaggtctggaaacgattctggtgctttctggtgtttcatcgctcgacgatatcgacagtatgccgttccgcccaagctggatttacccgtcggtcgctgaaatcgacgttatctga

SEQ ID NO: 458302 - DNA, 1665 bp, Shigella boydii
atgtgttcaatttttggcgtattcgatatcaaaacagacgcagttgagctgcgtaagaaagcactcgagctgtcacgcctgatgcgtcatcgtggcccggactggtccggtatttatgccagcgataacgccattctcgctcacgaacgtctgtcaattgttgacgttaacgcgggggcgcaacctctctacaaccaacaaaaaacccacgtactggcggtaaacggtgaaatctacaaccaccaggcattgcgcgctgaatatggcgatcgttatcagttccagacagggtctgactgtgaagtgatcctcgcgctgtatcaggaaaaagggccggaatttctcgacgacttgcagggcatgtttgcctttgccctgtacgacagcgaaaaagatgcctacctgattggtcgcgaccatctggggatcatcccactgtatatgggctatgacgaacacggtcagctgtatgtgacctcagaaatgaaatcgctggtgccagtttgccgcacgattaaagagttcccggcggggagctatttgtggagccaggacggcgaaatccgttcttattatcatcgcgactggttcgactttgatgcagtgaaagataacgtgaccgacaaaaacgagctgcgtcaggctctggaagattccgttaaaagccatctgatgtctgatgtgccttacggtgtgctgctttctggtggtctggattcctcaattatttccgctatcaccaagaaatacgcagcccgtcgcgtggaagatcaggaacgctctgaagcctggtggccgcagttacactcctttgctgtaggtctgccgggttcaccggatcttaaagcagcccaggaagtggcaaaccatctgggcacggtgcatcacgaaattcacttcactgtacaggaaggtctggatgccatccgcgacgtgatttaccacatcgaaacttatgatgtgaccactattcgcgcttcaacaccgatgtatttaatgtcgcgtaagatcaaggcgatgggcattaaaatggtgctgtccggtgaaggttctgatgaagtgtttggcggttatctttacttccataaagcgcccaacgctaaagaactgcatgaagagacggtgcgtaaactgctggccctgcatatgtatgactgcgcgcgcgccaacaaagcgatgtcagcctggggcgtggaagcacgcgttccgttcctcgacaaaaaattccttgatgtggcgatgcgcattaacccgcaggataaaatgtgcggtaacggcaaaatggaaaaacacatcctgcgtgaatgttttgagtcatacctgcccgcaagcgtggcctggcggcagaaagagcagttctccgatggcgtcggttacagttggatcgacaccctgaaagaagtggcggcgcagcaggtttctaatcagcaactggaaactgcccgcttccgcttcccgtacaacacgccaacctcaaaagaagcgtatctgtaccgggagatctttgaagaactgttcccgcttccgagcgccgctgagtgcgtgcctggcggtccttccgtcgcgtgttcttccgctaaagcgatcgaatgggatgaagcgttcaagaaaatggacgatccatctggtcgtgcggttggtgttcaccagtcggcatataagtaa

SEQ ID NO: 458303 - DNA, 1176 bp, Shigella boydii
atgacaaatcaaccaacggaaattgccattgtcggcggaggaatggtcggcggcgcgctggcgctggggctggcacagcacggattttcggtaacggtgatcgagcacgcagaacctgcaccgtttgtcgctgatagccaaccggacgtgcggatctcggcgatcagcgccgcatcggtatcattgcttaaagggttaggggtctgggatgcagtacaggctatgcgttgccatccttaccgcagactggaaacgtgggagtgggaaacggcgcatgtggtgtttgacgccgctgaacttaagctaccgttgcttggctatatggtggaaaacaccgtcctgcaacaggcgctgtggcaggcgctggaagcgcatccgaaagtaacgttacgtgtgccaggctcgctgattgcattacatcgagataatgatcttcaggagctggaactgaagggcggtgaaacgatccgcgcgaaactggtgattggtgccgacggcgcaaattctcaggtgcggcagatggcgggaattggcgttcatgcctggcagtatgcgcagtcgtgcatgttgattagcgtacagtgtgagaacgatcccggcgacagcacctggcagcaatttaccccggacggaccgcgtgcgtttctgccgttgtttgataactgggcatcgctggtgtggtatgactctccggcgcgtattcgccagttgcagaatatgaatatggcgcaactccaggcggaaatcgcgaagcatttcccgtcgcgtctgggttacgttacaccgcttgccgctggtgcgtttccgctgacgcgccgacatgcgttgcagtatgtgcagccggggcttgcgctggtgggcgatgccgcgcataccatccatccgctggcggggcagggggtgaatcttggttatcgtgatgtcgatgccctgattgatgttctggtgaatgcccgcagttacggtgaagcgtgggccagttatcctgtcctcaagcgttaccagatgcggcgcatggcggataacttcattatgcaaagtggtatggatctgttttatgccggattcagtaataatctgccgccgctgcgttttgtgcgtaatctcgggttaatggcggcagagcgtgctggcgtgttgaaacgtcaggcgctgaaatatgcgttagggttgtag

SEQ ID NO: 458304 - DNA, 1425 bp, Shigella boydii
atgaccaaaaaactccatattaaaacctggggctgtcagatgaacgagtacgattcatcgaagatggccgatctgctggatgccacccacggctatcaactgaccgacgtggcggaagaagcggatgtgctgctgctgaacacctgctcaatccgcgagaaggctcaggaaaaagtcttccatcagttgggtcgctggaaactgttaaaagagaagaatccagacctgattatcggcgtcggtggctgcgtggcatcgcaagaaggcgagcacattcgccagcgcgcccactatgtcgatattatttttgggccgcaaacgctgcaccgtctgccggagatgatcaactccgtgcgcggcgaccgcagcccggttgtagatatcagcttcccggaaatcgagaagtttgaccgtctaccggaaccgcgcgccgaagggccgaccgcgtttgtctccatcatggaaggctgcaataaatattgcacctactgcgtggtgccttacacccgtggtgaagaggtaagccgtccgtctgacgatattctgtttgagattgcccagcttgcggctcagggcgtgcgtgaagtcaacctgctcggtcagaacgtgaacgcctggcgtggtgaaaactacgacggctccaccggatcgtttgccgatctgctgcgtctggttgctgcgatcgacgggatcgatcgtattcgctttaccaccagccatccgatcgaattcaccgacgatatcatcgaagtgtatcgcgacacgccggagctggtgagcttcctgcatctgccggtacagagcggttccgatcgcattctgaacctgatgggccgtactcatacggcactggagtacaaagcgatcatccgtaaactgcgtgcggcgcgtccagatattcagatcagttctgatttcatcgttggcttccctggcgaaaccaccgaagacttcgagaaaacgatgaagctgattgccgacgtcaatttcgacatgagctacagctttatcttctctgcacgtccgggtacaccagccgccgatatggttgatgatgttccggaagaagagaagaagcagcgtctgtatattctgcaagaacgtatcaatcagcaagcgatggcatggagccgccggatgctcggcaccacccagcgtattctggtagaagggacttcgcgtaagagcatcatggagctttccgggcgtaccgaaaataaccgcgtggtcaacttcgagggcacaccggatatgatcggtaaattcgtcgatgtagaaattaccgacgtctacccgaactctctgcgcggtaaagtggtgcgtactgaagatgaaatgggcctgcgcgtggcagaaacaccggaatcggtgattgcccgtacccgcaaagaaaacgaccttggcgtgggttattatcagccgtaa

SEQ ID NO: 458305 - DNA, 1080 bp, Shigella boydii
atgttcagcttccggcggcatacagataagaggaacggtttgaacatagacactcgcgaaatcaccctggagccagcagacaacgcgcgtctgttgagcctgtgcggcccgtttgatgacaacatcaagcagctcgaacgccgtctcggcatcgagatcaatcgccgcgacaaccactttaaactgaccggccgtccgatttgcgtcaccgctgcggcagacattctgcgtagcctgtatgtcgatacagccccgatgcgcggtcagattcaggatatcgaaccggaacagatccaccttacgattaaagaagcgcgagtactggagcaaagtgcggagagcgtgccggagtacggcaaagcggtcaatatcaaaaccaaacgcggcgtaattaagccgcgcacgccaaaccaggcgcagtacatcgccaatattctcgaccatgacattaccttcggcgttggcccggcgggtacgggtaaaacctacctggcagtggctgcggcagttgatgccctggagcgtcaggagattcgccgtattctgctgactcgtccggcggtcgaagccggtgagaaactgggcttcctgcctggcgatttaagccagaaagtagacccgtatctgcgcccactgtacgacgcgctgtttgaaatgctgggctttgagaaagttgagaaactgattgagcgcaacgttattgaagtcgcgccgctggcctatatgcgtggtcgtacgctgaacgacgcgtttatcattctcgatgagagccagaacaccaccatcgaacagatgaagatgttcctgacccgtatcggttttaactcaaaagcggttatcaccggcgacgtcacacagatcgacctgccgcgtaatactaaatcaggcttacgtcacgccatcgaagtactggccgatgtcgaagagatcagctttaacttcttccacagcgaagacgtggttcgtcaccctgtggtggcgcgtatcgttaacgcctatgaagcctgggaagaagccgaacaaaaacgaaaagcggcgctggcggcagaacgcaagcgcgaagaacaggaacaaaaatga

SEQ ID NO: 458306 - DNA, 468 bp, Shigella boydii
atgagtcaggtgatcctcgatttacaactggcatgtgaagataattccgggttaccggaagagagccagtttcaaacatggctgaatgcggtgatcccgcagtttcaggaagaatcggaagtgactattcgcgtggtcgataccgccgaaagccacagtctgaatctgacctatcgcggtaaggataagccgaccaacgtgctctccttcccgtttgaagtgccgcctggcatggaaatgtcgctactgggcgatctggttatctgccgtcaggtggttgagaaggaagctcaggagcaaggcaaaccactggaggcgcactgggcgcatatggtggtgcacggcagtctgcatttgttaggttacgatcacatcgaagatgacgaagcagaagaaatggaagccctcgaaacaaagattatgcttgctctgggctatgaggatccgtacattgccgagaaagaataa

SEQ ID NO: 458307 - DNA, 879 bp, Shigella boydii
atgagcgacgacaattcacacagtagtgacacgataagcaacaagaagggatttttctccctgttactcagccaacttttccacggtgaaccgaaaaaccgtgacgaactgctggcgctgatccgtgattccgggcagaacgaccttatcgacgaagatacgcgcgatatgctcgaaggggtgatggacatcgcagaccaacgcgttcgcgacatcatgatcccccgctcccagatgattaccctgaaacgcaaccagacgctggacgaatgccttgatgtcatcatcgagtccgcccactcacgtttcccggtgattagcgaagacaaagatcacattgaagggattctgatggcgaaagacttgctgccgtttatgcgcagcgatgctgaagccttcagcatggacaaagtgttacgtcaggcggttgtcgttcctgaaagtaagcgcgtagaccggatgctgaaagagtttcgctctcagcgttaccacatggcgatcgtcattgacgaattcggtggggtttccggtctggtgaccattgaagacatcctggaactgattgttggtgagattgaagacgaatatgacgaagaagatgatatcgacttccgtcagctgagtcgtcatacctggaccgtgcgcgcactggcttccattgaagacttcaacgaagcgttcggcacccactttagcgatgaagaagtcgacactatcggtggtctggtgatgcaggcgtttgggcatcttccggcgcgtggcgaaactatcgacatcgacggttaccagttcaaagtggcgatggccgacagtcgacgtattattcaggttcatgtcaaaatcccggatgactcaccccagccgaagctggatgaataa

SEQ ID NO: 458308 - DNA, 1539 bp, Shigella boydii
atggcttttgcctcattaattgaacgccagcgcattcgcctgctgctggcgttattattcggtgcctgcggaacgctggccttctctccttacgacgtctggcctgcggcgattatttcgttgatggggcttcaggcgttgacctttaaccgccgtccactccagtctgccgctattggcttttgctggggatttggcctctttggcagcggtattaactgggtctatgtcagcatcgcgacctttggcggaatgcctggcccggttaacatcttcctggtggtggtgctggcggcgtatttgtcgctgtataccggactgtttgctggcgtgctgtcgcgtctgtggccgaaaaccacctggctgcgcgtggcgattgccgcccctgctctctggcaagtgaccgagtttctgcgcggttgggtactgacaggcttcccgtggttacagttcggctatagccagattgatggcccgttaaaagggctggcaccgataatgggcgtggaagccattaacttcctgctgatgatggttagtggcctgctggcactggcgttggtcaaacgcaactggcgtccgctggtggtggccgtcgtgctgtttgccctacccttcccgctgcgttacatccaatggtttaccccgcaaccggagaaaaccattcaggtttcgatggttcagggcgatattccgcaatcactgaaatgggatggagatcagcttcttaatacgctgaagatttactacaacgcaacggctccgctgatgggcaaatcatcgttgattatctggccggagtcggcgataaccgatctggaaattaatcagcaaccgttcctcaaagcactggacggtgagttgcgcgataaaggtagctcgctggtaaccgggattgtcgacgcgcgtctcaataagcagaaccgctacgatacctacaacaccatcatcacactgggtaaaggtgcaccgtacagctacgaatcagccgatcgctataacaaaaaccatctggtgccgtttggcgagtttgtcccgctggagtcgattctgcgtccgttagcaccgttctttgatctgccgatgtcgtcgttcagccgtgggccatatatccagccgccgctgtcagtaaatggtattgagcttactgcggctatttgctacgagatcattctcggcgagcaagtgcgcgataacttccgcccggataccgactatctgctgactatctccaacgatgcgtggtttggtaaatctattggtccatggcaacacttccagatggcgcgaatgcgtgcgctggagctggcgcgcccactgttgcgcagcaccaacaacggcattacggcggtgattggcccgcagggtgagattcaggcgatgatcccgcagttcacccgcgaggtgttaaccactaatgtgacaccgaccaccggactcacaccgtatgcacgtaccggcaactggccactgtgggtgctgacggcactgtttggttttgccgctgtgttgatgagtctacgagcacgtaaacgttga

SEQ ID NO: 458309 - DNA, 1878 bp, Shigella boydii
atgtctgcatcttcggttaagccgttaaatgttcaattacccgcaataacccttatcctttttgcactctgtattgggatattttgttatctcgcacaatggatgagttatgaagaggtcgatcaatccgcacttatccatctcggcgcaaacgttgcgcctcttactttgtcgggtgaaccctggcgcttattgagcagtatctttctgcacagtagtgtttctcatctgctgatgaatatgtttgcattcctggtcgtgggaggcgtggcggaacagattctggggaaatggcgactcctgattacctggttattctccggcgtctttggtgggcttatcagcgcctgttatgcgttacgcgatagtgatcagatagtcatcagcgttggggcattcggggcaattatgggaatagctggcgctgcgatagcaacacagcttgcttcaggtgcgggcacataccataaaaaccagcggcgagtattttctctgttgggtatggtggcgctgacactgttgtatggtgcccggcaaacaggaatagataatgcttgtcacattggcggcctgattgcgggtggcgcgttgggttggctgagcgcgcgtttatctgggcaaaaccgactcgttacggaaggcgggattattgttgcgggcagtcttcttctgaccggggctatctggcttgcgcagcagcagatggatgagtcagttttacaagtcaggcaaagtctgcgtgaagcgttttatccacaggagattgaacaagagcgacggcaaaaaaagcagcagttagcggaggaacgcaacgccctcaaggaaacattatccgctccggtaagtcgtgaacaggccagtggtgatttgctcgctgagattgccgatatccatgatatggcgatcagtcgggatggtaatatgttgtatgccgcaattgaaaacacgaacagcattgttgttttcgacctcggacaaaagaaaatcctgcatacctttacagcgcccatagcgaaagaaaagtcagtcaaacattgtggtggctgtaaagatcagggcgtcagatcgctggcattaagcccggatgaaaagttgatttatgcgacttcatttgaagcgaatgcgttatcggtcattaacgtggcgacaggggagattattcagtcgattaccaccggtgcacatcctgacagccttatcctctcgcgtgatggcacaaaagcctgggtgatgaatcgcaccagtaatagtgtgtcagcgattgatctggtgacttatcagcatgtggcggatatcccgctggagaaatacgacggggcggggacgagcggtaaaccaggcgcctgggttatggcactttccccggatgaaagaacattactggttccgggagcaggcagaggtaacatcgtgcggatcaataccatcacgcatcagaaagaagactttcccgcaggtgatgcgcgtggaacgatatcggcgatgcgttttcgacctgaaaacggcgaggttatttttgcagatagtcaggggatttcacgtataagcgtaggggctcaacaagccagcattatgacgcaatggtgtagcaggagcgtttattccgttgagggtattagcccggacggtcaatatttagcgttggtgtcatatggcctgcaaggttatgtcatcctgctcaatattaatgccgggcagattattggcgtttatcctgccagctacgttaatcaccttcgtttttcagcggatggtagaaaaatatttgtcatggcgaagaacgggttgatccaaatggacaggacgcgctcgcttgatccgcaggcaattattcgtcatccccaatatggcaatgtggcttgtatccctgaaccgtaa

SEQ ID NO: 458310 - DNA, 138 bp, Shigella boydii
atgcaattacgtaaacctgccacagcaatcctcgccctggcgctttccgcaggactggcacaggcagatgacgccgccccggcagcaggcagtacgcagtacgcagtacgctggacaaaatcgccaaaaacggtgtga

SEQ ID NO: 458311 - DNA, 789 bp, Shigella boydii
gtgattgtcgtcggtcaccgtgaatcttcagtacctttctcttattacgacaatcagcaaaaagtggtgggttactcgcaggattactccaacgccattgttgaagcagtgaaaaagaaactcaacaaaccggacttgcaggtaaaactgattccgattacctcacaaaaccgtattccactgctgcaaaacggcactttcgattttgaatatggttctaccaccaacaacgtcgaacgccaaaaacaggcggctttctctgatactattttcgtggtcggtacgcgcctgctgaccaaaaagggcggcgatatcaaagattttgccgacctgaaagacaaagccgtagtcgtcacttccggcactacctctgaagttttgctcaacaaactgaatgaagagcaaaaaatgaatatgcgcatcatcagcgccaaagatcacggtgactctttccgcaccctggaaagcggtcgtgccgttgcctttatgatggatgatgccctgctggccggtgaacgtgcgaaagcgaagaaaccagacaactgggatatcgtcggcaagccgcagtctcaggaagcctacggttgcatgttgcgtaaagatgatccgcagttcaaaaagctgatggatgacactatcgctcaggtgcagacttccggtgaagcggaaaaatggtttgataaatggttcaaaaatccaattccgccgaaaaacctgaacatgaatttcgaactgtcagacgaaatgaaagcactgttcaaagaaccgaatgacaaagcactgaactaa

SEQ ID NO: 458312 - DNA, 741 bp, Shigella boydii
atgtctatagactggaactggggtatttttttacaacaagccccgttcggcaacaccacctatcttggttggatctggagtggttttcaggtgacgatcgctttgtcgatctgcgcctggattatcgctttcctcgtcggttcatttttcggcattttacgtaccgttccaaaccgttttctctccggtctgggtacgttgtatgtcgaactgttccgcaacgtgccgttgattgtgcaattctttacctggtatctggtgatcccggagctgttgccggagaaaatcggcatgtggtttaaggccgagctggatcccaatattcagtttttcctttcatccatgctctgcctggggctgtttaccgccgcccgtgtttgcgaacaggtacgcgccgccattcagtcgttgccgcgtgggcaaaaaaatgccgcgctggcgatgggcctgacgctaccgcaggcttatcgatacgtactgctgcctaatgcttatcgcgttatcgtcccgccgatgacttccgagatgatgaacctggtgaaaaactccgccatcgcctcgactattggtctggtggatatggcggcgcaggcgggtaaattgcttgattactcagcccacgcctgggagtcgtttaccgctattacgctggcgtatgtgttgattaacgcgattatcatgctggtaatgacgctggttgaacgtaaagttcgcctgcctggcaacatggggggcaaataa

SEQ ID NO: 458313 - DNA, 675 bp, Shigella boydii
atgtacgagtttgactggagttccattgtcccttccctgccatatctgctcgacgggctggtgatcacgctgaaaatcaccgtcacggcagtcgtgattggtattttgtggggcaccatgctggcggtgatgcgcttgtccagctttgcgcccgtagcgtggtttgccaaagcctacgttaacgtattccgctcgattcctttagttatggttttgctgtggttttacctgatcgtgccaggttttctgcaaaacgtgctgggattatcaccaaaaaatgatatccgtttaatttcggcgatggtggcgttttcgatgtttgaagcggcctactattcagagattatccgtgctggtattcaaagtatttctcgtggtcagtcgagcgccgcgctggcgttgggaatgactcactggcagtcgatgaaactgattattctgccgcaggcgttccgcgcgatggtgccgcttctgctcactcagggcatcgtactgttccaggatacctcactggtgtatgtgttatctctggccgatttcttccgtaccgcctcaaccattggtgagcgtgatggtacgcaggttgagatgatcctgtttgccggatttgtttatttcgttattagtcttagcgcgtcgttgttggtcagctacttgaaaagaaggacagcataa

SEQ ID NO: 458314 - DNA, 726 bp, Shigella boydii
atgattaccctgaaaaatgtttcaaaatggtatggtcactttcaggtgctgaccgactgctcaaccgaagtgaaaaaaggcgaagtggtggtggtttgcggcccgtctggttccggcaaatcaacgctgattaaaaccgtcaacggcctcgaaccagtgcagcaaggtgaaatcaccgtcgatggtatcgtggttaatgacaagaaaaccgatctggcaaagctgcgttcccgcgtcgggatggtgttccagcattttgagttgttcccccatttgtcgattattgaaaacctgactctggcgcaggtgaaagtgcttaaacgcgataaagcgcccgctcgtgaaaaagcattgaaattgctggagcgcgtgggactttccgcacatgccaataaatttccggcgcagatttccggcggtcagcagcagcgtgtggcaatcgctcgcgcgttgtgtatggatcctattgcgatgctgttcgacgaaccgacatcggcgctggatccggagatgatcaacgaagtgctggacgtgatggtggaactggcgaacgaaggaatgaccatgatggtggggacccacaaaatgggctttgcccgcaaagtggcgaatcgggtgatctttatggacgagggtaaaattgtcgaagactcgccgaaagacgctttcttcgatgatccgaaatcggaccgcgcgaaagacttcctcgcgaaaatcctgcattaa

SEQ ID NO: 458315 - DNA, 903 bp, Shigella boydii
atggcactgccaattctgttagattgcgacccaggtcatgacgacgctatcgcaatagttctcgccctcgcctcaccagagcttgatgtcaaagcaattacgtcttccgccggaaaccagacaccagaaaaaaccttacgcaatgttctgcgtatgctgaccttgcttaatcgcaccgatattccggtagcaggcggcgcggtaaaaccgttaatgcgtgagttgattatcgcggacaatgtgcacggcgaaagcggtctggatggcccggcattaccggaaccgacgttcgcaccgcaaaactgtacggcggtagagctgatggcgaaaacgctgcgcgaaagtgcggaacctgtcacgattgtgtctaccggaccgcaaactaacgttgccttgctgctcaatagccatccggaactgcatagcaaaattgcccgtatcgtgattatgggcggcgcaatggggcttggtaactggacgcctgcggctgaatttaatatttacgttgacccggaagcggcagaaattgtcttccagtcagggatcccagtggtgatggccggtctggatgttactcataaagcgcaaatccacattgaagacaccgagcgtttccgcgcgattggcaaccctgtttcaaccattgttgccgaactgctggatttcttcctcgaatatcataaagacgaaaaatggggctttgtcggtgcaccgctgcatgacccatgcaccatcgcctggctgttgaaacccgagttgtttaccactgttgagcgctgggttggcgtggaaacacaggggaaatatacccagggtatgacggttgttgattattattatctgactggcaataaaccgaatgccactgtaatggtcgatgttgatcgtcagggctttgggtaa

SEQ ID NO: 458316 - DNA, 2322 bp, Shigella boydii
atgatgaatgattcgttctgccgcattattgcgggtgaaattcaggcgcgcccggaacaggttgacgctgccgttcgcctgcttgacgaagggaataccgtgccgtttatcgcacgttatcgtaaggaaatcaccggcggtctggatgacacgcagctgcgtaatctggaaacgcgtctgagctatctgcgcgagctggaagagagacgtcaggcgatcctcaagtccatttccgagcaaggcaaactcaccgatgatctggcgaaggccatcaacgccaccctaagcaaaaccgaactcgaagacctctacctgccctacaaacctaaacgccgcacccgcgggcaaatcgccattgaagcagggcttgagccgttggctgacctgctgtggagcgatccgtcacacacgccagaagtcgccgctgcacaatatgttgatgccgataaaggcgtggcagataccaaagccgcgctggatggcgcgcgctatatcctgatggaacggtttgccgaagatgccgcgctgctggcgaaagtgcgtgattatctgtggaagaacgcgcatttggtttctacggtggtgagcggtaaagaagaggaaggggcgaaattccgcgactatttcgatcatcacgaaccgttgtccacggtgccttctcaccgcgcgctggcgatgttccgtgggcgtaacgaaggcgtactccagctttcgctgaatgccgatccgcagttcgatgagccgcccaaagagagctattgcgagcaaatcatcatggatcaccttggcctgcgcctgaacaatgccccggcggatagctggcgcaaaggcgtagtgagctggacctggcgcatcaaggtgctgatgcatctggaaaccgaactgatgggtaccgtgcgcgaacgcgcggaagatgaagcaatcaacgtctttgcccgtaacctgcacgatctgctgatggcggcccctgccggactgcgtgcaacgatgggcctcgatccgggtctgcgtactggggtaaaagtggcggtggtcgatgccactggcaaactggtagcgaccgataccatttacccgcacaccggacaagccgcaaaagcagcgatgaccgttgctgccttgtgtgaaaaacataacgttgaactggtggcgatcggcaacggtacagcttcccgcgaaactgaacgtttctatctcgacgtgcagaagcagttcccgaaagtgaccgcacagaaagtgatcgtcagcgaagctggcgcgtcggtttactcagcttccgagctggcagcgcaggagttcccggatctcgacgtttcgctgcgtggcgcggtgtctatcgcccgccgtttgcaggatccgctggcggagctggtgaaaatcgatccgaaatctatcggcgtaggtcagtatcagcatgacgtcagccagacgcaactggcccgcaaactggacgcagtagtagaagactgcgtaaacgccgttggcgtcgatctcaacactgcttctgttccgctgttaacccgcgtggcgggcctgacgcgcatgatggcgcaaaacatcgtggcctggcgcgatgagaacggccagttccagaaccgtcagcaactgctgaaagtcagccgtctggggccgaaagccttcgagcagtgcgcgggcttcttgcgcattaaccacggtgataacccgctggatgcttctaccgtccacccggaagcctatccggtggtggaacgcattctggcagcaacacagcaggcactgaaagatctgatgggtaacagcagcgaactgcgtaacctgaaagcgtctgactttactgatgaaaaattcggtgtgccgacagtaactgacatcatcaaagagctggaaaaaccgggtcgcgatccgcgtccggaatttaaaaccgctcagtttgccgatggcgtcgagacaatgaacgacctgcaaccgggtatgatcctcgaaggtgcggtgaccaacgtcaccaactttggcgcgtttgtcgatatcggcgtgcatcaggacggcctggttcacatctcttcattgtcgaacaagtttgtggaagatccgcataccgtggtgaaagcgggcgacattgtgaaggtgaaagtgctggaagtggatcttcagcgtaaacgtatcgccctgactatgcgtctggacgagcagcctggcgaaaccaacgcccgtcgcggcggcggtaatgaacgcccgcaaaacaaccgcccggcagccaaaccacgcggtcgtgaagcgcagcctgccggtaatagcgcgatgatggatgcgctggcggcggcaatgggcaaaaaacgttaa

SEQ ID NO: 458317 - DNA, 477 bp, Shigella boydii
atgaaaacgcccctggttacccgggaagggtatgaaaaactcaaacaagagcttaattatctctggcgtgaagaacgcccggaggtcacaaaaaaggtgacctgggccgcaagtctgggcgaccgcagcgaaaatgctgactatcagtataataaaaagcgtctgcgtgaaatcgaccgtcgcgtgcgctatctcactaaatgcatggaaaatctcaaaatcgtcgattactcccctcagcaggaaggcaaagtcttttttggcgcgtgggtggagattgaaaacgacgatggcgtgactcaccgtttccgtattgtcggctacgatgaaatttttggccgtaaagattacatctctatcgattccccgatggcccgcgcattgctgaaaaaagaagtcggcgatctggcggtggtgaatacccctgccggggaagcgagctggtatgttaatgctatcgagtacgtgaaaccgtaa

SEQ ID NO: 458318 - DNA, 720 bp, Shigella boydii
atgcaagagaactacaagattctggtggtcgatgacgacatgcgcctgcgtgcgctgctggaacgttatctcaccgaacaaggcttccaggttcgaagcgtcgctaatgcagaacagatggatcgcctgctgactcgtgaatctttccatcttatggtactggatttaatgttacctggtgaagatggcttgtcgatttgccgacgtcttcgtagtcagagcaacccgatgccgatcattatggtgacggcaaaaggggaagaagtggaccgtatcgtaggcctggagattggcgctgacgactacattccaaaaccgtttaacccgcgtgaactgctggcccgtattcgtgcggtgctgcgtcgtcaggcgaacgaactgccaggcgcaccgtcacaggaagaggcggtaattgctttcggtaagttcaaacttaacctcggtacgcgcgaaatgttccgcgaagatgagccgatgccgctcaccagcggtgagtttgcggtactgaaggcactggtcagccatccgcgtgagccgctctcccgcgataagctgatgaaccttgcccgtggtcgtgaatattccgcaatggaacgctccatcgacgtgcagatttcgcgtctgcgccgcatggtagaagaagatccagcgcatccgcgttacattcagaccgtttggggcctgggctacgtctttgtaccggacggctctaaagcatga

SEQ ID NO: 458319 - DNA, 1353 bp, Shigella boydii
atgaggcgattgcgcttctcgccacgaagttcatttgcccgtacgttattgctcatcgtcaccttgctgttcgccagcctggtgacgacttatctggtggtgctgaacttcgcgattttgccgagcctccagcagtttaataaagtcctcgcgtacgaagtgcgtatgttgatgaccgacaaactgcaactggaggacggcacgcagttggttgtgcctcccgctttccgtcgggagatctaccgtgagctggggatctctctctactccaacgaggctgccgaagaggcaggtctgcgttgggcgcaacactatgaattcttaagccatcagatggcacagcaactgggcggcccgacggaagtgcgcgttgaggtcaacaaaagttcgcctgtcgtctggctgaaaacctggctgtcgcccaatatctgggtacgcgtgccgctgaccgaaattcatcagggcgatttctctccgctgttccgctatacgctggcgattatgctattggcgataggcggggcgtggctgtttattcgtatccagaaccgaccgttggtcgatctcgaacatgctgctttgcaggtcggtaaagggattattccaccgccgctgcgtgaatatggcgcgtccgaggtacgttcggttacccgcgcctttaaccatatggcggctggtgttaagcaactggcggatgaccgcacgttgctgatggcgggggtaagtcatgacttacgcacgccgctgacgcgtattcgcctggcgaccgagatgatgagcgaacaggatggctacctggccgaatcgatcaataaagatatcgaagagtgcaacgccatcattgagcagtttatcgactacctgcgcaccgggcaggagatgccgatggaaatggcggatctcaacgcagtactcggtgaggttattgctgccgaaagtggctatgagcgggaaattgaaaccgcgctttaccccggcagcattgaagtgaaaatgcacccgctgtcgatcaaacgcgcggtggcgaatatggtggtcaacgccgcccgttacggcaatggctggatcaaactcagcagcgggacggagccgaatcgcgcctggttccaggtggaagatgacggtccgggaattgcgccggaacaacgtaagcacctgttccagccgtttgtccgcggcgacagtgcacgcaccattagcggcacgggattagggctggcaattgtgcagcgtatcgtggataaccataacgggatgctggagcttggcaccagcgagcggggcgggctttccattcgcgcctggctgccagtgccggtaacgcgggcgcagggcacgacaaaagaagggtaa

SEQ ID NO: 458320 - DNA, 1623 bp, Shigella boydii
atgcgcgttaacaatggtttgaccccgcaagaactcgaggcttatggtatcagtgacgtacatgatatcgtttacaacccaagctacgacctgctgtatcaggaagagctcgatccgagcctgacaggttatgagcgcggggtgttaactaatctgggtgccgttgccgtcgataccgggatcttcaccggtcgttcaccaaaagataagtatatcgtccgtgacgataccactcgcgatactttctggtgggcagacaaaggcaaaggtaagaacgacaacaaacctctctctccggaaacctggcagcatctgaaaggcctggtgaccaggcagctttccggcaaacgtctgttcgttgtcgacgctttctgtggtgcgaacccggatactcgtctttccgtccgtttcatcaccgaagtggcctggcaggcgcattttgtcaaaaacatgtttattcgcccgagcgatgaagagctggcaggtttcaaaccagactttatcgttatgaacggcgcgaagtgcactaacccgcagtggaaagaacagggtctgaactccgaaaacttcgtggcgtttaacctgaccgagcgcatgcagctgattggcggcacctggtacggcggcgaaatgaagaaagggatgttctcgatgatgaactacctgctgccgctgaaaggtatcgcttctatgcactgctccgccaacgttggcgagaaaggcgatgttgcggtgttcttcggcctttccggcaccggtaaaaccaccctttccaccgacccgaaacgccgcctgattggcgatgacgaacacggctgggacgatgacggcgtgtttaatttcgaaggcggctgctacgcaaaaactatcaaactgtcgaaagaagcggaacctgaaatctacaacgctatccgtcgtgatgcgctgctggaaaacgtcaccgtgcgtgaagatggcactatcgactttgatgatggttcaaaaaccgagaacacccgcgtttcttatccaatctatcacatcgataacatcgttaagccggtttccaaagcgggccacgcgactaaggttatcttcctgactgctgatgctttcggcgtgttgccgccggtttctcgcctgactgccgatcaaacccagtatcacttcctctctggcttcaccgccaaactggccggtactgagcgtggcatcaccgaaccgacgccaaccttctccgcttgcttcggcgcggcattcctgtcgctgcacccgactcagtacgcagaagtgctggtgaaacgtatgcaggcggcgggcgcgcaggcttatctggttaacactggctggaacggcacaggcaaacgtatctcgattaaagatacccgcgccattatcgacgccatcctcaacggttcgctggataatgcagaaaccttcactctgccgatgtttaacctggcgatcccaaccgaactgccgggcgtagacacgaagattctcgatccgcgtaacacctacgcttctccggaacagtggcaggaaaaagccgaaaccctggcgaaactgtttatcgacaacttcgataaatacaccgacacccctgcgggtgccgcgctggtagcggctggtccgaaactgtaa

SEQ ID NO: 458321 - DNA, 1725 bp, Shigella boydii
atggataacgttgaactttcaccggcaacacgctgggggatgattgctaccggattacttcaggggctggtttgctacctgttgatcgcctggcttgccggaaaaaatcacagttggattgtttatggcgtgcctgcgaccgttgcgttttcatccgttttactcttctccgtgatctcttttaaacagaagcgcctttggggatggctggcgctggtgtttattgccacgacagggatgagcggttggctgaagtggcaaactgatggcatgaacccctggagagctgaaaaggcgatttgggattttggctgctatctgctgttgatggcaatgttgttgctaccgtggatacaacaaagccttcgtatccgcaatggcagtagccgctatagctacttttaccagtcagtatggcataacgtacttatattactggtgatttttctcgccaatggcctgacgtggctggtgcttttactgtggggtgagttgtttaaacttgttggcatcaagtttttcaatacgctcttttttgcaaccgactggtttatgtatcttacattaggtctggttaccgcactggcggtgattctcgcgcgcgcacagtcacgtttaatcgactctattcaaaagttgttcacgttaatcgccacggggttgctgccgttagtatcattgctaaccctgatgtttatcatcactctgccgtttacgggcctgagcgcgatttctcgccacatctccgccgccgggttgctgttaacgctggcctttttgcaattgatcttaatggctattgtccgcgatccgcaaaaagcgtcacttccctggacggggccgttgcgttgcctgattaaaaccgctttgctggttgctccgctgtatgtgttcgttgccgcctgggcgttatggctgcgggtcgctcagtacggctggactgtcgaccgcttgcagggcgcgctggcggtgctggtgttactggtgtggtcgctggggtattttgtcagtatcgtctggcgtaatgggcaaaatccccttgttcttcagggcaaagtgaaccttgcggtttcgttattggtgttggtgatactggtgcttcttaattcgccggtgctggacagtatgcgtattagcgtgaacagtcatatggcgcgttatcagagcggcaaaaacacgccagaccaggtaactatctacatgctcgaacagagcggtcgctatggacgtgcggcgcttgagtcgctgaaaagcgatgccgggtttatgaaagacccgaaacgctcgcgggatctgctgatggcgttagatggagagcaacatcttcaggaacaggtatcggaaaaagtattagccgaaaatgtgttaattgcccctggttctgttaaaccggatgcgacattctggtcggccttaatccaggatcgctataacgtgatgacctgtattgaaaaagacgcctgcgtcctggtcgagcaagatctgaatagtgatggtcaggcggagcggatcctgtttgcttttaatgatgacagagtcattgtctatggctttgactcagacagaaaagaatgggacgcgcttgatatgagtttacttccgaacgaaataacgaaagaaaaattactcacagctgcgaaggatggaaaactggggacgaggccgaaagcgtggcgcgatctgacggtagatggtgaaacgctggaaataaacttaagtaagtga

SEQ ID NO: 458322 - DNA, 879 bp, Shigella boydii
atgccgcaacatgaccaattacatcgctatctgtttgaaaattttgccgttcgcggcgaactggtaaccgtttcggaaaccctgcaacagatccttgagaaccacgattatccgcagcccgttaaaaacgtgctggcagaactgctggttgcgaccagcctgttaaccgctacgctgaagtttgatggtgatatcaccgtacagctgcagggcgacggtccgatgaatctggcggttattaacggtaacaataaccagcaaatgcgcggtgtggcgcgcgtgcagggcgaaattccagaaaatgccgacctgaaaacgctggtcggcaatggttacgtggtgatcaccattaccccgagcgaaggcgaacgctatcagggcgtagttggtctggaaggtgataccctggcggcctgcctggaagattactttatgcgttctgaacagctgccgacgcgcctgtttattcgcaccggcgacgtagacggcaaaccggctacaggcggtatgttgttgcaggtaatgcctgcgcaaaatgcccagcaggacgactttgaccacctggcgacgctaaccgaaaccatcaaaaccgaagaactgctgaccttaccggcaaacgaagtgttgtggcgtttgtatcacgaagaagaggtgacggtttacgatccgcaggatgtggagttcaaatgcacctgctcgcgtgaacattgcgccgatgcgctgaaaacgctgcctgatgaagaagttgatagcatcctggcggaagatggcgaaattgacatgcattgtgattactgcggtaaccactatctgttcaatgcgatggatattgctgaaatccgcaacaacgcgtctccggcagatccgcaagttcattaa

SEQ ID NO: 458323 - DNA, 402 bp, Shigella boydii
atgaaagagaaacctgctgttgaggttcgactggataaatggctatgggctgcccgtttttataaaacccgcgcgctggcccgtgaaatgattgaaggcggtaaggtgcattacaacgggcagcgcagcaagccgagcaaaatcgtcgagctgaatgccacgctcactctgcgccagggaaatgacgaacgcacggtgattgtaaaggcgattactgaacagcgtcgccccgccagcgaggcagccttgctgtatgaagagactgcggaaagtgtagagaaacgcgaaaaaatggcgatggcacgtaaacttaatgccttaaccatgccgcacccggaccgacgcccggacaaaaaagagcgccgcgacctgttacgatttaaacacggcgacagtgaataa

SEQ ID NO: 458324 - DNA, 669 bp, Shigella boydii
atgcatatcaacattgcctggcaggacgtagataccgttctgctggatatggacggcacgttgctcgacctcgccttcgataactatttctggcaaaagctggtgcctgaaacatggggcgcgaaaaacggggttacgccacaggaagcgatggaatatatgcgccagcaatatcacgacgtacagcatacgctaaactggtactgtcttgattactggagtgagcaactgggtctggatatctgtgcaatgaccaccgagatgggaccgcgcgccgtactgcgtgaagataccattccgtttcttgaggcactgaaagccagcggtaagcagcgaattttgctcaccaatgctcatccgcacaacctggcggtaaaacttgagcatacgggtctggacgcacaccttgatttattactttccacccacacatttggttatccgaaagaggatcagcggttatggcatgcggtggccgaagctacgggtctgaaagctgaaagaacgctgtttattgatgacagcgaagcgattctcgatgctgccgcgcaatttggtattcgttactgcctcggcgtgactaatcctgattccgggattgccgagaaacagtatcaacgccatccgtcactgaatgactaccgccgcctgatcccctcgctaatgtga

SEQ ID NO: 458325 - DNA, 2136 bp, Shigella boydii
atgagcaccattgtgatttttttagctgctttgctggcctgctcactacttgcgggatggctgataaaagtgcgatccagacggcgtcagctgccctggaccaacgccttcgcggatgcgcaaacgcgtaaactcacacctgaagaacgtagcgccgttgaaaattatcttgagagcctgacgcaggtattacaggtgcctggcccaacgggagctagcgcggcaccgatctctctggcgctgaatgccgaaagcaacaacgtcatgatgctgacacacgctatcacacgttacggcatctctaccgacgatccgaataaatggcgttactacctcgattcggtagaagtccacctgccccccttctgggaacagtacatcaacgatgagaataccgttgaactgattcataccgattcgctgccgttggttatttcactcaacggtcatacgctgcaggagtacatgcaggaaacgcgcggctatgccttgcaacctgttccgtccacgcaggcgtcgattcgcggggaagagagtgagcaaatcgagctactcaatattcgcaaagaaacgcatgaagaatatgcgctgagtcgtccgcgcgggctgcgtgaagcgttgctgatcgtcgcctccttcctgatgttctttttctgcctgattaccccggatgtatttgttccgtggctggcaggcggcgcattactgctgctgggcgcaggtctgtgggggctattcgcgcccccggcaaaatcctccctgcgggaaattcattgtctgcgcggtacaccccgtcgttggggattgtttggcgaaaacgatcaggaacagatcaacaatatttcactcggtattatcgacctggtctatcccgcacactggcagccatacattgctcaggatctcgatcaacaaaccgatattgatatctatctcgaccgccacgtagtgcgtcaggggcgatatctttcgctgcatgatgaagtaaaaaactttccgttacagcactggctgcgcagtacgattatcgctgcgggctcgctgctggtgctgtttatgctgttattctggatcccgctggatatgccgctgaaattcactctctcatggatgaaaggcgcgcagaccattgaagccaccagcgtaaaacaactggctgacgctggcgtgcgggtaggcgatacattgcgtattagcggtacgggaatgtgtaatattcgcacttccggaacctggagcgcgaaaaccaattcaccttttttaccgtttgactgctcgcagatcatctggaatgacgcccgctcattaccattaccagaatctgaactggtcaacaaagcgacggcattgactgaagcagttaatcgccagctgcaccctaaaccggaagatgaatctcgcgtcagtgcctcattacgttcagcgattcaaaaatccggcatggtattgcttgatgattttggcgacattgtactgaagacagcggatttatgttctgccaaagatgactgtgtgcgactgaaaaatgcgctggtcaatctcggcaacagtaaagactgggacgcgctggtaaaacgcgccaacgccgggaagctcgatggcgtgaatgtgttattacgcccggtgagtgcggaatcgctggataacctggtggcaacctccaccgcgccgtttatcacgcatgaaacggcgcgagcggcacaatcactaaacagtccggcccccggcggattcctgattgtcagcgacgaaggcagcgattttgttgatcagccctggccttcggcatcactttacgactacccgctgcaagaacagtggaacgctttccagaaactggcacaaatgctgatgcatacgccgtttaacgccgaaggtatcgtcacaaaaatcttcactgacgccaatggtacgcagcatattggccttcatccgatcccggatcgttccggcctgtggcgctatctcagcaccacattgctgctactgacgatgctgggtagcgccatttacaatggcgtacaggcctggcgtcgttaccagcgtcatcgcactcgcatgatggagattcaggcctattatgaaagctgcctgaacccgcaactgatcaccccttcagaaagccttatcgaataa

SEQ ID NO: 458326 - DNA, 561 bp, Shigella boydii
atgagcaaatcattacaaaaacccaccattctgaatgttgaaactgtagcccgttcccgactgtttaccgtcgagagcgtggatctggagttcagcaatggcgtgcggcgtgtttatgaacgaatgcgtccaaccaaccgggaagcagtgatgattgtgccgattgtggacgatcacctgatcctgatccgcgaatacgcagtgggaactgaatcctacgaattaggtttttcgaaaggattaattgatccgggtgaaagcgtctacgaagccgctaaccgcgagctaaaagaagaggttggatttggtgcgaacgatctgacttttttgaagaagctcagcatggcaccgtcttacttttccagcaaaatgaatatcgtggtcgcgcaagatctctacccggaatcgctggaaggcgatgagccagagccgctaccacaggtgcgctggccgctggcgcatatgatggatttgctggaagaccctgacttcaacgaagcgcgtaatgtcagcgcgctgttcctcgtgcgcgaatggttgaaagggcaggggcgagtgtaa

SEQ ID NO: 458327 - DNA, 2553 bp, Shigella boydii
gtgaagttcgtaaagtattttttgatccttgcagtctgttgcattctgctgggagcaggctcgatttatggcctataccgctacatcgagccacaactgccggatgtggcgacattaaaagatgttcgcctgcaaattccgatgcagatttacagcgccgatggcgagctgattgctcaatacggtgagaaacgtcgtattccggttacgttggatcaaatcccgccggagatggtgaaagcctttatcgcgacggaagacagtcgcttctacgagcatcacggcgttgacccggtggggatcttccgtgcggcaagtgtggcgctgttctccggccacgcgtcacaaggggcgagtaccattacccagcagctggcgagaaacttcttcctcagtccagaacgcacgctgatgcgtaagattaaggaagtcttcctcgcgattcgcattgaacagttgctgacgaaagacgagatcctcgagctttatctgaacaagatttacctcggttaccgcgcctatggtgtcggtgctgcggcacaagtctatttcggtaaaacggtcgaccaactgacgctgaacgaaatggctgtgatagccgggctgccgaaagcgccttccacctttaatccgctctactcaatggatcgtgccgtcgcgcggcgtaacgtcgtactgtcgcggatgctggatgaagggtatatcacccaacaacagttcgatcagacacgcactgaggcgattaacgctaactatcacgcgccggagattgctttctctgcgccgtacctgagcgaaatggtgcgccaggagatgtataaccgttatggcgaaagtgcctatgaagacggttatcgcatttacaccaccatcacccgcaaagtgcagcaggccgcacagcaggcggtacgtaataacgtgctggactacgacatgcgccacggctatcgcggcccggcaaatgtgctgtggaaagtgggcgagtcggcgtgggataacaacaagattaccgatacgctgaaggcgctgccgacctatggtccgctgctgcctgccgcagtcaccagcgccaatcctcagggagcgacggcgatgctggcggacgggtcgaccatcgcattgagtatggaaggcgttcgctgggcgcgtccttaccgttcggatactcagcaaggaccgacgccgcgtaaagtgaccgatgttctgcaaacgggtcagcaaatctgggttcgtcaggttggcgatgcatggtggctggcacaagtgccggaagtgaactcggcgctggtgtcgatcaatccgcaaaacggtgccgttatggcgctggtcggtggctttgatttcaatcagagcaagtttaaccgcgccacccaggcactgcgtcaggtgggttccaacatcaaaccgttcctctacaccgcggcgatggataaaggtctgacgctggcaagtatgttgaacgatgtgccaatttctcgctgggacgcaggtgccggttctgactggcagccgaaaaactcgccgccacaatatgctggtccaattcgcttacgtcaggggctgggtcagtcgaaaaacgtggtgatggtacgtgcaatgcgggctatgggcgtcgactacgctgcagaatatctgcaacgcttcggcttcccggcgcaaaacattgtccacaccgaatcgctggcgctgggttcagcgtccttcaccccaatgcaggtggcgcgcggctacgcggtcatggcgaacggcggcttcctggtggacccgtggtttatcagcaaaattgaaaacgatcagggcggcgtgattttcgaagcgaaaccgaaagtagcctgcccggaatgcgatattccggtgatttacggtgatacgcagaaatcgaacgtgctggaaaataacgatgttgaagatgtcgctatctcccgcgagcagcagaatgtttctgtaccaatgccgcagctggagcaggcaaatcaggcgttagtggcgaagactggcgcgcaggagtacgcaccgcacgtcatcaacactccgctggcattcctgattaagagtgctttgaacaccaatatctttggtgagccaggctggcagggtactggctggcgtgcaggtcgtgatttgcagcgtcgcgatatcggcgggaaaaccggtaccactaacagttcgaaagatgcgtggttctcgggttacggtccgggcgttgtgacctcggtctggattggctttgatgatcaccgtcgtaatctcggtcatacaacggcttccggagcgattaaagatcagatctcaggttacgaaggcggagccaagagtgcccagcctgcatgggacgcttatatgaaagccgttcttgaaggtgtgccggagcagccgctgacgccgccaccgggtattgtgacggtgaatatcgatcgcagcaccgggcagttagctaatggtggcaacagccgcgaagagtatttcatcgaaggtacgcagccgacacaacaggcggtgcacgaggtgggaacgaccattatcgataatggtgaggcacaggaattgttctga

SEQ ID NO: 458328 - DNA, 780 bp, Shigella boydii
atggcatttaagatctggcaaattggtttgcatttacaacagcaagaagcggtagcggttgcgatcgtgcggggcgcaaaagaatgctttttgcaacgctggtggcggttgccgctggagaacgacattatcaaagatgggcggattgttgatgcgcagcagctggctaaaacgttgttaccttggagtcgcgaactgccgcagcgtcatcacattatgttggcgtttcccgccagtcgcacattacagcggtcatttccgcgcccgtcgatgtcccttggtgagcgggagcaaacggcctggctgtcagggacgatggcccgcgagctggatatggatccggactccctgcgcttcgattacagcgaagactcactcagtcccgcctataacgtgactgccgcgcaaagcaaagagctggcaacgctgcttactctggcagaaaggttgcgtgttcatgttagtgcgatcaccccggatgccagtgcattacagcgattcctgccttttttaccttctcatcagcaatgtctggcctggcgtgataacgaacagtggctgtgggcgacgcgctatagctgggggcgcaaactggcggtggggatgactagcgcgaaggagctggcggcagcgttattcgttgatcccgacagcgtcgcgatatgtggcgaaggcggatttgacccctgggaggccgtttctgttcgtcagccgctgctaccgccgcctggtggagactttgccatcgcgctggggctggcgcttgggaaggcgtactga

SEQ ID NO: 458329 - DNA, 540 bp, Shigella boydii
atgaacccgccaattaattttttgccctggcgacagcaacgccggaccgcttttctgcgtttctggttgctgatgttcgttgcgcctctgctgctggccgtcgggataacgctaatactgcgtctgacaggcagcgccgaagcgcgcatagacgcagttttgcttcaggcggaacaacaactcgcccgcagcttacagataacgaagccacgtttgctggagcaacagcagttacgcgaacagcgttcgcaacggcagcgccagcgacaatttacccgcgactggcaatctgcgctggaagcactggcggcgcttttacccgagcacgcctggctgacaacgataagctggcagcagggaacgctggagatcaaggggctgacaacaagcattaccgcgttaaacgcactagaaacgtcactccgccaggatgcgtcttttcatctcaatcagcggggagccacgcagcaggatgcgcagggacgctggcaatttgagtatcagttaacaaggaaggttagcgatgaacatgttctttga

SEQ ID NO: 458330 - DNA, 441 bp, Shigella boydii
atgaacatgttctttgactggtggttcgccacatcaccccgcctccgccagttttgctgggcattctggttgctgatgttagttacgctcatttttctgtcatcgacacaccatgaagagcgcgacgcattaattcgattacgggcaagtcatcaccagcagtgggccacactgtatcgcctggttgacaccactcccttcagcgaagaaaaaacgctgcccttttcgccactggattttcagttgcccggcgcgcaactggtttcctggcatccatccgcgcagggaggtgagttggcgttgaaaacgctgtgggaagcagtgccgtcggcattcacacggctggcagagcgcaacgtcagcgtgagccgtttttcgttaagcgtggaaggtgatgatcttttgttcacgctacaactggagacgccgcatgagggttaa

SEQ ID NO: 458331 - DNA, 405 bp, Shigella boydii
atgagggttaaacgctggttgttggcaggtattgcattgtgccttttaaccggtatgcgtgacccttttaaaccgccggaagatctatgccggattagcgaacttagccagtggcgctatcaggggatggtagggcgaggcgagcgcatcatcggtgtaataaaagacgggcaaaagaaatggcgacgggtgcagcaaaacgatgtgctggaaaacggctggacaattttacagctgacgccagacgtactaacgctgggtaccgggacaaactgcgaaccgccacaatggttgtggcaacggcaaggagatacaaatgaagcaatggatagccgcactactgttgatgctgatacccggcgtacaggcggcaaagccgcaaaaagtgacgctgatggtggatga

SEQ ID NO: 458332 - DNA, 1209 bp, Shigella boydii
atgctgatacccggcgtacaggcggcaaagccgcaaaaagtgacgctgatggtggatgacgttccggtagctcaggtgttgcaggcgctggctgaacaggagaagttgaacctggtcgtgtcgccagacgtcagcggtacggtgtcgttacatctaacagatgttccctggaagcaggcactacaaactgtagtgaaaagcgccggactgataacgcggcaggaaggcaacattctctcagtgcattccattgcctggcagaataacaatatcgcccgccaggaggcggagcaggcgcgggcgcaggcaaatctgccgctggaaaatcgcagtataaccctgcaatacgccgacgcgggagaactggcgaaagcgggggagaagctactgagtgccaaagggagtatgatcgtcgataaacgcaccaatcgccttttgctacgagataacaaaacggcgttaagcgcgcttgaacagtgggtagcgcaaatggatctgccggtcgggcaggttgagctgtcggcgcatattgtcaccattaatgaaaaaagtttgcgtgagttaggcgtgaaatggacgctggccgatgcgcaacacgctggtggcgttgggcaagtcaccacgcttggtagcgacctctccgtagcgacggcgacaacgcatgtcggttttaacattgggcgcatcaacggacgcttgctggatcttgagctttccgcgctcgaacaaaaacagcagctggatattatcgccagtccgcgtctgctggcctcacatcttcagcctgccagcattaaacaggggagcgaaattccatatcaggtttccagcggggaaagtggcgcgacgtcggtggaatttaaagaggccgtcctggggatggaggtcacgcccacggtgttacaaaaaggtcgcatccggctgaaattacacatcagccagaacgttccggggcaggtgctacagcaggccgatggcgaagtgctggcgattgataagcaggagatcgaaacgcaggttgaggtcaaaagcggagaaacgttggcgctgggcggcatttttacccgtaaaaataaatcgggtcaggatagcgtaccgttgcttggcgacattccctggttcgggcaattatttcgtcatgacggaaaagaatatgaacgacgcgagttagtggtgtttatcacgccacgactggtttccagtgagtaa

SEQ ID NO: 458333 - DNA, 522 bp, Shigella boydii
atggcagagaaacgcaatatctttctggttgggcctatgggtgccggaaaaagcactattgggcgccagttagctcaacaactcaatatggaattttacgattccgatcaagagattgagaaacgaaccggagctgatgtgggctgggttttcgatttagaaggtgaagaaggcttccgcgatcgcgaagaaaaggtcatcaatgagttgaccgagaaacagggtattgtgctggctactggcggcggctctgtgaaatcccgtgaaacgcgtaaccgtctttccgctcgtggcgttgtcgtttatcttgaaacgaccatcgaaaagcaacttgcacgcacgcagcgtgataaaaaacgcccgttgctgcacgttgaaacaccgccgcgtgaagttctggaagcgttggccaatgaacgcaatccgctgtatgaagagattgccgacgtgaccattcgtactgatgatcaaagcgctaaagtggttgcaaaccagattattcacatgctggaaagcaactaa

SEQ ID NO: 458334 - DNA, 1089 bp, Shigella boydii
atggagaggattgtcgttactctcggggaacgtagttacccaattaccatcgcatctggtttgtttaatgaaccagcttcattcttaccgctgaaatcgggcgagcaggtcatgttggtcaccaacgaaaccctggctcctctgtatctcgataaggttcgcggcgtacttgaacaggcgggtgttaacgtcgatagcgttatcctccctgacggcgagcagtataaaagcctggctgtactcgataccgtctttacggcgttgttacaaaagccgcatggtcgcgatactacgctggtggcgcttggcggcggcgtagtgggcgatctgaccggcttcgcggcggcgagttatcagcgcggtgttcgtttcattcaagtcccgacgacgttactgtcgcaggtcgattcctccgttggcggcaaaactgcggccaaccatcccctcggtaaaaacatgattggcgcgttctaccagcctgcttcagtggtggtggatctcgactgtctgaaaacgcttcccccgcgtgagttagtgtcggggctggcagaagtcatcaaatacggcattattcttgacggtgcgttttttaactggctggaagagaatctggatgcgttgttgcgtctggacggtccggcaatggcgtactgtattcgccgttgttgtgaactgaaggcagaagttgtcgccgccgacgagcgcgaaaccgggttacgtgctttactgaatctgggacacacctttggtcatgccattgaagctgaaatggggtatggcaattggttacatggtgaagcggtcgctgcgggtatggtgatggcggcgcggacgtcggaacgtctcgggcagtttagttctgccgaaacgcagcgtattataaccctgctcaagcgggctgggttaccggtcaatgggccgcgcgaaatgtccgcgcaggcgtatttaccgcatatgctgcgtgacaagaaagtccttgcgggagagatacgcttaattcttccgttggcaattggtaagagtgaagttcgcagcggcgtttcgcacgagcttgttcttaacgccattgccgattgtcaatcagcgtaa

SEQ ID NO: 458335 - DNA, 1287 bp, Shigella boydii
atggatgaattcaaaccagaagacgagctgaaacccgatcccagcgatcgtcgtactggtcgttctcgtcaatcttctgaacgttctgagcgtactgaacgtggcgaaccgcagatcaattttgatgatattgaacttgatgacactgacgatcgccgtccgactcgtgcgcaaaaagagcgcaatgaggaaccggaaatcgaagaagaaattgacgaatccgaagatgaaaccgtggatgaagagcgcgtagagcgtcgtccgcgtaagtgcaaaaaagcagccagtaaacccgcttctcgtcagtatatgatgatgggcgtcggcattctggttctactgctgttgatcatcggtatcggttctgcgctaaaagccccctcgacctcttccagcgatcaaaccgcgtctggcgagaagagtattgatcttgcaggcaatgcgaccgatcaggcgaatggggtgcagccagcgccgggaaccacgtctgcggaaaatactcagcaggatgtttctctgccaccgatctcttctacgccgactcaagggcaaaccccggcggcaacggatggtcaacaacgtgttgaagtgcagggtgacctgaacaatgcgctgactcagccacaaaatcagcaacagttgaacaatgtggcggtcaattccacattgccgaccgaaccagcgactgtcgcgcctgttcgcaatggcaatgcatcgcgtgacacggcgaaaacgcaaaccgctgaacgtccgtccactacgcgcctagctcgtcagcaggcggtgattgaaccgaaaaaaccgcaagcaaccgtgaaaacggagccgaagccggtagcacagacgccgaagcgtactgaaccagctgcccctgtggcgagcacgaaggcaccggctgcgacttctacgccagcaccaaaagagacggcgactacggctccagtacagacggcatccccggcgcaaaccacggcaacaccagccgctggagggaagaccgcaggtaatgttggttcgttgaaatcggcaccgtccagccattacactctgcagctgagcagttcctctaactacgacaacctgaacggttgggcgaagaaagagaatctgaaaaactacgttgtctatgaaacgacgcgtaatggtcagccgtggtatgtcctggtttctggcgtgtacgcttcgaaagaagaggcgaaaaaagcggtatctacattgccagcagatgttcaggccaaaaacccgtgggcgaaaccgctgcgtcaggtacaggccgatctgaagtaa

SEQ ID NO: 458336 - DNA, 837 bp, Shigella boydii
atgaagaaaaatcgcgcttttttgaagtgggcagggggcaagtatcccctgcttgatgatattaaacggcatttgcccaagggcgaatgtctggttgagccttttgtaggtgccgggtcggtgtttctcaacaccgacttttctcgttatatccttgccgatatcaatagcgacctgatcagtctctataacattgtgaagatgcgtactgatgagtacgtacaggccgcacgcgagctgtttgttcccgaaacaaattgcgccgaggtttactatcagttccgcgaagagttcaacaaaagccaggatccgttccgtcgggcggtactgtttttatatttgaaccgctacggttacaacggcctgtgtcgttacaatctgcgcggtgagtttaacgtgccgtttggccgctacaaaaaaccctatttcccggaagcagagttgtatcacttcgctgaaaaagcgcagaatgcctttttctattgtgagtcttacgccgatagcatggcgcgcgcagatgatgcatccgtcgtctattgcgatccgccttatgcaccgctgtctgcgaccgccaactttacggcgtatcacacaaacagttttacgcttgaacaacaagcgcatctggcggagatcgccgaaggtctggttgagcgccatattccagtgctgatctccaatcacgatacgatgttaacgcgtgagtggtatcagcgcgcaaaattgcatgtcgtcaaagttcgacgcagtataagcagcaacggcggcacacgtaaaaaggtggacgaactgctggctttgtacaaaccaggagtcgtttcacccgcgaaaaaataa

SEQ ID NO: 458337 - DNA, 678 bp, Shigella boydii
atgaaacagtatttgattgccccctcaattctgtcggctgattttgcccgcctgggtgaagataccgcaaaagccctggcagctggcgctgatgtcgtgcattttgacgtcatggataaccactatgttcccaatctgacgattgggccaatggtgctgaaatccttgcgtaactatggcattaccgcccctatcgatgtacatctgatggtgaaacccgtcgatcgcattgtgcctgatttcgctgccgctggtgccagcatcattacctttcatccagaagcctccgagcatgttgaccgcacgctgcaactgattaaagaaaatggctgtaaagcgggtctggtatttaacccggcgacacctctgagctatctggattacgtgatggataagctggatgtgatcctgctgatgtctgttaacccaggttttggcggtcagtcgttcattccacaaacactggataaactgcgcgaagtacgtcgtcgtatcgacgagtctggttttgacattcgactggaagtggacggtggcgtgaaggtgaacaacattggcgaaatcgctgcggcgggcgcggatatgttcgtcgccggttcggcaatcttcgaccagccagactacaaaaaagtcattgatgaaatgcgcagtgaactggcaaaggtaagtcatgaataa

SEQ ID NO: 458338 - DNA, 759 bp, Shigella boydii
atgaataagtttgaagatattcgcggcgtcgcttttgatctcgacggtacgctggttgacagtgctcccggtcttgctgctgcggtagatatggcgctgtatgcgctggagttacccgtcgcaggtgaagaacgcgttattacctggattggtaacggcgcagatgttctgatggagcgtgcattggcctgggcgcgtcaggaacgtgcgactctgcgtaaaacaatgggtaaaccgcccgttgatgacgacattccggcagaagaacaggtacgtattctgcgtaaactgttcgatcgctactatagcgaggttgccgaagaggggacgtttttgttcccgcacgttgccgatacgttgggcgcgttgcaggctaaaggcctgccgctaggcctggtcaccaacaaaccgacgccgttcgtcgcgccactgctcgaagccttagatattgccaaatactttagcgtggttatcggcggcgatgatgtgcaaaacaaaaaaccgcatccggacccgctgttactggtggctgagcggatgggaattgccccacaacagatgctgtttgtcggcgactcacgcaatgatattcaggcggcaaaagcggcaggttgcccatcagttggcttaacctacggatataactacggcgaggctatcgatctcagccagcctgatgtaatttatcagtctataaatgaccttctgcccgcattagggcttccgcatagcgaaaatcaggaatcgaaaaatgactaa

SEQ ID NO: 458339 - DNA, 1005 bp, Shigella boydii
atgactaagcccatcgtttttagtggcgcacagccctcaggtgaattgaccattggtaactacatgggtgcgctgcgtcagtgggtaaacatgcaggatgactaccattgcatttactgtatcgttgaccaacacgcgatcaccgtgcgccaggatgcacagaagctgcgtaaagcgacgctggatacgctggccttgtatctggcttgtggtatcgatcctgagaaaagcaccatttttgttcagtcccacgtaccagaacatgcgcagttaggctgggcactgaactgctatacctacttcggcgaactgagccgcatgacccagtttaaagataaatctgcgcgttatgccgagaacatcaacgctggtctgtttgactatccggtgctgatggctgcggacatcctgctgtatcaaactaatctggtaccggtgggtgaagaccagaaacagcacctggaactgagtcgcgatatcgcccagcgtttcaacgcgctgtatggcgagatctttaaggtgccggagccgtttattccgaaatctggcgcgcgcgtaatgtcgctgctggagccgaccaagaagatgtccaagtctgacgataaccgcaataacgttatcggcctgctggaagatccgaaatcggtagtgaagaaaatcaaacgcgcggtcactgactccgacgagccgccggtagttcactacgatgtgcagaacaaagcgggcgtttccaacctgctggatatcctttctgcggtaacgggccagagcatcccagaactggaaaaacagttcgaaggcaagatgtatggtcatctgaaaggtgaagtggctgatgccgtttccggtatgctgactgaattgcaggaacgctatcaccgtttccgcaacgatgaagccttcctgcaacaggtgatgaaagacggcgcagaaaaagccagtgtacacgcttcccgtacgctgaaagcggtgtacgaagcgattggttttgtggcgaagccgtaa

SEQ ID NO: 458340 - DNA, 906 bp, Shigella boydii
atgcgtcgaacgtttatcaaaaaagaaggcgtcgtcatcacgacgctggcccgttatttgttgggggaaaaatgcggtaatcgactgaaaaccatagatgagctggcaactgaatgccgttcatcggttggcctgacgcaggccgtgttgaaaacgttggaatcaagtggagcgatacggattgaacgccgtgggcgcaatggcagttatctggtcgaaatggataataaagcgctgctgagtcatgtggatatcaataacgttgtgtgtgccatgcctttgccctatacccgcttgtacgaaggtttagcaagcgggctgaaagcccagtttgatggcattcctttttattatgcgcatatgcgtggcgcggatattcgtgtggagtgtttgcttaacggtgtctatgacatggcagtagtttcccgcctggcggcggaaagttatctcagccaaaacaatttgtgcatcgccctcgagcttggcccgcatacgtatgttggtgaacatcaactgatatgccgcaaaggtgagtctggaaatgttaagcgagtaggtctcgatagtcgttcggcggatcagaaaatcatgaccgatgtcttttttggcgatagtgatgtggaacgtgtcgatctctcttatcacgagagtttacaacgcattgttaaaggcgatgtcgatgcggttatctggaacgtggtggcggaaaacgaactgaccatgctgggattagaggcgacgccgctcacagacgatccgcgatttttacaggccaccgaagccgtggtcctgacgcgagtcgatgattacccaatgcaacaactgctgcgtgccgttgtagataaacacgccctgctcgcccatcaacaacgggtagtgagtggggaacaggaaccgagttattaa

SEQ ID NO: 458341 - DNA, 363 bp, Shigella boydii
atggaaaccagactcaacctgctttgcgaggcaggcgttattgataaggacatctgcaaaggcatgatgcaggtcgtcaacgtactggaaacagagtgccatctgccggtgcgcagtgagcaaggaacgatggcgatgacacatatggcgagtgcactgatgcgcagtcgccgtggtgaagaaatagagccgctggataacgaattgctggcagagctggcgcaatccagccactggcaagccgttgtgcaattgcatcaggtgttgttgaaggaattcgcactggaagttaatccgtgtgaagaaggctatttgctggccaacctttatggattatggatggctgctaacgaagaggtttga

SEQ ID NO: 458342 - DNA, 1164 bp, Shigella boydii
atgtttgtagaagcattgaaacgccagaacccggcgctgatttccgccgcactaagtttgtggcagcagggcaagatcgccccggacagctgggtgatcgacgtggatcaggtactggaaaacggtaagcgactgattgagacggcgcggctttacggcattgaactgtatctgatgaccaagcagtttggccgtaacccatggctggcggaaaaattgctggcattaggttacagcggcattgtggcggtggattacaaagaggcgcgagtcatgcgccgcgctggtttgtcggtggcgcatcaggggcatctggtacaaatcccttgtcatcaggttgctgacgccgttgaacagggcaccgacgtcatcaccgtgtttactctcgacaaagcgcgggaagtttctgcggcagcggtgaaggccggacgtgtgcagtttgtgctgctcaaagtttatagcgacgatgattttctttatccggggcaggagagcggttttgtacagcattcgctgcacgaggtggttgctgaaattaagaaactgccgggtctgcatttagccggacttacccatttcccttgcctgctttgggatgaggctgccggaaaagttttgccgacaccgaatcttcacacgctgatacaggcacgggatcaactggcgaaatctggtattgcacttgagcaactgaacgcgccttcagcgaccagctgcacttcgctgccattactggcgcaatacggtgtgactcatgccgaacccggtcatgcgctgacgggcactattccggcaaaccagcagggcgatcagtctgaacgtatcgcgatgctctggttgagtgaaatctcccatcatttccgtggcgacagctactgctacggcggcggttactaccgtcgtggtcatgcgcaacatgcgttggtgtttacgccagaaaatcaaaagattactgaaaccaatctcaaaactgtggatgacagcagtatcgactacaccctgtcgctggcaggcgagtttccggtaagcagtgcagtggtgctctgtttccgcacgcagatttttgtcacccgtagcgatgtggtgctggtgtccggtattcaccgtggcgaaccgaaaatcgttggtcgttatgacagtcttggaaactctctgggggcgtaa

SEQ ID NO: 458343 - DNA, 1227 bp, Shigella boydii
atggcgcgatttgtggtgttagtgattgatagctttggcgtaggggcaatgaaagatgtcacgctggtgcgtccgcaagatgcgggagcgaatacatgtggtcacatcctgagccagttgccgcatttgcagctaccaacgctggagaagctggggctaatcaacgcattgggttatgcgccaggcgatatgcagccgtcagattccgcaacctggggcgtggcagagctgcaacatgaaggtggcgatacctttatggggcatcaggaaattttaggcacgcgcccgttaccgccgctgcggatgcctttttgcgatgtgattgaccgtgttgagcaggcattagtatccgccggttggcaggtggagcgccgtggcgatgaactgcaatttctgtgggtcaatcaggcggttgcgattggcgataatctcgaggcggatttaggccaagtctataacattaccgccaatctctctgtgatctcttttgacgacgcaatcaaaattggtcgtatcgtgcgtgagcaggtacaggtcggtcgggtcattacatttggtggcctgttaaccgacagtcaacgcattctcgatgccgcagaaagcaaagaagggcgctttattggtatcaatgcgccgcgttctggcgcttatgacaacggcttccaggtcgtgcatatgggctacggtgtcgataaaaaagtgcaggtgccgcaaaaactgtatgaggcgggcgtgccaaccgtgctggtgggtaaggtggcagatatcgtcagcaatccttatggcgtgagctggcaaaacctggtggatagccagcggattatggatatcaccctcgacgaatttaacacccatccgacggcgtttatttgcaccaatatccaggaaaccgacctcgctggtcatgcagaagacgtcgcacgttatgccgaacgtttgcaggtcgttgaccgtaaccttgcccggcttgttgatgcgatgcagccagatgattgcctggtcgtgatggcggatcacggcaacgatccgaccattggtcacagccaccatacccgcgaagtggtgccgctgctggtttatcagcaaggcctggctgctacgcagctcggtgtgcgcaccacgctttctgatgtgggagctaccgtgtgtgaatttttccgtgcgccaccgccacaaaatggtcgctcttttctttcctccctccggtttgcaggagacaccctatga

SEQ ID NO: 458344 - DNA, 879 bp, Shigella boydii
atgagttttgatccgacgggttacaccctggcccatgagcatctgcatattgatctctccggctttaaaaacaacgtggactgccgccttgatcagtatgcgttcatttgccaggagatgaacgacctgatgacccggggtgtacgtaatgtgattgagatgaccaaccgttacatggggcgcaatgcgcaatttatgctcggtgtaatgcgcgaaaccgggatcaacgtggtggcctgtactggttattaccaggatgcgtttttcccggaacatgtggtgacccgcagcgtgcaggaactggcgcaggagatggtcgatgaaattgaacagggtatcgatggcacggagctgaaagccgggctcatcgcggagatcggctccagcgaaggaaagattacgccgctggaagagaagatatttattgccgctgcgctggcgcataaccagaccggacgcccgatctccacgcatacgtcgttcagcaccatggggctggaacaactggctctgttgcaagcccacggagttgatctttcgcgcgtcaccgttggtcactgcgatctgaaagacaacctcgacaacattttgaagatgatcgatctcggcgcgtacgtgcagttcgacaccattggtaagaacagttactacccggacgaaaagcgcattgcgatgctccacgcgctacgtgaccgtgggttgctgaaccgcgtcatgctgtcgatggatattacgcgccgctcccatttaaaagccaatggtggttatggctatgactatttattgaccacctttattccgcaattgcgccagtcaggattcagtcaggccgatgtggatgtgatgttacgtgaaactccctatcaatttttccaataa

SEQ ID NO: 458345 - DNA, 354 bp, Shigella boydii
atgaaaaagattggcgttgcaggcttacagcgtgagcagattaaaaaaaccattgaagcgacggctcctggcagttttgaagttttcattcacaacgacatggaagcggcaatgaaagtgaaatccgggcaactggattactacatcggtgcgtgtaataccggtgcgggcgcggcattgtcgattgccatcgcggtgattggctataacaaaagttgcaccattgccaaaccaggcattaaagcgaaagacgagcatatcgccaaaatgatcgctgaaggtaaagtggcgtttggcctttccgttgagcacgtcgaacacgcgattccgatgctgattaaccatctgaaataa

SEQ ID NO: 458346 - DNA, 231 bp, Shigella boydii
atggatctgtatattcagattatcgtggtggcgtgcctgacgggtatgacatcgcttctggcgcatcgctcggcggctgtttttcatgacggcatccgcccgatcctgccgcaactgattgaaggttatatgaaccgtcgcgaggcggggagtatcgcttttggtctgagcattggttttgtggcctcggtggggatttcttttaccctgaaaaccgggctgctcaactaa

SEQ ID NO: 458347 - DNA, 894 bp, Shigella boydii
atgccgcctcgccgctataaccctgacacccgacgtgacgagctgctggaacgcattaatctcgatatccccggcgcggtggcccaggcgctgcgggaagatttaggcggaacagtcgatgccaacaatgacattacggcaaaacttttaccggaaaactctcgctctcatgccacggtgatcacccgcgagaatggcgtattttgcggcaaacgctgggttgaagaggtgtttattcaactggcaggcgacgatgtcaccataatctggcatgtggatgacggcgatgtcatcaacgccaatcaacccttgttcgaacttgaaggcccatcccgcgtgctgttaacgggcgaacgcactgcgcttaattttgtgcaaaccctttcaggagctgccagtaaggtacgccactatgtcgaattactggaaggcaccaacacgcagttgttggatacgcgcaaaaccttacctggcctgcgttcagctctgaaatacgcggtactttgcggcggcggagcgaatcaccgtctggggctttctgatgccttcctgatcaaagaaaatcatattattgcctccggctcagtgcgccaggccgtcgaaaaagcgtcctggctgcacccggatgcgccagtagaagtcgaagtagagaatctggaagaacttgatgaagccctgaaagcaggagccgatatcatcatgctggataacttcgaaacagaacagatgcgcgaagccgtcaaacgcaccaacggcaaggcgctactggaagtgtctggcaacgtcactgacaaaacactgcgcgaatttgccgaaacgggcgtggactttatctccgtcggtgcgctaactaaacacgtacaagcactcgacctttcaatgcgttttcgctaa

SEQ ID NO: 458348 - DNA, 552 bp, Shigella boydii
atgttgttagaacaggggtggctggttggcgcgcgccgcgttccctcaccacattacgattgccgcccggatgacgaaacacccaccctgctggtggtgcacaatattagcctgccgccaggcgagtttggcggtccgtggatcgacgcattattcactggaactattgatccgcaggcacatcctttctttgctgagatcgcccatttgcgcgtctccgctcactgtttgattcgccgtgatggtgaaatagtccagtatgttcctttcgataaacgtgcatggcatgcgggagtctctcagtatcaggggcgcgaacgctgcaatgatttttctattgggattgagcttgaaggcaccgatacgctggcgtataccgatgcgcagtatcaacagcttgcggcggttacgcgggcactgattgatcgctatccagatatcgctaataacatgacgggccattgtgatattgcgccggatcggaaaaccgatcccggccctgcatttgattgggcgcggtttcgtgcgctggtcagcaaggagacaacatga

SEQ ID NO: 458349 - DNA, 855 bp, Shigella boydii
atgacgctatttacaaccttactggtgttaattttcgagcgcctgtttaagttgggcgagcactggcagcttgatcatcgtcttgaagcgttctttcggcgggtgaaacatttttctctcgggcgcacgttaggcatgaccattattgcgatgggcgtgacttttttactgttacgcgcattgcagggagtattgttcaacgttcccacgctgctggtgtggctgctgattggtttgctgtgtattggcgcaggtaaagttcgtcttcattatcatgcttatctgacagctgcttcacgtaatgatagccatgcccgtgtcacgatggctggcgaactcaccatgattaacggcgtcccggcaggctgcgatgaacgtgagtatttgcgtgagctgcaaaatgcattgctgtggattaactttcgtttttatcttgctccgctgttctggttgattgtggggggaatctggggacccgttacgctgatggggtatgcgtttttgcgtgcatggcaatactggctggcgcgataccagacgccgcatcatcgtttacagtccggcattgatgccgtgcttcatgtactggattgggtgccggttcgtcttgcgggtgtggtatatgccttgatcggtcatggggagaaagcgttaccggcctggtttgcttcgctgggtgacttccatacttcgcagtatcaggtgttaacgcgtctggcgcagttctctctggcgcgtgaaccgcatgtcgataaggtggagacgccgaaggcagcggtttcaatggcgaagaaaacctcgttcgtggtcgtggtggtgattgcactactgacgatttacggggcgttggtgtaa

SEQ ID NO: 458350 - DNA, 1371 bp, Shigella boydii
atggaaggtcaacagcacggcgagcagctaaagcgcggccttaaaaaccgccatattcagcttatcgcgctgggtggcgcgatagggaccgggttattcctgggtagcgcctccgtaatacagtccgcagggccagggattatcctgggttacgccattgctggttttatcgcctttctgatcatgcgtcagctgggtgaaatggtggtcgaagaacctgtcgcaggctcctttagccactttgcttataaatactggggcagttttgccggtttcgcctctggctggaactactgggtactgtacgttttagttgccatggctgagctgactgccgtgggtaaatacattcagttctggtatccggaaatccccacctgggtttctgccgccgtattctttgtggtgattaacgccatcaacctgaccaacgttaaagtgtttggcgagatggagttctggtttgccattatcaaagttatcgcggtggtagcgatgatcatcttcggcggctggctgctattcagtggcaacagcggcccgcaggcgaccgttagcaacctgtgggatcagggtggtttcctgccgcacggcttcaccgggctggtgatgatgatggcgattatcatgttctcgttcggtggtctggaactggtggggatcaccgcagcagaagctgataacccggagcaaagtataccgaaagcaactaaccaggttatctaccgcatcctgattttctatattggttcgttagccgttctgctctcactgatgccgtggacccgcgttaccgccgataccagtccgtttgtgctgatcttccacgagttaggcgatacctttgtggcgaatgcgctgaacatcgtggtactgactgcggcgctctccgtgtacaacagctgcgtatattgcaacagccgtatgctgtttggtctggcacaacagggtaatgcgccaaaagcgctggcgtctgtcgataaacgtggtgtaccagtaaataccattctggtgtctgcactggtaacggcgttgtgcgtactgattaactaccttgccccagagtccgctttcggactgttaatggcgctggtggtatctgcactggtaatcaactgggcgatgattagcctggcgcatatgaaattccgtcgcgccaagcaggaacaaggcgtggtaactcgcttccctgctctgctttatccgctgggtaactggatctgcctgctgtttatggcggcggtactggtgattatgctgatgaccccaggaatggcgatttcggtatacctgatcccggtatggctgatcgtgttaggtatcggctatctgtttaaagagaaaaccgccaaagccgtaaaagcgcattaa

SEQ ID NO: 458351 - DNA, 765 bp, Shigella boydii
atggcctacagcaaaatccgccaaccaaaactctccgatgtgattgagcagcaactggagtttttgatcctcgaaggcactctccgcccgggcgaaaaactcccaccggaacgcgaactggcaaaacagtttgacgtctcccgtccctccttgcgtgaggcgattcaacgtctcgaagcgaagggcttgttgcttcgtcgccagggtggcggcacttttgtccagagcagcctatggcaaagcttcagcgatccgctggtggagctgctctccgaccatcctgagtcacagtatgacttgctcgaaacacgacacgccctggaaggtatcgccgcttattacgccgcgctgcgtagtaccgatgaagacaaggaacgcatccgtgaactccatcacgccatagaactggcgcagcagtctggcgatctggacgcggaatcaaacgccgtactccagtatcagattgctgtcactgaagcggcccacaatgtggttctgcttcatctgctaaggtgtatggagccgatgttggcccagaatgtccgccagaacttcgaattgctctattcgcgtcgcgagatgctgccgctggtgagtagtcaccgcacccgcatatttgaagcgattatggccggtaagccggaagaagcgcgcgaagcatcgcatcgccatctggcctttatcgaagaaattttgctcgacagaagtcgtgaagagagccgccgtgagcgttctctgcgtcgtctggagcaacgaaagaattag

SEQ ID NO: 458352 - DNA, 2664 bp, Shigella boydii
atgtcagaacgtttcccaaatgacgtggatccgatcgaaactcgcgactggctccaggcgatcgaatcggtcatccgtgaagaaggtgttgagcgtgctcagtatctgatcgaccaactgcttgctgaagcccgcaaaggcggtgtaaacgtagccgcaggcacaggtatcagcaactacatcaacaccatccccgttgaagaacaaccggagtatccgggtaatctggaactggaacgccgtattcgttcagctatccgctggaacgccatcatgacggtgctgcgtgcgtcgaaaaaagacctcgaactgggcggccatatggcgtccttccagtcttccgcaaccatttatgatgtgtgctttaaccacttcttccgtgcacgcaacgagcaggatggcggcgacctggtttacttccagggccacatctccccgggcgtgtacgctcgtgctttcctggaaggtcgtctgactcaggagcagctggataacttccgtcaggaagttcacggcaatggcctctcttcctatccgcacccgaaactgatgccggaattctggcagttcccgaccgtatctatggggctggggccgattggtgctatttaccaggctaaattcctgaaatatctggaacaccgtggcctgaaagatacctctaaacagaccgtttacgcgttcctcggcgacggtgaaatggacgaaccggaatccaaaggtgcgatcaccatcgctacccgtgaaaaactggataacctggtcttcgttatcaactgtaacctgcagcgtcttgacggcccggtcaccggtaacggcaagatcatcaacgaactggaaggcatcttcgaaggtgctggctggaacgtgatcaaagtgatgtggggtagccgttgggatgaactgctgcgtaaagataccagcggtaaactgatccagctgatgaacgaaaccgttgacggcgactaccagaccttcaaatcgaaagatggtgcgtacgttcgtgaacacttcttcggtaaatatcctgaaaccgcagcactggttgcagactggactgacgagcagatctgggcactgaaccgtggtggtcacgatccgaagaaaatctacgctgcattcaagaaagcgcaggaaaccaaaggcaaagcgacagtaatccttgctcattccattaaaggttacggcatgggcgacgcggctgaaggtaaaaacatcgcgcaccaggttaagaaaatgaacatggacggcgtgcgtcacatccgcgaccgtttcaatgtgccggtgtctgatgcagatatcgaaaaactgccgtacatcaccttcccggaaggttctgaagagcatacctatctgcacgcacagcgtcagaaactgcacggttatctgccaagccgtcagccgaacttcaccgagaagcttgagctgccgagcctgcaagacttcggcgcgctgctggaagagcagagcaaagagatctctaccactatcgctttcgttcgtgccctgaacgtaatgctgaagaacaagtcgatcaaagatcgtctggtaccgatcatcgccgacgaagcgcgtactttcggtatggaaggtctgttccgtcagattggtatttacagcccgaacggtcagcagtacaccccgcaggaccgcgagcaggttgcttactataaagaagacgagaaaggtcagattctgcaggaagggatcaacgagctgggcgcaggttgttcctggctggcagcggcgacctcttacagcaccaacaatctgccgatgatcccgttctacatctattactcgatgttcggcttccagcgtattggcgatctgtgctgggcggctggcgaccagcaagcgcgtggcttcctgatcggcggtacttccggtcgtaccaccctgaacggagaaggtctgcagcatgaagatggtcacagccacattcagtcgctgactattccgaactgtatctcttacgacccggcttacgcttacgaagttgctgtcattatgcatgacggtctggagcgtatgtacggtgaaaaacaagagaacgtttactactacatcaccacgctgaacgaaaactaccacatgccggcaatgccggaaggtgctgaggaaggtatccgtaaaggtatctacaaactcgaaaccattgaaggtagcaaaggtaaagttcagctgctgggctccggttctatcctgcgtcacgtccgtgaagcggcagagatcctggcgaaagattacggcgtaggttctgacgtttatagcgtgacctccttcaccgagctggcgcgtgatggtcaggattgtgaacgctggaacatgcttcatccgctggaaactccgcgcgttccgtatatcgctcaggtgatgaacgacgctccggcagtggcatctaccgactatatgaaactgttcgctgagcaggtccgtacttacgtaccggctgacgactaccgcgtactgggtactgatggcttcggtcgttccgacagccgtgagaacctgcgtcaccacttcgaagttgatgcttcttatgtcgtggttgcggcgctgggcgaactggctaaacgtggcgaaatcgataagaaagtggttgctgacgcaatcgccaaattcaacatcgatgcagataaagttaacccgcgtctggcgtaa

SEQ ID NO: 458353 - DNA, 1893 bp, Shigella boydii
atggctatcgaaatcaaagtaccggacatcggggctgatgaagttgaaatcaccgagatcctggtcaaagtgggcgacaaagttgaagccgaacagtcgctgatcaccgtagaaggcgacaaagcctctatggaagttccgtctccgcaggcgggtatcgttaaagagatcaaagtctctgttggcgataaaacccagaccggcgcactgattatgattttcgattccgccgacggtgcagcagacgctgcacctgctcaggcagaagagaagaaagaagcagctccggcagcagcacccgcggctgcggcggcaaaagacgttaacgttccggatatcggcagcgacgaagttgaagtgaccgaaatcctggtgaaagttggcgataaagttgaagctgaacagtcgctgatcaccgtagaaggcgataaagcttctatggaagttccggctccgtttgctggcaccgtgaaagagatcaaagtgaacgtgggtgacaaagtgtctaccggctcgctgattatggtcttcgaagtcgcgggtgaagcaggcgcggcagctccggcggctaaacaggaagcggctccggcagcggcccctgcaccagcagctggcgtgaaagaagttaacgttccggatatcggcggtgacgaagttgaagtgactgaagtgatggtgaaagtgggcgacaaagttgccgctgaacagtcactgatcaccgtagaaggcgacaaagcttctatggaagttccggcgccgtttgcaggcgtcgtgaaggaactgaaagtcaacgttggcgataaagtgaaaactggctcgctgattatgatcttcgaagttgaaggcgcagcgcctgcggcagctcctgcgaaacaggaagcggcagcgccggcaccggcagcaaaagctgaagccccggcagcagcaccagctgcgaaagcggaaggcaaatctgaatttgctgaaaacgacgcttatgttcacgcgactccgctgatccgccgtctggcacgcgagtttggtgttaacctagcgaaagtgaagggcactggccgtaaaggtcgtatcctgcgcgaagacgttcaggcttacgtgaaagaagctatcaaacgtgcagaagcagctccggcggcgactggcggcggtatcccaggcatgctgccgtggccgaaggtggacttcagcaagtttggtgaaatcgaagaagtggaactgggccgtatccagaaaatttctggtgctaacctgagccgtaactgggtgatgatcccgcatgttacccacttcgacaaaaccgatatcaccgagctggaagcgttccgtaaacagcagaacgaagaagcggcgaaacgtaagctggatgtgaagatcaccccggttgtcttcatcatgaaagccgttgctgcagctcttgagcagatgcctcgcttcaatagttcgctgtcggaagacggtcagcgtctgaccctgaagaaatacatcaacatcggtgtggcggtggataccccgaacggtctggttgttccggtattcaaagacgtcaacaagaaaggcatcatcgagctgtctcgcgagctgatgactatttctaagaaagcgcgtgacggtaagctgactgcgggcgaaatgcagggcggttgcttcaccatctccagcatcggcggcctgggtactacccacttcgcgccgattgtgaacgcgccggaagtggctatcctcggcgtttccaagtccgcgatggagccggtgtggaatggtaaagagttcgtgccgcgtctgatgctgccgatttctctctccttcgaccaccgcgtgatcgacggtgctgatggtgcccgtttcattaccatcattaacaacacgctgtctgacattcgccgtctggtgatgtaa

SEQ ID NO: 458354 - DNA, 1425 bp, Shigella boydii
atgagtactgaaatcaaaactcaggtcgtggtacttggggcaggccccgcaggttactccgctgccttccgttgcgctgatttaggtctggaaaccgtaatcgtagaacgttacaacacccttggcggtgtttgcctgaacgtcggctgtatcccttctaaagcactgctgcacgtagcaaaagttatcgaagaagccaaagcgctggctgaacacggtatcgtcttcggcgaaccgaaaaccgatattgacaagattcgtacctggaaagagaaagtgatcaatcagctgaccggtggtctggctggtatggcgaaaggccgcaaagtcaaagtggtcaacggtctgggtaaatttaccggggctaacaccctggaagttgaaggtgagaacggtaaaaccgtgatcaacttcgacaacgcgatcattgcagcgggttctcgcccgatccaactgccgtttattccgcatgaagatccgcgtatctgggactccactgacgcgctggaactgaaagaagtaccagaacgcctgctggtaatgggtggcggtatcatcggtctggaaatgggcaccgtataccacgcgctgggttcacagattgacgtggttgaaatgttcgaccaggttatcccggcagctgacaaagacatcgttaaagtcttcaccaagcgtatcagcaagaaattcaacctgatgttggaaaccaaagttaccgccgttgaagcgaaagaagacggtatttatgtgacgatggaaggcaaaaaagcacccgctgaaccgcagcgttacgacgccgtgctggtagcaattggtcgtgtgccgaacggtaaaaacctcgacgcaggcaaagctggcgtggaagtggacgaccgtggtttcatccgcgttgacaaacagctgcgtaccaacgtaccgcacatctttgctatcggcgatatcgttggtcagccgatgctggcacacaaaggtgttcacgaaggtcacgttgccgctgaagttatcgccggtaaaaaacactacttcgatccgaaagttatcccgtctatcgcctataccgaaccagaagttgcatgggtaggtctgactgagaaagaagcgaaagagaaaggcatcagctatgaaaccgccaccttcccgtgggctgcttctggtcgtgctatcgcttccgactgcgcagacggtatgaccaagctgattttcgacaaagaatctcaccgtgtgatcggtggtgcgattgtcggtaccaacggcggcgagctgctgggtgaaatcggcttggcaatcgaaatgggttgtgacgctgaagacatcgcgctgaccatccatgcgcacccgactctgcacgagtctgtgggcctggcggcagaagtgttcgaaggtagcattaccgacctgccgaacccgaaagcgaagaagaagtaa

SEQ ID NO: 458355 - DNA, 1854 bp, Shigella boydii
atgaaaatgactttgccgtttaaaccccatgtgctggcactaatttgcagtgccgggctttgtgccgcctctgccgggctatatataaaaagccgcacagtggaagcggctgtggaaacgcaatcgacacaactggctgtgtctgacgctgccgcggttacgcttcctgcaacggtttccgcgcctcccgtaacacccgccgtcgttaaatccgcattcagcactgcacaaatagatcaatgggtcgcgcccgtcgcgctgtatcccgacgccctactttcgcaggtgctgatggcatcaacctatccggcaaacgttgctcaagcagtgcaatggtcgcacgataatccacttaaacaaggcgatgctgctattcaggcggtatctgaccagccgtgggacgccagcgttaaatcactggtggcctttccacaattgatggcattgatgggcgaaaacccgcaatgggtgcaaaacctgggcgatgcttttctggcgcagccgcaggacgtgatggactcggtacagcgattgcggcaactggcgcaacaaaccggttcgctgaagtcatcaaacgaacaaaaagttattaccacaacgaagaaagctgtaccggtaaaacagacagtcacggcacccgtcataccatccaataccgttttaactgccagccccgtcattacagagcctgcaacaaccgtcatttccattgagcccgccaatcctgatgtggtctatattcccaactacaacccaaccgtggtttacgggaactgggccaatactgcgtatccgccggtttatctgccaccaccagccggagaaccgtttattgacagctttgtgcgcggattcggctatagcatgggtgttgctaccacgtacgcactattcagcagcatcgactgggatgacgacgatcatgaccatcatcatcatgacgatgatgattatcatcaccacgatggcggtcatcgtgacggtaatggctggcaacacaacggcgacaacatcaatatcgacgtcaacaatttcaaccgtatcaccggtgagcatcttactgataagaatatggcatggcggcacaatccaaactaccgtaatggtgtgccctatcatgatcaggatatggcaaagcggtttcatcaaaccgatgtcaacggcggaatgagtgccacgcagctacctgctccaacacgcgacagccagcgtcaggcggcagcaagtcagtttcagcaacgaacacacgccgcccccgtcattacacgagatacccaacgtcaggcagcggcacagcggtttaatgaagctgaacactatgggagctatgacgacttccgcgacttcagccgtcgccaacccctgacccagcaacaaaaggacgccgctcgtcagcgttatcagtcagcttctcctgagcagcgccaggcagttcgcgagagaatgcagactaacccgcagatccagcagcgaagagaggcagcgcgtgagcgcattcagcccgcctcgcctgagcagcgccaggcagtccgcgagaaaatgcagactaacccacagatccagcagcgaagagacgcagcgcgtgagcgtattcagtcagcctcgcctgagcagcgccaggtgtttaaggaaaaagtacagcagcgcccactgaaccaacagcaacgtgataacgcccgccagcgtgttcaatcagcatcacctgaacaacgtcaggtttttcgggagagagttcaggagagccgcccacaacgtctaaacgacagtaaccgtactgccagattgaataacgatcaacggtcagcagtacgcgaacgtctctctgagcgcggagcaaggcgactggaaaggtaa

SEQ ID NO: 458356 - DNA, 2598 bp, Shigella boydii
gtgctagaagaataccgtaagcacgtagctgagcgtgccgctgaggggattgcgcccaaacccctggatgcaaaccaaatggccgcacttgtagagctgctgaaaaacccgcccgcgggcgaagaagaattcctgttagatctgttaaccaaccgtgttccccctggcgtcgatgaagccgcctatgtcaaagcaggcttcctggctgctatcgcgaaaggcgaagccaaatcccctctgctgactccggaaaaagccatcgaactgctgggcaccatgcagggtggttacaacattcatccgctgatcgacgcgctggatgatgccaaactggcaccgatcgctgccaaagcactttctcacacactgctgatattcgataacttctatgacgtagaagagaaagcgaaagcaggcaacgaatatgcgaagcaggtaatgcagtcctgggcggatgccgaatggtttctgaatcgcccggcgctggctgaaaaactgaccgttaccgtcttcaaagtcactggcgaaaccaacaccgatgacctttctccggcaccggatgcgtggtcgcgcccggatatcccactgcacgcgctggcgatgctgaaaaacgcccgtgaaggtattgagccagaccagccaggtgttgttggcccgatcaaacagattgaagctctgcaacagaaaggtttcccgctggcgtacgtcggtgacgttgtgggtacgggttcatcgcgtaaatccgccacgaactccgttctgtggtttatgggcgatgatattccacatgtgccgaacaaacgcggcggtggtttgtgcctcggcggtaaaattgcacccatcttctttaacacgatggaagacgcgggtgcactgccaatcgaagtcgacgtctctaacctgaacatgggcgacgtgattgacgtttacccgtacaaaggtgaagtgcgtaaccacgaaacaggcgaactgctggcgaccttcgaactgaaaaccgacgtgctgattgatgaagtgcgtgctggcggccgtatcccgctgattatcgggcgtggcctgaccaccaaagcgcgtgaagcacttggtctgccgcacagtgatgtgttccgtcaggcgaaagatgtcgctgagagcgatcgcggcttctcgctggcgcagaaaatggtaggccgtgcctgtggcgtgaaaggcattcgtccgggcgcgtactgcgaaccgaaaatgacttctgtaggttcacaggacactaccggcccgatgacccgtgatgaactgaaagacctggcgtgcctgggcttctcggctgacctggtgatgcagtctttctgccacaccgcggcgtatccgaagccagttgacgtgaacacgcaccacacgctgccggacttcattatgaaccgtggcggtgtgtcgctgcgtccgggtgacggcgtaatccactcctggctgaaccgtatgctgctgccggataccgtcggtaccggaggtgactcccatacccgtttcccgatcggtatctctttcccggcgggttctggtctggtggcatttgcagccgcaacaggcgtaatgccgctggatatgccggaatccgttctggtgcgcttcaaaggcaaaatgcagccgggcatcaccctgcgcgatctggtacacgccattccgctgtatgccatcaaacaaggtctgctgaccgttgagaagaaaggcaagaaaaacatcttctctggccgcattctggaaattgaaggtctgccggatctgaaagttgagcaggcctttgagcttaccgatgcgtccgctgagcgttctgccgctggttgtactatcaagctgaacaaagaaccaatcatcgaataccttaactctaatatcgtcctgctgaagtggatgatcgcggaaggttacggcgatcgtcgtaccctggaacgtcgtattcagggcatggaaaaatggctggcgaatcctgagctgctggaagccgatgcagatgcggaatacgcggcagtgattgacatcgatctggcggatattaaagagccaatcctgtgtgctccgaacgacccggatgacgcgcgtccgctgtctgcggtacagggcgagaagatcgacgaagtatttatcggttcttgcatgactaacatcggtcacttccgtgctgcgggtaaactgctggatgcgcataaaggccagttgccgacccgcctgtgggtggcaccgccaacccgtatggacgccgcacagttgactgaagaaggctactacagcgtcttcggtaagagcggggctcgtatcgagatcccgggctgttctctgtgtatgggtaaccaggcgcgtgtagcagacggtgcgacggtggtttccacctctacccgtaacttcccgaaccgtctggggactggcgcgaatgtcttcctggcttctgcagaactggcggctgttgcggcgctgattggcaaactgccgacgccggaagagtaccagacctacgttgcgcaagtagataaaactgccgttgatacttatcgttatctgaacttcaaccaactttctcagtacaccgaaaaagccgatggggtgattttccagactgcggtgtaa

SEQ ID NO: 458357 - DNA, 363 bp, Shigella boydii
atggattacgaatttctgcgcgatattaccggagtggtaaaggtgcgtatgtccatggggcatgaagtggtcgggcactggtttaatgaagaggtgaaagaaaacctggccttgcttgatgaagtggaacaagcagcgcacgcactgaaaggtagcgaacggtcctggcaacgggcagggcatgaatacaccctgtggatggacggtgaagaggtgatggttcgcgccaatcaactggaattcgctggcgatgaaatggaagaggggatgaactactacgacgaagaaagcctgtcgctatgcggcgttgaggattttctgcaggtcgtggcggcttaccgcaatttcgtgcagcagaagtaa

SEQ ID NO: 458358 - DNA, 795 bp, Shigella boydii
ttgaaaaaactgaaactgcatggctttaataatctgaccaaaagtctgagtttttgtatttacgatatctgctacgccaaaactgccgaagagcgcgacggttatattgcttatatcgatgaactctataatgccaaccgtctgaccgaaatcctgtcagaaacctgttccattatcggggccaatattcttaacatcgcccgccaggattacgaaccacagggtgccagcgtcactattctggtgagtgaagaaccggttgacccgaaactcatcgacaaaacagaacaccccggcccactgccagaaacggtcgttgcccatctcgataaaagtcatatttgcgtacatacctacccggaaagccatcctgaaggtggtttatgtaccttccgcgccgatattgaagtctctacctgcggcgtgatttctccgctgaaggcgctgaattacctgatccaccagcttgagtccgatatcgtaaccattgattatcgcgtgcgcggttttacccgcgacattaacggtatgaagcactttatcgaccatgagattaattcgattcagaactttatgtctgacgatatgaaggcgctgtatgacatggtggatgtaaacgtctatcaggaaaatatcttccataccaagatgttgcttaaagagttcgaccttaagcactacatgttccacaccaaaccggaagatttaaccgacagcgagcgccaggaaattaccgctgcgctgtggaaagaaatgcgcgagatttattacgggcgcaatatgccagctgtttaa

SEQ ID NO: 458359 - DNA, 867 bp, Shigella boydii
atggccgaaaaaaaacagtggcatgaaacgctacacgaccagtttgggcagtactttgcggtagataacgttctgtatcatgaaaagaccgatcaccaagatctgatcatttttgagaacgctgcatttggtcgcgtaatggcgctggatggcgtagtacaaaccaccgagcgcgacgagtttatctatcatgagatgatgacccatgttccgctactggcccacggtcacgcgaaacatgtgctgattatcggcggcggcgacggtgccatgctgcgtgaagtaacccgacataaaaacgttgagtcaatcacgatggtggaaatcgatgcgggtgtcgtgtcgttctgccgtcagtatctgcccaaccataacgccggtagctacgacgatccgcgctttaagctggtgatcgacgatggcgtcaatttcgttaatcaaaccagccagacctttgatgtcattatctccgactgcaccgatcctatcggtcccggcgaaagtctgttcacctcagcattttatgaaggctgcaaacgttgcctgaatcctagcggtatcttcgtcgcacaaaacggcgtctgctttttacagcaggaagaagccatcgacagccatcgcaaactcagccattacttcagcgacgttggcttttatcagacggcgatcccgacctattacggcggtatcatgacttttgcatgggcgacagataacgacgccttacgccatctctcaaccgaaattattcaggcgcgttttctcgcttctggcctgaaatgccgttattacaatccggcaatccatacggcagcttttgccttacctcagtatctgcaagatgcactggcttcacagccgtcctaa

SEQ ID NO: 458360 - DNA, 309 bp, Shigella boydii
atggccgtttgcgcaaacagttacgcgctcagcgagtctgaagccgaagatatggccgatttaacggcagtttttgtctttctgaagaacgattgtggttaccagaacttacctaacgggcaaattcgtcgcgcactggtctttttcgcccagcaaaaccagtgggatctcagtaattacgacaccttcgacatgaaagccctcggtgaagacagctaccgcgatctcagcggcattggcattcccgtcgctaaaaagtgcaaagccctggcccgcgattccttaagcctgcttgcctacgtcaaataa

SEQ ID NO: 458361 - DNA, 1551 bp, Shigella boydii
atgcaacgtcgtgatttcttaaaatattccgtcgcgctgggtgtggcttcagccttgccgctgtggagccgcgcagtctttgcggcggaacgcccaacgttaccgatccctgatttgctcacgaccgatgcccgtaatcgcattcagttaactattggcgcaggtcagtctacctttggcgagaaaactgcaactacctggggctataacggcaatctgctggggccggcggtgaaattacagcgcggcaaagcggtaacggttgatatctataaccaactgacggaagagacgacgttgcactggcacgggctggaagtaccgggtgaagtcgacggcggcccgcagggaattattccgccaggtggcaagcgctcggtgacgttgaacgttgatcaacctgccgctacttgctggttccatccacatcaacatggcaagactgggcgacaggtggcgatggggttggctgggctggtggtaattgaagatgacgagatcctgaaattaatgctgccaaaacagtggggtatcgatgatgttccggtgattgttcaggataaaaaatttaacgctgatgggcagattgattatcaactggatgtgatgaccgccgccgtgggctggtttggcgatacgctgctgaccaacggtgcaatctacccacaacacgctgccccgcgtggttggctgcgcctgcgtttgctcaatggctgtaatgcccgctcgctcaatttcgccaccagcgacaatcgcccgctgtatgtgattgccagcgacggtggtctgctacctgaaccggtgaaggtgagcgagctgccggtgctgatgggcgagcgttttgaagtgctggtggaggttaacgacaacaaaccctttgacctggtgacgctaccggtcagccagatggggatggcgattgcgccgtttgacaagccgcatccggtaatgcggattcagccgattgctattagtgcctccggtgctttgccagacacattaagtagcctgcctgcgttaccttcgctggaagggctgacggtacgcaagctgcaactttctatggacccgatgctcgatatgatgggtatgcagatgctaatggagaaatatggcgatcaggcgatggccggaatggatcacagccagatgatgggccatatggggcacggtaatatgaatcatatgaaccacggcgggaagttcgatttccaccatgccaataaaatcaacggtcaggcgtttgatatgaataagccgatgtttgcggcggcgaaagggcagtacgaacgttgggttatctctggcgtgggcgacatgatgctgcatccgttccatattcacggcacgcagttccgtatcttgtcagaaaatggcaaaccgccagcggctcatcgcgcgggctggaaagataccgttaaggtagaaggcaatgtcagtgaagtgctggtgaagtttaatcacgacgcaccgaaagaacatgcttatatggcgcactgccatctgctggagcatgaagatacggggatgatgttagggtttacggtataa

SEQ ID NO: 458362 - DNA, 2289 bp, Shigella boydii
atggcaattaacaatacaggctcgcgacgattactcgtcacgctaacagtcctttttgcagcgctttgcgggctgtatctactcattggcggaggctggctggtcgcgattggcggctcctggtactaccctatcgctggccttgtgatgctcggcgtcgcctggatgctgtggcgcagtaaacgtgccgcgctttggctatacgccgccctgctgctcggcaccatgatttggggcgtctgggaagttggtttcgacttctgggcgctgactccgcgcagcgatattctggtcttcttcggcatctggctgatcctgccgtttgtctggcgtcgcctggtcattcctgccagcggcgcagttgccgcactggtggtggcactgctgattagcggtagtatcctgacctgggccggatttaacgatccgcaggaaatcaacggcaccttaagcgccgatgccacacctgcggaagctatctcacccgttgccgatcaggactggcctgcctatggtcgcaatcaggaaggtcaacgcttttcacctctgaaacaaattaacgccgataacgtccataatctgaaagaagcctgggtgttccgtactggcgatgtgaagcagcctaacgatccgggcgaaatcaccaatgaagtgacgccgattaaagtgggcgacaccctttacctgtgtaccgctcaccagcgcctgtttgcgctcgatgccgccagcggcaaagagaaatggcattacgatcctaagctgaaaactaacgagtctttccagcacgtaacctgccgtggcgtctcttatcatgaagccaaagcagaaacggcttcgccggaagtgatggcggattgcccgcgtcgtatcattcttccggtcaatgatggtcgactgattgcgattaacgctgaaaacggcaaactgtgcgaaaccttcgccaataaaggcgtgctcaatctgcaaagcaatatgccagacaccaaaccgggtctgtatgaaccgacttcgccaccgattatcaccgataaaaccatcgtgatggcaggttcagttaccgataacttctcaacccgcgaaacgtctggcgtgatccgtggttttgatgtcaacaccggggagctgctgtgggcttttgatcccggcgcgaaagatccgaacgcaatcccgtctgacgaacacacctttacctttaactcgccaaactcctgggcaccagcggcctatgacgcgacgctggatctggtctatctgccgatgggcgtgaccacgccggatatctggggcggtaaccgcacaccggaacaggaacgttatgccagctcgattctggcgctgaatgccactaccgggaaactggcgtggagctaccagaccgttcaccacgacctgtgggacatggatcttccggcacagccgacgctggcggacatcaccgttaatggtcagaaagtgccggttatttacgctccggcgaaaaccggcaacatttttgtgctcgatcgtcgcaatggcgaactggtggttccggccccggaaaaaccggtgccgcaaggtgctgcgaaaggcgattacgttactccgacccagccgttctctgaactgagcttccgtccgaagaaagatttgagcggtgcggatatgtggggagccaccatgtttgaccaactggtgtgccgcgtgatgttccaccagatgcgctatgaaggcattttcacgccgccatctgaacagggcacgctggtcttcccgggtaacctgggaatgtttgaatggggcgggatttccgttgatccaaatcgtgaagtggcaattgccaacccaatggcactgccgtttgtttcgaaactgatcccacgcggtccgggtaacccgatggagcagccgaaagatgccaaaggcacgggtacggaatccggcattcagccacagtacggtgtaccgtatggtgtcacgctcaacccgttcctctcaccgtttggtctgccgtgtaaacagccagcatggggttatatctcggcgctggatctgaaaaccaatgaagtggtgtggaagaaacgtattggtacgccgcaggacagtatgccgatgctgggcgggccaatctccacggcgggtaacgtgctgtttatcgccgctacggcagataactacctgcgcgcttacaacatgagcaacggtgaaaaactgtggcagggtcgtttaccagcgggtggtcaggcgacgccaatgacctatgaagtgaatggtaagcagtatgtggtgatctccgcaggcggtcacggttaa

SEQ ID NO: 458363 - DNA, 537 bp, Shigella boydii
atgaaacatactgtagaagtaatgatccccgaagcggagattaaagcgcgtatcgccgaactgggtcgtcagattactgagcgttacaaagacagcggcagcgatatggtgctggtgggtctgctgcgtggctcatttatgtttatggcggacctgtgccgtgaagttcaggtatctcatgaagtcgactttatgaccgcctccagctacggtagcggcatgtccaccacccgtgatgtgaaaatcctcaaagatctggatgaagatatccgtggcaaggacgtgctgattgttgaagatatcatcgactcggggaatacactgtcgaaagtgcgtgagatcttaagcctgcgcgaaccgaagtcgctggcgatttgtacgctgctggataaaccgtcccgtcgtgaagtgaacgtcccggtagaatttatcggtttctcgatcccggatgagtttgtggtgggttacggcattgattacgcacagcgttaccgtcatctgccgtatatcggcaaagtgattctgctggacgagtaa

SEQ ID NO: 458364 - DNA, 663 bp, Shigella boydii
atgaaagacatagatacactcatcagcaacaatgcactatggtcaaaaatgctggtggaagaggatcccgggttttttgagaaactggcacaagcgcaaaaaccgcactttctatggattggatgttccgacagtcgcgttcctgcagaacgtttaaccggtcttgagccgggcgaactctttgttcaccgtaatgttgctaacctggtcattcacaccgacctgaactgcctttccgtggttcagtatgcagtggatgtactagaagttgaacacattattatctgtggccactacggttgcggcggcgtacaagccgcagttgaaaacccggaactggggcttatcaacaactggctgctgcatatccgcgatatctggttcaaacatagctcattgctcggcgaaatgccgcaagagcgccgtctggataccttgtgtgaactgaacgtcatggaacaggtgtataacctaggccactccaccattatgcaatcagcgtggaaacgcgggcagaaagttaccattcacggctgggcctatggcattcacgacggcttgctgcgtgatctggatgttactgccaccaaccgcgaaacccttgagcaacgttaccgtcacgggatttccaacctcaagctgaaacacgccaaccacaaataa

SEQ ID NO: 458365 - DNA, 927 bp, Shigella boydii
atgaccattgcactggaacttcaacagcttaaaaaaacctatctaggcggcgttcaggcgcttcgtggaatagatttgcaggtcgaagcgggtgatttttatgcgcttctcgggccgaacggggccgggaaatcgaccactatcggtattatcagctctctggtaaataaaacctccgggcgggtcagcgtatttggttacgatctcgagaaggatgtcgtgaacgctaaacgtcagttgggactggtgccgcaggaatttaacttcaacccgtttgaaaccgtgcagcaaattgtggtgaatcaggcagggtactacggcgtggagcgcaaagaagcgtacatccgcagcgaaaaatatctcaaacaactcgatttatggggaaaacgcaacgaacgtgcgcgtatgttatctggcgggatgaagcgccgtttaatgattgcccgtgcgttaatgcatgaacctaaactactgattctcgacgaaccgaccgcaggcgtggatattgaacttcgccgctcaatgtggggctttttgaaggatttaaacgacaaaggcaccaccatcattctcactacacactacctggaagaagcagaaatgctgtgccgcaatatcggcattattcaacacggtgagctggtggaaaatacctcgatgaaggcgctgctggcgaagctgaaatcggaaacctttattctcgatctcgcaccgaaaagcccgttaccgaagctcgatggctatcagtatcgactggtcgataccgcgacgctggaagttgaagtgctgcgtgagcaggggatcaacagcgtatttacgcagttaagtgagcagggcattcaggtattaagtatgcgtaacaaagctaaccgtctggaagagctgtttgtttcactggttaatgaaaaacaaggagatcgcgcatga

SEQ ID NO: 458366 - DNA, 771 bp, Shigella boydii
atgatgcatctttactgggtggcgctaaaaagcatctgggcgaaagagatccatcgctttatgcgtatctgggtgcagacgctggtgccgccagtcatcaccatgaccctttactttattatcttcggtaacctgataggttcgcgtattggcgatatgcatggcttcagctatatgcagttcatcgtaccggggctgatcatgatgtcggtgatcaccaatgcctacgctaacgtcgcgtcatcattttttggtgccaagttccagcgtaatattgaagagctgctggtagcgccggttccgactcacgtcattattgccggatatgtcggcggtggcgtggcgcgtggtctgtttgttggcattctggtgacggcaatttcactgttttttgtgccgtttcaggtgcattcgtgggtattcgttgccttaaccctggtgctcacggcggtgctattctcccttgcgggtttgctgaacggcgtgtttgccaaaacgttcgatgacatcagcctggtgccaacctttgtgttaacgccactcacgtatttgggcggggtgttttactccctgactttgttgccgccgttctggcaagggctgtcgcacctgaacccaatcgtttatatgatcagtggtttccgctacggcttcctcggtataaatgatgtgccgctggccactacctttggcgtactggtggtctttattgtggtgttttatttgatctgttggtcgctgatccaacgtggacgtggtttgcgtagctaa

SEQ ID NO: 458367 - DNA, 441 bp, Shigella boydii
atgttaggttgggtaattacctgtcacgatgaccgggcgcaagagatactggatgcgctggagaaaaaacatggggcacttcttcagtgccgggccgtgaatttctggcgcggattaagctctaatatgctcagccgcatgatgtgcgatgctctgcatgaagcggactctggtgagggtgtcatcttcttaaccgatatagccggagcgccaccgtaccgcgtggcttcattattaagccataaacactcccgttgtgaagtgatttctggtgtcacgttaccgttaattgaacagatgatggcttgccgtgaaaccatgaccagttcagagtttcgcgagcgtattgtcgaactgggtgcgccggaggtgagtagtctttggcaccaacaacaaaaaaatccgccttttgtcctcaaacataatttgtatgagtattaa

SEQ ID NO: 458368 - DNA, 375 bp, Shigella boydii
atgctgtttaccgcaagcgttagtgccgcgttacctgcccgttatatgcaaaccatcgaaaatgctgcgatctgggcgcaaattggcgacaagatggtgaccgtggggaatattcgggccgggcaaatcattgccgtggagcccactgccgcaagttattacgcatttaattttggctttggtaaagggtttatcgataaagggcatctcgagccagttcaggggcgacaaaaagttgaagacggtttgggtgacctcaacaagccgctgagtaatcagaacttaattacctggaaagatacgccggtctataacgcgccgagtgctttggggtactggcggacaatttgcgctacccgattttgcataaactga

SEQ ID NO: 458369 - DNA, 381 bp, Shigella boydii
atgattcgcacgatgctgcagggcaaactccaccgcgtgaaagtgactcatgcggacctgcactatgaaggttcttgcgccattgaccaggattttcttgacgcagccggtattctcgaaaacgaagccattgatatctggaatgtcaccaacggcaagcgtttctccacttatgccatcgcggcagaacgcggttcgagaattatttctgttaacggtgcggcggcccactgcgccagtgtcggcgatattgtcatcatcgccagcttcgttaccatgccagatgaagaagctcgcacctggcgacccaacgtcgcctattttgaaggcgacaatgaaatgaaacgtaccgcgaaagcgattccggtacaggttgcttga

SEQ ID NO: 458370 - DNA, 954 bp, Shigella boydii
atggcacgccttgactggatactgccttcacgcaagacaacacggaaggcagggaagatggatgcaccgagtaccacaccgcatgatgcagtgtttaaacaatttttaatgcacgcggagacggctcgcgactttctggagatacatttgccagtggaattacgagaactttgtgacctcaacacgcttcatttagagtcggggagtttcattgaagagagcctgaaaggacacagcacggacgtgctctattccgtgcaaatgcagggcaatcccggttatctgcatgttgtgattgaacaccaaagcaagccggataagaaaatggcctttcgcatgatgcgttattctattgctgccatgcaccggcatctggaggcggatcacgataagctgccgctggtggtgccgatactgttttatcagggcgaggccacaccttatccgctctcaatgtgctggtttgatatattttactcgccggagctggcacgacgcgtctataacagtcctttcccgctggtggatatcaccatcacaccggatgacgaaatcatgcaacatcggcggattgcgattctcgaactactgcaaaaacatattcgccagcgcgacttaatgttattgctggagcaactggtcacgctgattgacgaagggtacactagcggaagtcagttagttgccatgcaaaactatatgctgcaacgcggtcatactgaacaagcggatttgttttatggtgtgctgagagacagggaaacgggaggggagtctatgatgacgctggcgcagtggtttgaagagaaagggattgagaaggggattcagcagggaagacaggaggaaaggcaagaattcgcccagcgttttctgagtaaagggatgtctcgggaagacgttgcagagatgacaaatttatctcttgctgagattgataggctgattaactaa

SEQ ID NO: 458371 - DNA, 852 bp, Shigella boydii
gtgttaattatcgaaaccctgccgctgctgcgtcagcaaattcgccgcctgcgtatggaaggcaagcgcgtggcgctggtgcctactatgggtaatctgcacgatggccatatgaagctggtcgacgaagccaaagcccgcgccgatgtggtcgtcgtcagtattttcgttaacccgatgcagttcgaccgcccggaagatctggcacgttatccacggaccttgcaggaggactgcgagaagctaaacaaacgtaaagtggatttagttttcgccccttcggtaaaagagatctacccgaacggtactgaaacccatacttacgttgacgttcccgggctttcgaccatgctggaaggcgcgagccgtccggggcattttcgcggcgtttcgactatcgtcagcaagctgtttaacctggtccagccggacatcgcctgcttcggtgaaaaggactttcagcaactggcgctaatccgcaaaatggttgccgatatgggcttcgatattgaaattgtcggcgtcccgattatgcgcgccaaagatggccttgcgctcagttcccgtaatggttatctgacggcggaacaacgcaaaattgcgcccggtctgtacaaagttttaagttcaattgccgacaaattgcaggctggcgagcgggatcttgatgaaattattgccattgcagggcaagaactgaatgaaaaaggcttccgcgccgatgatattcagattcgcgatgccgacacgttgctggaagtctctgaaaccagcaaacgagctgtaattctggtagccgcctggcttggcgatgcccgcctgatcgacaacaaaatcgtcgaactggcgtaa

SEQ ID NO: 458372 - DNA, 795 bp, Shigella boydii
atgaaaccgaccaccattgcttcacttcagaaatgtaagcaggataaaaagcgtttcgcgaccatcaccgcttacgactacagcttcgcgaaactatttgctgatgaaggacttaacgtcatgctggtaggcgactcgctgggcatgacggttcagggtcacgactccaccctgccggtgaccgttgccgatatcgcctaccacactgcctccgtacgtcgtggtgcgccaaactgcctgctgttggctgacctgccgtttatggcgtatgccacgccggaacaagcctttgaaaacgccgcaacggttatgcgtgccggtgccaatatggtcaaaattgagggcggtgagtggctggtcgaaaccgtaaaaatgctgaccgaacgtgccgttcctgtatgtggtcacttaggtttaaccccacagtcagtgaatattttcggtggctacaaagttcaggggcgcggcgatgaagcgggcgatcaactgctcagcgatgcattagccttagaagccgctggggcacagctgctggtgctggaatgcgtgccggttgaactggcaaaacgtattaccgaagcactggcgatcccggttattggcattggcgcaggcaacgtcactgacgggcagatcctcgtgatgcacgacgccttcggcattaccggcggtcacattcctaaattcgctaaaaatttcctcgccgaaacgggcgacatccgcgcggctgtgcggcagtatatggctgaagtggagtccggcgtttatccgggcgaagaacacagtttccattaa

SEQ ID NO: 458373 - DNA, 426 bp, Shigella boydii
ttgttgaccacttcacatattcacgatcagagcgaacgacgctttgtggtggaatgtgacggcgaaaaagccggtctggtggagctggtggaaattaaccatgtacatcgccgggcagaatttcagataattatctccccggagtatcaggggaaaggtctggcaacccgtgccgccaaattagcaatggactatggcttcaccgttctcaatctctataagctgtatctgatcgtcgataaagagaatgaaaaagcgattcacatttaccgcaagcttggctttacggttgaaggtgaattgatgcatgagttttttattaatggtcaatatcgtaatgccattcgcatgtgtatattccagcatcagtatctggcagagcacaaaacaccaggtcagactctcctgaagccgaccgcacaatag

SEQ ID NO: 458374 - DNA, 747 bp, Shigella boydii
atgattgagaatcatctctactctctggtgactgttgtgaaatacaaattactaccatgcttactcgcgatattcctcacaggatgtgaccgcacagaggtaacactttcatttacccctgagatggccagtttctctaatgaattcgattttgatccgctgcgtggtccggtaaaagatttcactcagacattaatggatgagcaaggtgaagtgacgaaacgtgtttctgggactttgtcggaagaaggctgttttgattcactcgaattactggatctggaaaataataccgtggtcgctctggtactggacgccaattattaccgtgatgccgagacgctggagaagagagtacgtttacagggaaaatgccagctagcagaattaccttctgccggggtgagttgggaaaccgatgataatggcttcgtgattaaagccagcagcaaacaaatgcagatggaatatcgctatgatgatcagggttatccactgggtaaaaccacgaaaagtaacgacaaaacattatctgtcagcgccacgccatcaacggacccgatcaaaaaattagattacacagcggttactttactgaataatcaacgagttggtaatgtaaaacagagctgtgaatatgacagtcacgccaatccggtggactgtcagctgatcattgttgatgaaggagtaaaacccgccgtcgaacgggtttacaccatcaaaaatacgatcgattattattaa

SEQ ID NO: 458375 - DNA, 306 bp, Shigella boydii
atgaaactctcaacctgctgtgccgcgcttctgctcgccctcgcctcacccgcggtactcgccgcgccgggatcctgtgagcgcatacagagcgatatatcacagcgcattatcaataatggcgtacccgaaagcagcttcacattaagtattgtacccaatgaccaggttgatcagcctgattcccaggtcgtcgggcattgtgctaatgatacgcataaaattctctacacccgtaccaccagcgctaacgtctctgctcccgcgcagtctacccaggatggcgcgcctgccgaaccgcagtaa

SEQ ID NO: 458376 - DNA, 2427 bp, Shigella boydii
atgtccaaaaatgaccgaatggtgggcatcagccgcagaacactcgttaaatcaaccgcgataggttctctggcgctggctgcaggcggtttttctttaccgttcaccctgcgcagtgcagcggcaacggtacaacaggccagcgaaaaagtgatctggggtgcctgttccgtcaactgtggtagccgctgtgcacttcgtctacatgttaaagataatgaagtgacctgggtggaaactgacaataccggcagcgatgagtacggcaaccatcaggtacgcgcctgtttgcgcggtcgctccatccgccggcgtattaatcatcccgatcgcttgaattacccaatgaaacgcgtgggtaaacgcggtgaaggcaaattcgaacggattagctgggatgaagccctggatactatcgccagtagcctgaaaaaaaccgtcgaacaatatggcaatgaggctgtatatattcagtactcttcggggattgttggcggcaatatgacccgctcttcgccatcagcctcggcggtcaaacgcctgatgaactgctacggctgttcactcaatcagtatggctcctacagcaccgagcaaatttcctgtgccatgccctacacctacggcagtaatgatggcaacagcaccacggatattgaaaacagcaagctggtcgtgatgtttggtaacaacccggcagaaacccgcatgagcggcggtggcatcacttatcttcttgaaaaagcgcgcgagaaatcgaacgccaaaatgattgttatcgatccgcgatataccgatacggctgctggtcgtgaagatgaatggcttcctattcgcccgggcaccgatgccgcgctggttgcgggtattgcctgggtattgattaacgaaaatctcgttgatcaaccttttctcgataaatactgcgtcggctatgacgaaaaaaccttacccgcagatgcaccaaaaaatggtcactataaagcctatattcttggtgaaggtgatgataatacagcgaaaacgccgcagtgggcttcgcaaattaccggtatcccggtggaccgtatcatcaaactggcgcgtgaaattggcacagcaaaacccgcttatatctgccagggctgggggccgcaacgccaggcaaacggcgaactgactgcacgcgctattgctatgttgcctattttgacgggcaatgtcggcatcagcggcggaaatagtggcgcgcgtgaatcgacctataccattaccatagaacgcctgccggtgctggataatccggtcaaaacgtcaatctcctgcttcagctggacagatgctatcgatcatggtccgcaaatgacggcaatccgcgacggcgtccgcggcaaagataaactggatgtgcccattaagttcatctggaactacgcgggaaataccctcgttaatcagcattctgacatcaacaaaacgcatgaaattctgcaggacgaatcgaaatgcgaaatgattgtggtcatcgaaaactttatgacctcatcggcaaaatatgccgacattctgctgccagacctgatgaccgttgagcaggaagatattattcctaacgactacgccggtaacatgggatatctcattttcctccagcctgtcaccagcgaaaaattcgaacgcaaaccgatttactggatcctgagtgaagtcgcgaaacgtcttggacctgacgtctatcaaaagttcacagaaggtcgcacgcaggaacaatggttacaacatctgtacgccaaaatgcttgccaaagatccggcgttaccgtcttacgacgaactgaaaaaaatgggtatctataagcgtaaagatcccaatggccattttgtcgcctacaaagcatttcgtgacgaccccgaggcaaatccacttaaaacgccttccggtaagattgaaatttattccagcaggctggcggaaattgcccgtacctgggaactggaaaaagatgaagtgataagcccattgccagtttatgcctcaacctttgaaggctggaactcccctgaacgtagaaccttcccactgcaactgtttggtttccattacaaatcccgtactcactcgacctacggcaatattgatctcctgaaggctgcctgccgtcaggaggtgtggatcaaccctatagatgcgcagaaacgtgggattgccaacggcgatatggtgcgggtgtttaaccatcgtggcgaagttcggctaccagccaaagtaacaccacgtattctccctggagttagcgctatgggccagggagcctggcacgaggccaatatgtctggcgataaaatcgaccatggcggctgtgtgaatacgctaaccactctgcgcccttcaccactggcgaagggaaacccgcagcacactaatctggtcgagatcgaaaaaatataa

SEQ ID NO: 458377 - DNA, 2232 bp, Shigella boydii
atgaaggctgaaatcagccgtagaagtctggcacttggcagtcttgcgctggcaagcagtgctttcattctgccattttcccaaatggtccgggcggcagaggctccggtagaagagaaagcggtctggagttcctgcaccgttaactgcgggagccgctgtctgttacgtttgcatgtgaaagatgacaccgtgtactgggtggagtctgatacgacaggtgacgacgtctacggtaatcatcaggttcgagcgtgtttacgcgggcgctctatccgccgacggatgaatcatcctgataggttgaaatatcccatgaagcgcgtcggcaagtgcggtgaaggtaaatttgaacggataagttgggacgaagccctggataccatcagtgataatcttcggcggatcctgaaagattacggcaatgaggctgtacatgtcctgtacggaacaggcgtagatggcggaaacatcaccaactcaaacgtcccgtaccgtctgatgaactcttgcggtggttttctcagtcgctatggcagctacagtactgcacagatcagtgccgcaatgagttatatgttcggtgccaatgatggcaacagcccggatgatatcgccaatacgaaactggtcgttatgttcggaaataacccggcagaaacgcggatgagcggcggtggtgtcacttactacgtcgagcaagcccgcgaacgttcaaacgcacgcatgatcgtcatcgatccacgttataacgacactgctgccgggcgtgaagatgaatggctgcccattcgccctggcaccgatggcgcactggcctgtgcgattgcctgggtactgattactgaaaacatggtcgatcagccatttctcgacaaatattgtgttggttacgatgaaaaaacgctgcccgccaacgcaccacgtaacgcgcattataaagcctatattctgggcgaagggcctgacggcatagctaaaacgccggaatgggcagcaaaaatcaccagcatcccggcagaaaaaattatccagttggcgcgagagatcggttcagcaaaacctgcttatatttgtcagggttgggggccacaacgacattccaacggcgagcaaacgtcccgcgctattgccatgctttccgttctcaccggtaacgttggcataaacggcggcaactcaggtgtacgcgaaggtagctgggatctgggggtagaatggttcccgatgcttgagaatcctgttaaaacgcagatttccgtctttacatggacagatgccatcgaccatggtacggaaatgaccgcgacccgtgatggtgttcgtggaaaagaaaaactggatgtccccatcaagtttttatggtgctacgccagtaacacattgatcaatcaacatggcgacatcaatcacacccatgaggtgcttcaggatgacagcaagtgcgagatgattgttggcattgaccacttcatgacggcctcggctaagtattacgatatcctgttgcccgacctgatgccaacagagcaagaagaccttatctctcatgaatctgcagggaatatgggctatgtgatcctcgcccaacccgcaacctcagcaaaatttgaacgcaaacccatctactggatgctgagtgaagtcgccaaacgcttaggaccagacgtttatcaaacctttactgaaggtcgcagtcagcatgaatggatcaaatatctccatgcgaaaacgaaggaacgtaaccctgagatgcccgactacgaggagatgaaaacgaccgggatctttaagaaaaaatgcccggaagaacactacgtcgctttccgcgcattccgtgaagatccacaggcaaacccgttgaaaacaccttcggggaaaatcgaaatttattctgaacgactggcgaagattgcagatacctgggaattgaaaaaagatgaaattattcatccccttcctgcgtataccccaggttttgatggctgggacgatcccctgcggaaaacctatccactgcagttaacgggcttccactacaaagcgcgtacccactccagctacggcaatattgatgtgttacagcaggcctgcccacaagaggtgtggatcaaccccattgatgctcaggcacgcggtatccgtcatggcgataccgtgcgggtatttaacaataatggagaaatgctgattgccgcaaaagtgactccgcgtattctgccaagattttaa

SEQ ID NO: 458378 - DNA, 369 bp, Shigella boydii
atgcataagcgtgaagatggctttgtggtggttgatgaagatgtttgtatcggctgccgctactgccacatggcttgtccgtacggtgcaccacagtacaatgctgaaaaagggcacatgacgaattgcgatggttgttattcgcgcgtcgccgaggggaaacaacccatatgcatcgaatcctgcccgctgcgtgcacttgagttcggtccaattgaagagctgcgccagaagcacggcactctggctgccgtcgcgccactgccgcgcgcgcatttcacaaaacccaatatcgttatcaaacctaacgccaacagccgcccgaccggcgataccactggttatctggctaatccggaggaagtgtaa

SEQ ID NO: 458379 - DNA, 855 bp, Shigella boydii
atgggaaatggatggcatgaatggccactggttatctttaccgtattgggtcaatgcgtagtaggcgcgctgattgttagcggaattggctggttcgccgccaaaaatgacgcagaccgtcagcgtattgtccgtggcatgtttttcctctggctgttgatgggcatcgggtttattgcctctgtcatgcacctgggatcgccactgcgagcgtttaactcgctgaatcgaatcggagcttctggtctgagtaacgagattgctgccggttccatattttttgccgttggtggactatggtggctggtggcggtcatcggtaaaatgccgcaagcgttggggaaactctggttacttgtcagcatggcgctcggcgtcattttcgtctggatgatgacctgcgtgtatcaaatcgacaccgtgccaacctggcataacggttacactacgctggctttcttcctgacggtattgttgagcgatccaatacttgctgccgcaattctgcgggcagctcgcgttacatttaataccacaccatttgccatcattagcgttctggcgctgatcgcttgtgccggggtgattgtgctgcaaggtttgtctctggcgtctattcactcatccgtgcaacaagccagcgcactggtaccagattacgcctccttacaggtctggcgtgtggtattgttatgcgcaagtcttggatgctggctttgcccgctcattcgtcgccgtgaacctcacgttgccggacttattctggggctaatcctcatacttggcggtgagatgatcgggcgtgtgctcttttatggcctgcacatgacagtaggaatggctattgcaggttaa

SEQ ID NO: 458380 - DNA, 198 bp, Shigella boydii
atgacccatttttcacagcaagataatttttctgtcgcggcgcgcgtgttgggcgcgctgttttattacgctccagagagtgcggaagccgcacctctggttgcggtactcaccagtgacggctgggaaactcagtggcctctaccagaagcgtcattagcgccgctggtgacggcttgtttttccctgggaggctaa

SEQ ID NO: 458381 - DNA, 1221 bp, Shigella boydii
gtggttgctgaaaaccagcctgggcacattgatcaaataaagcagaccaacgcgggcgcggtttatcgcctgattgatcagcttggtccagtctcgcgtatcgatctttcccgtctggcgcagctggctcctgccagtatcactaaaattgtccgtgagatgctcgaagcacacttggtgcaagagctggaaatcaaagaagcggggaaccgtggccgtccggcggtggggctggtggttgaaactgaagcctggcactatctttctctgcgcattagtcgcggggagattttccttgctctgcgcgatctgagcagcaaactggtggtggaagagtcgcaggaactggcgttaaaagatgacttgccattgctggatcgtatcatttcccatatcgatcagttttttatccgccaccagaaaaaacttgagcgtctaacttcgattgccataaccctgccgggaattattgatacggaaaatggtattgtacatcgcatgccgttctacgaggatgtaaaagagatgccgctcggcgaggcgctggagcagcataccggcgtaccggtttatattcagcatgatatcagcgcatggacgatggcagaggccttgtttggtgcctcacgcggggcgcgcgatgtgattcaggtggttatcgatcacaacgtgggggcgggcgtcattaccgatggtcatctgctacacgcaggcagcagtagtctcgtggaaataggccacacacaggtcgacccatatggtaaacgctgttattgcgggaaccacggctgcctcgaaaccatcgccagtgtggacagtattcttgagctggcacagctgcgtctcaatcaatccatgagctcgatgttacatgggcaaccgttaaccgtggactcattgtgtcaggcggcattgcgcggcgatctactggcaaaagacatcattaccggggtgggcgcgcatgtcgggcgcattcttgccatcatggtgaatttatttaacccacaaaaaatactgattggctcaccgttaagtaaagcggcagatatcctcttccctgtcatctcggacagcatacgtcagcaggcccttcctacgtatagtcagcacattagcgttgagagtactcagttttctaaccagggcacgatggcaggcgctgcgctggtaaaagacgcgatgtataacggttctttgttgattcgtctgttgcagggttaa

SEQ ID NO: 458382 - DNA, 894 bp, Shigella boydii
atgaatattgaacttcgtcatctgcgttactttgttgctgttgcggaagagctgcatttcgggcgcgccgctgcccgcctgaatatttcgcaaccaccgctaagtcagcagattcaggcactggagcaacaaattggtgcccgactgctggcacgaactaatcgcagtgtattgctgacggcagcaggaaaacagtttcttgcagatagtcggcaaatcctgtctatggtagatgacgctgccgctcgcgctgaaagactgcatcagggtgaagcgggggagttgcgcattggttttacttcgtccgctccttttattcgggcggtgtccgatacgttatcgctgtttcgccgtgattatcccggtgtccatttacaaacccgcgaaatgaacactcgtgagcaaatcgctccgctcattgaaggaacgctggatatgggattgctgcgtaacacagcgttaccggagacgcttgaacacgcagtcatcgtccatgaaccgcttatggcgatgatcccgcacgatcatcccctggcaaataacccgaatgtaacgttggctgaactggcgaaagaacccttcgtcttttttgatccgcacgtcgggacagggctgtatgacgatattctcgggctgatgcgacgttaccatttgacgcccgtcatcactcaggaggtgggcgaggcaatgaccatcatcggtctggtttccgccggtctgggtgtttcaattttgcctgcttcatttaaacgtgttcagctcaacgaaatgcgctgggtgccgattgctgaagaggatgcggtttctgaaatgtggttggtctggccgaaacatcatgaacaaagtccagcttcgcgtaactttcgtattcatctgctgaatgctctcaggtga

SEQ ID NO: 458383 - DNA, 360 bp, Shigella boydii
gtgagccgtactacaactgttgatggcgctccggcaagcgacactgacaagcaaagcatttctcagccaaatcaatttattaaacgcggtacgccgcaatttatgcgcgtcaccctggcgctgttctctgccggactggcaacctttgcactcctctattgtgtgcagcctatccttccggtgctttcgcaggagtttggcttaacccccgcgaacagtagtatttcactgtccatttccacggcgatgttggctattggtttgctgtttactggccccctatccgatgccattggtcgcaaaccagtgatggtcacggcgctactgttggcctccatttgtacgttatttcgacaatga

SEQ ID NO: 458384 - DNA, 897 bp, Shigella boydii
atgatgaccagctggcacggcattttgattatgcgcgccttgattgggctttcgttaagtggcgtggcagctgttggcatgacttatcttagcgaggaaatccaccccagtttcgtggccttttcgatggggttgtatatcagcggcaactcaattggcggcatgagcggacgcttaattagtggtgtcttcacggactttttcaactggcgaattgctctggcggcaatcggttgtttcgcgctagcctcggcgttgatgttctggaaaatccttccggaatcacgccattttcgcccgacttcgctgcgacctaagacgttgtttatcaactttcgtctgcactggcgtgaccggggattaccgttattgttcgcagaaggctttttgctgatggggtcgttcgtcacgctgtttaattacatcggctatcggttgatgctttccccctggcatgtcagtcaggccgtggttggcttattatcgctggcttatttgaccggtacacggagctcacccaaagccggaaccatgaccacccgctacgggcgcggtccggtgatgttgttttcgacgggggttatgctgtttggtttactgatgaccttattcagctcgctgtggctgatctttgccggaatgttactcttctcagcaggattcttcgcagcccactcagttgccagcagctggatcggcccccgcgcaaaacgcgctaaaggccaggcctcctcgctgtatctgttcagttactatctggggtcgagtattgccgggacgctgggtggtgttttctggcataactatggctggaacggcgtcggcgcatttattgctctgatgctggtcattgctctgctggtcaggacgcgtttgcatcgtcgtctgcacgcctga

SEQ ID NO: 458385 - DNA, 288 bp, Shigella boydii
atgaaaaaagtattagctctggttgttgccgctgctatgggtctgtcttctgccgcctttgctgcagagactgcgacgaccaccaaagcagcgccggcgaaaacgacacatcataaaaaacagcataaagcagcacctgcccagaaagcgcaggcagctaaaaagcatcataaaaatacgaaagctgaacagaaagcccctgaacaaaaagcgcaggcagcgaagaaacacgccgggaaacacagtcatcagcaaccggcaaaacctgctgcacaacccgcagcgtaa

SEQ ID NO: 458386 - DNA, 822 bp, Shigella boydii
atgcgtacaaccattgctgtagtgttgggtgcaattagtttgacgtctgcttttgtgtttgcagataaaccagacgttgccaaatcggcaaacgatgaggtcagcaccctgttttttggtcatgatgatcgtgtgccagtgaatgacacggcccaatcaccgtgggatgcggttgggcaactggaaacggccagcggcaatttatgtacggcgacgctgattgcacccaatctggcattaacggcaggacactgtttattgacacctccaaagggtaaagccgataaagcagtggcgctgcgttttgtgtcaaataaaggtctttggcgctatgagatccacgacatagaaggccgcgttgatccgacactgggaaagcggttaaaagcagatggggatggttggattgtacctcccgcagccgcgccgtgggacttcggattgattgtgctacgtaatcccccttctggcattacaccgttgccgttatttgagggagataaagccgcgcttactgccgcattaaaatcggctggccgtaaagtaactcaggcgggataccctgaagatcatctcgatacgttgtacagtcatcaaaactgtgaagtgactggctgggcgcaaacgtcggtgatgtcacatcagtgcgataccttgccgggtgacagcggttcgcctctgatgttgcataccaatgacggctggcaattaattggggtgcaaagttcggctcctgccgcgaaagatcgctggcgcgccgataaccgggccatttctgttaccggttttcgcgacaagctggatcaactgtcgcaaaaataa

SEQ ID NO: 458387 - DNA, 330 bp, Shigella boydii; identical to SEQ ID NO: 261370

SEQ ID NO: 458388 - DNA, 366 bp, Shigella boydii
atgtatatttattggattttattaggcctggctattgctacagaaattaccggtacgctgtcaatgaaatgggcgagcgtcagtgagggaaatggcggctttattttaatgctggtgatgatttctctgtcgtatatatttctctctttcgccgttaaaaagatcgccttaggcgtagcttatgcgctgtgggaaggtatcggtattttatttattaccttgtttagcgttttgttattcgacgaaagtttatcgctgatgaaaattgccgggttaaccaccctggtcgccgggattgtgttgataaaatcaggtacccgtaaagcgcgtaaacctgaactggaggtgaaccatggcgcagtttga

SEQ ID NO: 458389 - DNA, 1035 bp, Shigella boydii
atggcaaagccgatcatcacgctcaatggcctaaaaatcgtcattatgttgggaatgctggtcattattctctgcggtatccgttttgccgccgagatcatcgtgccgtttattctcgcattatttattgctgttattcttaacccgctggtgcaacacatggtccgctggcgagtgccgcgtgtactggcggtgtcgattttgatgaccatcatcgtgatggcgatggtgttgctattagcttatctgggttccgcgctcaacgagttgacgcggacgttaccgcaatatcgcaactctattatgacgccgctgcaagctcttgagccgttgttgcaacgcgtagggattgacgtctcagttgaccagctggcgcattacattgatccgaacgcagcgatgacgttgctcaccaacttattgacgcagttatctaatgccatgtcatcaatatttttattgctgctgacggtgctgtttatgctgctcgaagtgccacaattgcccggaaaatttcagcaaatgatggcgcgtccggttgaagggatggcggcgattcaacgtgcaattgacagtgtttctcattatctggtgctgaaaacagccatcagcatcatcaccggcctggtcgcctgggcgatgctcgccgcactcgatgttcgcttcgcttttgtctggggattgctggcctttgcgcttaattacatccctaatattggttcagttctcgcggcaatcccccctatcgctcaggtactggtgtttaatggcttctacgaagcgttgctggtgctggcgggatatctgctgattaatctggtcttcggcaatattctggagccgcgcatcatgggacgtgggctggggctttccacattggtggtatttttgtcgttgattttttggggatggttgttaggaccggtgggtatgctgctttccgtgccgttaacaattattgtcaaaattgcgcttgaacaaacagcgggaggtcaaagcatcgccgttctgttaagcgatctcaataaagagtga

SEQ ID NO: 458390 - DNA, 1389 bp, Shigella boydii
atgtctggaggattagttacagctgcatacattgttgccgcgatcctgtttatcttcagtctggccggtctttcgaaacatgaaacgtctcgccagggtaacaacttcggtatcgcagggatggcgattgcgttaatcgcaaccatttttggaccggatacgggtaatgttggctggatcttgctggcgatggtcattggaggggcaattggtatccgtctggcgaagaaagttgaaatgaccgaaatgccagaactggtggcgatcctgcacagcttcgtgggtctggcggcagtgctggttggctttaacagctatctgcatcatgacgcgggaatggcaccgattctggtcaatattcacctgacggaagtgttcctcggtatcttcatcggggcggtaacgttcacgggttcggtggtggcgttcggcaaactgtgtggcaagatttcgtctaaaccgttgatgctgccaaaccgtcacaaaatgaacctggcggctctggtcgtttccttcctgctgctgattgtatttgttcgcacggacagcgtcggcctgcaagtgctggcattgctaataatgaccgccattgcgctggtattcggctggcatttagtcgcctccatcggtggtgcagatatgccagtggtggtgtcgatgctgaactcgtactccggctgggcggctgcggctgcgggctttatgctcagcaacgacctgctgattgtgaccggtgcgctggtcggttcttcgggggctatcctttcttacattatgtgtaaggcgatgaaccgttcctttatcagcgttattgcgggtggtttcggcaccgacggctcttctactggcgatgatcaggaagtgggcgagcaccgcgaaatcaccgcagaagagacagcggaactgctgaaaaactcccattcagtgatcattactccggggtacggcatggcagtcgcgcaggcgcaatatcctgtcgctgaaattaccgagaaactgcgcgctcgtggtatcaacgtgcgtttcggtatccacccggttgcggggcgtttgcctggacatatgaacgtattgctggctgaagcaaaagtaccgtatgacatcgtgctggaaatggacgagatcaacgatgactttgctgataccgataccgtactggtgattggtgctaacgatacggttaacccggcggcgcaggatgatccgaaaagtcctattgctggtatgcctgtgctggaagtgtggaaagcgcagaacgtgattgtctttaaacgttcgatgaacactggctatgctggtgtgcaaaacccgctgttcttcaaggaaaacacccacatgctgtttggtgacgccaaagccagcgtggatgcaatcctgaaagctctgtaa

SEQ ID NO: 458391 - DNA, 1533 bp, Shigella boydii
atgcgaattggcataccaagagaacggttaaccaatgaaacccgtgttgcagcaacgccaaaaacagtggaacagctgctgaaactgggttttaccgtcgcggtagagagcggcgcgggtcaactggcaagttttgacgataaagcgtttgtgcaagcgggcgctgaaattgtagaagggaatagcgtctggcagtcagagatcattctgaaggtcaatgcgccgttagatgatgaaattgcgttactgaatcctgggacaacgctggtgagttttatctggcctgcgcagaatccggaattaatgcaaaaacttgcggaacgtaacgtgaccgtgatggcgatggattctgtgccgcgtatctcacgcgcacaatcgctggacgcactaagctcgatggcgaacatcgccggttatcgcgccattgttgaagcggcacatgaatttgggcgcttctttaccgggcaaattactgcggccgggaaagtgccaccggcaaaagtgatggtgattggtgcgggtgttgcaggtctggccgccattggcgcagcaaacagtctcggcgcgattgtgcgtgcattcgacacccgtccggaagtgaaagaacaagttcaaagtatgggcgcggaattcctcgagctggattttaaagaggaagcgggcagcggcgatggctatgccaaagtgatgtcggacgcgttcattaaagcggaaatggaactctttgccgcccaggcaaaagaggtcgatatcattgtcaccaccgcgcttattccaggcaaaccagcgccgaagctaattacccgtgaaatggttgactccatgaagacgggcagtgtgattgtcgacctggcagcccaaaacggtggcaactgtgaatacaccgtgccgggtgaaatcttcactacggaaaatggtgtcaaagtgattggttataccgatcttccgggccgtctgccgacgcaatcctcgcagctttacggtactaacctcgttaatctgctgaaactgttgtgcaaagagaaagacggcaatatcactgttgattttgatgatgtggtgattcgccgcgtgaccgtgatccgtgcgggcgaaattacctggccggcaccgccgattcaggtatcagctcagccgcaggcggcacaaaaagcggcaccggaagtgaaaactgaggaaaaatgtgcctgctcaccgtggcgtaaatacgcgttgatggcgctggcaatcatccttttcggttggctggcaagcgttgcgccgaaagagtttcttgggcacttcaccgttttcgcgctggcctgcgttgtcggttattacgtggtgtggaatgtatcgcacgcgctgcatacaccgttgatgtcggtcaccaacgcgatttcagggattattgttgtcggagcactgttgcagattggccagggcggctgggttagcttccttagttttatcgcggtgcttatagccagcattaatattttcggtggcttcaccgtgactcagcgcatgctgaaaatgttccgcaaaaattaa

SEQ ID NO: 458392 - DNA, 945 bp, Shigella boydii
atgaagcttaagaacaccctcctggcgtcggcactgctttctgctacggcattctccgttaacgcagcaacagaactgacaccggagcaagcggcagcggttaaaccttttgaccgtgtagtggttaccggtcgttttaatgctattggcgaagcggtgaaagccgtttctcgtcgcgcagataaagaaggtgccgcctctttttatgttgtcgacacttctgattttggtaacagcggtaactggcgtgtggtcgctgacctctataaagccgatgctgaaaaagcagaagaaacaagtaatcgcgtaattaacggtgttgtcgaactgccgaaagatcaggctgttctgattgaaccgtttgacacggtcaccgtccagggcttctatcgtagccagccagaagtcaatgatgccatcaccaaagcggcaaaagcgaaaggtgcctactctttctacatcgttcgtcaaatcgatgccaaccagggcggcaaccagcgtattactgcattcatctataaaaaagatgctaagaaacgtatcgtccagagcccggatgtgatcccggcagattccgaagcaggacgtgcagctctggctgccggtggcgaagccgcgaagaaagttgagatcccaggtgttgcgactaccgcatcaccaagttctgaagtcggtcgtttctttgaaacccagtcatcaaaaggcgggcgttacaccgtcacgctcccggatggcactaaagtcgaagaactgaacaaagcgaccgcagcgatgatggtcccgttcgatagcatcaaattctctggcaactacggcaacatgaccgaagtctcctatcaggttgcgaaacgtgccgcgaagaaaggtgctaagtattaccacatcacccgccagtggcaggaacgtggtaataacctgaccgtcagcgcagatctgtataaataa

SEQ ID NO: 458393 - DNA, 1383 bp, Shigella boydii
atggaaaagaaactgggactgagcgcactcaccgcgctggtattaagctcaatgctgggcgcgggtgttttcagtctgccgcaaaatatggcggcagttgccagcccggcagcactgctcatcggctggggtattactggcgctggcattttattgctggcctttgccatgctgatcctcacgcgcattcgtcccgaacttgacggcggtatctttacctatgcccgcgaagggtttggcgagctaatcggcttttgttccgcatggggatactggctgtgcgcagtcatcgccaacgtctcctatctggtgatcgttttttccgcgttaagcttttttacggacacgccggaattgcgcctgttcggcgatggtaatacctggcaatcgatcgtcggtgcatcggctttattgtggattgttcactttttgatcctgcgcggggtgcaaaccgctgccagcattaacctggtggcgacactggcaaaattgttgccgctgggtctgtttgttgtgctggcgatgatgatgttcaaactggataccttcaagctcgacttcaccggacttgtacttggcgtacccgtttgggaacaggtgaaaaacaccatgctgatcaccctgtgggttttcattggtgtggaaggtgccgtggttgtttctgcgcgtgcgcgtaataaacgtgatgttggcaaagcgacactgctggcggttctctccgctctgggcgtttacttgctggtaacgctgctttcgctgggtgtggtggcacgtcctgaactggctgaaattcgtaacccgtcaatggccggtctgatggtggaaatgatgggaccatggggcgaaatcatcatcgctgccagtttgatcgtttccgtttgcggcgcgtacttaagctggaccatcatggcggcagaagttccgttcctggctgccactcataaagcattcccacgcatttttgcgcgccagaacgcacaagctgcgccatccgcctcactgtggttgaccaacatctgcgtgcaaatttgtctggtactcatctggctgaccggttccgattacaacacgttgctgaccatcgcctcagaaatgattctggtgccctatttcctggtcggcgcgttcttgctgaaaatcgcaacccgtccactgcataaagcggtaggtgtcggtgcctgcatttatggcttatggttattgtacgcctctggtccaatgcacttgctgttatccgttgttctgtatgcgccggggctgctggttttcctgtatgcgcgcaaaacgcatacacatgataatgtactgaaccgtcaggaaatggtgctgattggcatgctgttaattgcctcagttccggcgacctggatgctggtgggataa

SEQ ID NO: 458394 - DNA, 723 bp, Shigella boydii
atgggtaaagcccagcccttgccaatattaattactggcggaggtcgtcgcatcggcctcgccctcgcctggcatttcattaatcaaaagcaaccggtgattgtcagctatcggacgcactatccagccattgatggactgattaaggcaggtgcgcagtgtattcaggctgatttttcgaccaacgacggtgtgatggcgtttgccgatgaagtactaaaaagcacccatggtctgcgtgctattttgcataacgccagtgcgtggatggcggaaaaaccgggtgcgccactggccgacgtactggcttgcatgatgcagatccacgttaataccccatacctgctcaaccatgcgctggaaagattactgcgtgggcacggacacgccgccagcgatatcattcactttaccgattatgtggtggagcgcggtagcgacaagcatattgcgtatgctgcaagcaaagcggcactggataatatgacccgctcgtttgcccgcaagctggcaccggaagtgaaagtgaattctattgctccatcgctgatcctgtttaatgaacatgatgatgccgaatatcgacaacaggcgctgaataaatcactgatgaaaaccgcgcctggcgagaaagaagtgatcgacctggtcgattacttacttaccagttgctttgtcaccggacgcagtttcccacttgatggcggtcgtcatctgcgttaa

SEQ ID NO: 458395 - DNA, 336 bp, Shigella boydii
atggggctggtaatcaaagccgcgctcggtgcgctggtagtgctgttgattggtgttttagcaaaaacgaaaaattattatatcgccgggctgattccacttttcccgacctttgcgcttatcgcgcattatattgttgccagcgaacgcggcattgaagccttacgcgcaaccatcatttttagtatgtggtcgattattccctattttgtttacctggtgtcgctgtggtatttcaccggaatgatgcgcttgcccgccgcttttgttggttctgttgcgtgttgggggataagcgcatgggtgttgattatatgctggataaagctgcattaa

SEQ ID NO: 458396 - DNA, 729 bp, Shigella boydii
atgaacactatcgtatttgtggaagatgatgcggaagtcggttcactgattgccgcgtacctggcaaaacatgatatgcaggttaccgtagagccgcgcggcgaccaggccgaagaaaccattttgcgagaaaatccggatttggtgttactcgacatcatgctaccaggcaaggacggcatgaccatttgtcgtgatttacgcgcaaagtggtctggaccgattgttcttctaacctctctcgatagcgatatgaaccacatcctggcactggaaatgggtgcctgcgactatattctcaaaacgatgccccctgctgttttgctagcgcgtttacgtttgcatttgcgtcagaatgagcaagccacactgaccaaaggtcttcaggaaacgtctctgacgtctctgactccctacaaagccctgcatttcggcacgttgaccatcgatcccatcaaccgcgtagtcaccctggctaacactgaaatctcgctctcgacagctgatttcgaattattgtgggaattagctacccatgccgggcaaatcatggaccgcgatgcattgctgaaaaatttacgcggcgtcagttatgacggactggatcgtaacgtggacgtggctatttcgcggttaagaaaaaaactgctcgataacgccgcagaaccttatcgcattaaaactgtgcgtaacaaaggctatctttttgcgcctcatgcatgggaataa

SEQ ID NO: 458397 - DNA, 1302 bp, Shigella boydii
atgaaaaaactgtttatccagttttacctgttattgtttgtctgcttccttgtgatgtctctgctggttgggttggtgtacaaatttaccgccgaacgcgcgggcaaacagtcgctggatgatttgatgaacagtttgctgtatctgatgcgcagcgaattgcgtgagatccccccacacgactggggtaagacgctgaaagagatggatttaaatctctctttcgatctgcgtgtcgagccactgagtaaataccatcttgatgatatttccatgcaccgactgcgtggcggcgaaattgtcgccctggacgatcagtacacgtttttgcagcgtatcccgcgcagccactacgtgctggcagttggtcctgttccttatctttattatctccatcagatgcgattgctggatatcgccctgatcgcttttattgctatttccctcgcctttccggtgtttatctggatgcgtccgcactggcaggatatgttaaaactggaagcagcggcgcaacgatttggcgatgggcatctctatgagcgtatccactttgatgagggttcgagctttgaacgacttggtatcgcatttaaccagatggcggacaatatcaacgccttgattgccagcaaaaaacagcttattgacggtatcgctcacgaactgcgaacaccgttagtgcgcctgtgttatcgactggagatgagcgataacctgagcgccgccgagtcccaggcgttgaatcgtgatatcagtcaacttgaagctttaattgaagagctgctgacttatgcccgactcgatcgcccacaaaacgagcttcatcttagcgaaccagacctgccgttgtggctgtcaacgcatctggcagatattcaggcagtaacgcccgataaaacggtacggataaaaacgctcgtgcaaggccattatgcggcgttggatatgcgcttaatggagcgcgtgctggataatttgctcaataacgccctgcggtactgccattcaacggttgaaaccagcctgctactgtcggggaatagagcgacattaattgttgaggatgatggcccagggattgccccagaaaaccgcgaacatatctttgaaccttttgttcgcctcgatcccagccgggatcgctcaaccggcggctgcgggctggggctggcaattgtccactctatagcactggcaatgggcggtacggttaattgtgacaccagcgaactgggtggtgctcgcttctcgtttagctggccgttatggcataacatcccgcaatttacctctgcctga

SEQ ID NO: 458398 - DNA, 930 bp, Shigella boydii
atggcgcgttacgatctcgtagaccgactcaacactacctttcgccagatggaacaagagctggctgcatttgccgctcatcttgagcaacacaagctattggttgcccgcgtgttctctttgccggaggtaaaaaaagaggatgagcataatccgcttaatcgtattgaggtgaaacaacatctcggcaacgacgcgcagtcgctggcgttgcgtcatttccgccatttatttattcaacaacagtccgaaaatcgcagcagcaaagccgctgtccgtctgcctggcgtgttgtgttaccaggtcaataacctttcgcaagcagcgttggtcagtcatattcagcacatcaataaactcaagaccacgttcgagcatatcgtcacggttgagtcagaactccccaccgcggcacgttttgaatgggtgcatcgtcatttgccggggctgatcacccttaatgcttaccgctcgctcaccgttctgcacgaccccgccactttacgttttggctgggctaataaacatatcattaaaaatttgcatcgtgatgaagtcctggcacagctggaaaaaagcctgaaatcaccacgcagtgtcgcaccgtggacgcgcgaggagtggcaaagaaaactggagcgagagtatcaggatatcgctgccctgccacagaacgcgaagttaaaaatcaaacgtccggtgaaggtgcagccgattgcccgcgtctggtacaaaggagatcaaaaacaagtgcaacacgcctgccctacaccgctgattgcactgattaatcgggataatggtgcgggcgtgccggacgttggtgagttgttaaattacgatgcagacaatgtgcagcaccgttataaacctcaggcgcagccgcttcgtttgatcattccacggctgcacctgtatgttgcagattaa

SEQ ID NO: 458399 - DNA, 1404 bp, Shigella boydii
atgaatacagtacgcagcgaaaaagattcgatgggggcgattgatgtcccggcagataagctgtggggcgcacaaactcaacgctcgctggagcatttccgcatttcgacggagaaaatgcccacctcactgattcatgcgctggcgctaaccaagcgcgcagcggcaaaagttaatgaagatttaggcttgttgtctgaagagaaagcgagcgccattcggcaggcggcggatgaagtactggcaggacagcatgacgacgaattcccgctggctatctggcagaccggctccggcacgcaaagtaacatgaacatgaacgaagtgctggctaaccgggccagtgaattactcggcggcgtgcgcgggatggaacgtaaagttcaccctaacgacgacgtgaacaaaagccaaagttccaacgatgtctttccgacggcgatgcacgttgcggcgctgctggcgctgcgcaagcaactcattccgcagcttaaaaccctgacacagacactgagtgaaaaatcgcgtgcatttgccgatatcgtcaaaatcggtcgaacccacttgcaggacgccacgccgctaacactagggcaggagatttccggctgggtagcgatgctcgagcataatctcaaacatatcgaatacagcctgcctcacgtagcggaactggctcttggcggtacagcggtgggtactggactaaatacccatccggagtatgcgcgtcgcgtagcagatgaactggcagtcattacctgtgcaccgtttgttaccgcgccgaacaaatttgaagcgcttgcgacctgtgatgccctggttcaggcgcacggcgcgttgaaagggttggctgcgtcactgatgaaaatcgccaatgatgtccgctggctggcctctggcccgcgctgcggaattggtgaaatctcaatcccggaaaatgagccgggcagctcaatcatgccggggaaagtgaacccaacccagtgtgaagcattaaccatgctctgctgtcaggtaatggggaacgacgtggcgatcaacatgggtggcgcttctggtaactttgaactgaacgtcttccgtccgatggtgatccataatttcctgcaatcggtgcgcttgctggcagatggcatggaaagttttaacaaacactgcgcagtgggtattgaaccgaatcgtgagcgaatcaatcaattactcaatgaatcgctgatgctggtgactgcgcttaacacccacattggttatgacaaagccgcggagatcgccaaaaaagcgcataaagaagggctgaccttaaaagctgcggcccttgcgctggggtatcttagcgaagccgagtttgacagctgggtacggccagaacagatggtcggcagtatgaaagccgggcgttaa

SEQ ID NO: 458400 - DNA, 1647 bp, Shigella boydii
atgtcaaacaaaccctttcattatcaggctccttttccactcaaaaaagatgatactgagtattacctgctaaccagcgaacacgttagcgtatctgaatttgaagggcaggagattttgaaagtcgcacccgaagcgttaactctgttggcgcgtcaggcgtttcatgatgcgtcatttatgctgcgtccggctcaccaacaacaggtggccgacattctgcgtgacccggaagccagcgaaaatgataaatatgtggcgctgcaattcctgcgcaactccgacatcgcggcgaaaggtgttctgccaacctgtcaggataccggcactgcgattattgttggtaaaaaagggcagcgtgtatggaccggtggctgtgatgaagcggcgctggcgcgcggtgtctataacacttatatcgaagataatttgcgctactcgcaaaacgcgccgctggatatgtataaagaggtgaataccggcaccaatctgccagcgcagatcgatctttatgccgttgatggcgacgagtacaaattcctctgtatcgccaaaggtggtggttcggcaaacaagacgtatctctatcaggaaaccaaagcgttactaacgccggggaaactgaaaaattacctggttgagaagatgcgcacgctgggtacggcggcctgtcctccgtatcatattgcgttcgtaattggtggaacttctgcagaaactaaccttaaaacagtgaaactggcttccgctaaatactatgacgaactgccaacggaagggaatgagcacggtcaggcattccgcgatgtggaactggaaaaagaattgctgatcgaagcgcaaaatctcggtctgggtgcgcagtttggtggtaaatacttcgctcacgacatacgcgtgattcgcctgccacgtcacggcgcatcctgtccggttggtatgggtgtttcctgctctgctgaccgtaatatcaaagcgaagatcaaccgtcaggggatctggatcgaaaaactggaacataatccaggtaaatatatccctgaagagctgcgtaaagcgggagaaggcgaagcggtgcgcgttgaccttaaccgtccgatgaaagagatcctcgcacagttgtcgcagtatcccgtttctacacgcttatcgcttaacggcacgattatcgtcggtcgtgatattgctcacgccaaactgaaagagcggatggataacggtgaagggctgccgcagtacattaaagatcatccgatttactacgcgggtccggccaaaacgccggaaggttatgcctccggttctcttggcccaacgaccgccggacggatggattcttatgtcgatcaactgcaagcgcagggcggaagtatgatcatgctggcgaaaggcaaccgcagccagcaggtgacggatgcctgtaaaaaacacggcggcttctaccttggcagtatcggtggtccggccgctgtattggcgcagggaagtattaagagcctggaatgtgttgaatatccggaactgggaatggaagccatctggaaaattgaagtggaagatttcccggcgtttatccttgtggatgataaaggaaatgacttcttccagcagatacaactcacacagtgcactcgctgtgtgaaataa

SEQ ID NO: 458401 - DNA, 1176 bp, Shigella boydii
atgcaaaaactcattaactcagtgcaaaactatgcctggggcagcaaaacggcgttgactgaactttatggtatggaaaatccgtccagccagccgatggccgagctgtggatgggcgcacatccgaaaagcagttcacgagtgcagaatgccgccggagatatcgtttcactgcgtgatgtgattgagagtgataaatcgactctgctcggagaggccgttgccaaacgctttggcgaactgcctttcctgttcaaagtattatgcgcagcacagccgctctccattcaggttcatccaaacaaacgcaattctgaaatcggttttgccaaagaaaatgccgcaggtatcccgatggatgccgccgagcgtaactataaagatcctaaccacaagccggagctggtttttgcgctgacgcctttccttgcgatgaacgcgtttcgtgagttttccgagattgtctccctactccagccagtcgcaggtgcacatccggcaattgctcactttttacaacagcctaatgccgaacgtttaagcgaactgttcgccagcctgttgaatatgcagggtgaagaaaaatcccgcgcgctggcgattttaaaatcggcgctcgacagtcagcagggtgaaccgtggcaaacgattcgtttaatttctgaattttacccggaagacagcggcctgttctccccgctgttactgaatgtggtgaaattgaatcctggcgaagcgatgttcctgttcgctgaaacaccgcacgcttacctgcaaggcgtggcgctggaagtgatggcgaactccgataacgtgctgcgtgcgggtctgacgcctaagtacattgatattccggaactggttgccaatgtaaaattcgaagccaaaccggctaaccagttgttgacccagccggtgaaacaaggtgcagaactggacttcccgattccagtggatgattttgccttctcgctgcatgaccttagtgataaagaaaccaccattagccagcagagtgccgccattttgttctgcgtcgaaggcgatgcaacgttgtggaaaggttctcagcagttacagcttaaaccgggtgaatcagcgtttattgccgccaacgaatcaccggtgactgtcaaaggccacggccgtttagcgcgtgtttacaacaagctgtaa

SEQ ID NO: 458402 - DNA, 1509 bp, Shigella boydii
atgaataaatcgctggtagcggtaggcgtcattgttgcgctaggcgtagtctggacaggcggcgcatggtatacaggcaagaagattgaaacccatctcgaagacatggtcgcgcaggcgaacgcgcaactcaaactgacagctcctgaatccaacctggaagtgagttatcaaaactatcatcgcggcgtattcagcagccagttgcaactgttggtgaaacccattgccgggaaagaaaatccgtggattaaaagcggtcagagcgtcatcttcaacgaatcggttgatcatggtcccttcccgcttgcccagcttaaaaaactgaacctgatcccgtcgatggcatcaattcaaaccacgctggttaataacgaagtaagcaaaccactgtttgatatggcaaaaggtgaaacgccttttgagattaactcgcgcattggttacagcggtgattccagttccgatatttcgctcaagccactgaattacgagcaaaaggatgaaaaagtcgcctttagcggcggcgagttccagttaaatgctgacagagacggcaaagccatctccctttccggggaggcgcaaagtggtcggatagacgcagttaacgaatacaaccagaaagtgcagttgacctttaataatctgaaaaccgacggttccagcacgctggcaagttttggtgagcgcgtaggaaaccaaaaactgtcactggaaaaaatgaccatttcagtggaaggcaaagaactggcactgctggaaggcatggagatcagcggtaaatcggatctggtcaatgacggtaaaacgatcaatagccaactggattactcgctaaacagcctgaaggtacagaatcaggatctgggcagcggcaagctgactttaaaagtcggccagattgatggtgaagcctggcatcagttcagccagcaatataacgcgcaaactcaggcgctgctggcacagccagaaattgccaacaatcccgaactttatcaggagaaagtgacggaagccttctttagcgccctgccgctgatgttgaaaggcgatccggtgattactgtcgcgccgctaagctggaaaaacagtcagggtgaaagtgcgctgaatctgtcgctgttcctgaaagatccggcaacgactaaagaagcgccgcaaacgctggcgcaggaagtagatcgttcggttaaatctctggatgcgaaactgaccattccggtggatatggcaactgagtttatgactcaggtagcgaagctggaaggttatcaggaagatcaagcgaaaaaactggcgaaacagcaagttgaaggtgcatcagcaatggggcagatgttccgtctgaccaccttgcaggacaataccatcaccaccagcctgcaatatactaacggtcagataacgttaaatgggcagaaaatgtcgttagaagattttgttggcatgtttgcgatgccagctcttaacgttccggctgtaccggcaattccgcagcagtaa

SEQ ID NO: 458403 - DNA, 276 bp, Shigella boydii
atggaaactcagtggacaaggatgaccgccgatgaagcggcagaaattatccagcataacgacatggtggcatttagcggctttaccccggcgggttcgccgaaagccctacccaccgcgattgcccgcagagctaacgaacagcatgaggccaaaaagccgtatcaaattcgcctgctgacgggggcgtcaatcagcgccgccgctgacgatgtactttctgacgccgatgctgtttcctggcgtgcgccatatcaaacatcgtccggttggtga

SEQ ID NO: 458404 - DNA, 786 bp, Shigella boydii
atgtcttatcagtatgtgaacgttgccactatcaacaaagtggcggtcattgagtttaactatggccgaaaacttaatgccttaagtaaagtctttattgatgatcttatgcaggcgttaagcgatctcaaccggccggaaattcgctgtatcattttgcgcgcgccgagtggatccaaagtcttctccgcaggtcacgatattcacgaactgccgtctggcggtcgcgatccgctctcctatgatgatccattgcgtcaaatcacccgcatgatccaaaaattcccgaaaccgatcatttcgatggtggaaggtagtgtttggggtggcgcatttgaaatgatcatgagttccgatctgatcatcgccgccagtacctcaaccttctcaatgacgcctgtaaacctcggcgtcccgtataacctggtcggcattcacaacctgacccgcgacgcgggcttccacattgtcaaagagctgatttttaccgcttcgccaatcaccgcccagcgcgcgctggctgtcggcatcctcaaccatgttgtggaagtggaagaactggaagatttcaccttacaaatggcgcaccacatctctgagaaagcgccgttagccattgctgttatcaaagaagagctgcgtgtactgggcgaagcgcacaccatgaactccgatgaatttgaacgtattcaggggatgcgacgcgcggtttatgacagcgaagattaccaggaaggaatgaacgctttcctcgaaaaacgtaaacctaatttcgttggtcattaa

SEQ ID NO: 458405 - DNA, 996 bp, Shigella boydii
atgattaatgaagccacgctggcagaaagtattcgccgcttacgtcagggtgagcgtgccacactcgcccaggccatgacgctggtggaaagccgtcacccgcgtcatcaggcactaagtacgcagctgcttgatgccattatgccgtactgcggtaacaccctgcgactgggcgttaccggcacccccagcgcggggaaaagtacctttcttgaggcctttggcatgttgttgattcgagagggattaaaggtcgcggttattgcggtcgatcccagcagcccggtcactggcggtagcattctcggggataaaatccgcatgaatgacctggcgcgtgccgaagcggcgtttattcgcccggtaccatcctccggtcatctgggcggtgccagtcagcgagcgcgggaattaatgctgttatgcgaagcggcgggttatgacgtagtgattgtcgaaacggttggcgtcgggcagtcggaaacagaagtcgcccgcatggtggactgttttatctcgttgcaaattgccggtggcggcgatgatctgcagggcattaaaaaagggctgatggaagtggctgatctgatcgttatcaacaaagacgatggcgataaccataccaatgtcgccattgcccggcatatgtacgagagtgccctgcatattctgcgacgtaaatacgacgaatggcagccacgggttctgacttgtagcgcactggaaaaacgtggaatcgatgagatctggcacgccatcatcgagttcaaaaccgcgctaactgccagtggtcgtttacaacaagtgcggcaacaacaatcggtggaatggctgcgtaagcagaccgaagaagaagtactgaatcacctgttcgcgaatgaagatttcgatcgctattaccgccagacgcttttagcggtcaaaaacaatacgctctcaccgcgcaccggcctgcggcagctcagtgaatttatccagacgcaatattttgattaa

SEQ ID NO: 458406 - DNA, 693 bp, Shigella boydii
atggtgcgtaacgagcaaattgctttgctggaacgcattcgcgccacccgtgatgatgccgccgtaaccgccgcgttgaacgccctgactcacgccgcacagcataacgaaaacctgctggctgccgctgttaatgccgctcgcgttcgcgccaccctgggtgaaatttccgatgcgctggaagccgctttcgaccgttatctggtgccaagccagtgtgttaccggcgtgattgcgcaaagctatcatcaatctgagaaatcggcctccgagttcgatgccattgttgcgcaaacggagcagttccttgccgacaatggtcgtcgcccgcgcattctgatcgccaaaatgggccaggatgggcacgatcgcggctcgaaagtgatcgccagcgcctattccgatctcggtttcgacgtagatttaagcccgatgttctctacacctgaagagatcgcccgcctggcagtagaaaatgacgttcacgtagtgggcgcatcctcactggctgccggtcataaaacgctgatcccggaactggtcgaggcgctgaaaaaatggggacgcgaagatatctgcgtagtcgccggtggcgtcattccaccgcaggattacgccttcctgcaagagcgcggcgtggcgcgatttatggtccaggtacacctatgctcgacagtgtgcgcgacgtactga

SEQ ID NO: 458407 - DNA, 951 bp, Shigella boydii
gtggcgggcgacgtcggcaaagcgggcgtcgctatcgacaccgtggaagatatgaaagtcctgttcgaccagatcccgctggataaaatgtcggtttcgatgaccatgaatggcgcagtgctaccagtactggcgttttatatcgtcgccgcggaagagcaaggtgttacacctgataaactgaccggcaccattcagaacgatatcctcaaagagtacctctgccgcaacacctatatttacccgccaaaaccgtcaatgcgcattatcgccgacatcatcgcctggtgttccggcaacatgccgcgatttaataccatcagtatcagcggttaccacatgggtgaagcgggtgccaactgcgtgcagcaggtagcatttacgctcgctgatgggattgagtacatcaaagcagcaatctctgccggactgaaaattgatgacttcgctcctcgcctgtcgttcttcttcggcatcggcatggagctgtttatgaacgtcgccatgttgcgtgcggcacgttatttatggagcgaagcggtcagtggatttggcgcacaggacccgaaatcactggcgctgcgtacccactgccagacctcaggctggagcctgactgaacaggatccgtataacaacgttatccgcaccaccattgaagcactggctgcgacgctgggcggtactcagtcactgcataccaacgcctttgacgaagcgcttggtttgcctaccgatttctcagcacgcattgcccgcaacacccagatcatcatccaggaagaatcagaactctgccgcaccgtcgatccactggccggatcctattacattgagtcgctgaccgatcaaatcgtcaaacaagccagagctattatccaacagatcgacgaagccggtggtatggcgaaagcgatcgaagcaggtctgccaaaacgaatgatcgaatag

SEQ ID NO: 458408 - DNA, 297 bp, Shigella boydii
atgtctaacgtgcaggagtggcaacagcttgccaacaaggaattgagccgtcgggagaaaactgtcgactcgctggttcagcaaaccgcggaagggatcaccatcaagccgctgtataccgaagccgatctcgataatctggaggtgacaggtacccttcctggtttgccgccctacgttcgtggcccgcgtgccactatgtataccgcccaaccgtggaccatccgtcagtatgctggtttttcaacagcaaaagagtccaacgctttttatcgccgtaacctggccgccgggtaa

SEQ ID NO: 458409 - DNA, 894 bp, Shigella boydii
atgaaacgcccggactacagaacattacaggcactggatgcggtgatacgtgaacgaggatttgagcgcgcggcacaaaagctgtgcattacacaatcagccgtctcacagcgcattaagcaactggaaaatatgttcgggcagccgctgttggtgcgtaccgtaccgccgcgcccgacggaacaagggcaaaaactgctggcactgctgcgccaggtggagttgctggaagaagagtggctgggcgatgaacaaaccggttcgactccgctgctgctttcactggcggtcaacgccgacagtctggcgacgtggttgcttccggcactggctcctgtattggctgattcgcctatccgcctcaacttgcaggtagaagatgaaacccgtactcaggaacgtctgcgccgcggcgaagtggtcggcgcggtgagtattcaacatcaggcgctgccgagttgccttgtcgataagctcggtgcgcttgactatctgttcgtcagctcaaaaccgtttgccgaaaaatatttccctaacggcgtaacgcgttcggcattattgaaagcacctgtggtcgcctttgaccatcttgacgatatgcaccaggcctttttgcagcaaaacttcgatctgcctccaggcagcgtgccctgccatatcgttaattcttcagaagcgttcgtgcaacttgctcgccagggcaccacctgctgtatgatcccgcacctgcaaatcgagaaagaactagccagcggtgaactgattgacttaacgccagggctatttcaacgccggatgctctactggcaccgctttgctcctgaaagccgcatgatgcgtaaagtcactgatgcgttgctcgattatggtcacaaagtccttcgtcaggattaa

SEQ ID NO: 458410 - DNA, 660 bp, Shigella boydii
atgacgcaggatgaattgaaaaaagcagtaggatgggcggcacttcagtatgttcagcccggcaccattgttggtgtaggtacaggttccaccgccgcacactttattgacgcgctcggcacgatgaaaggccagattgaaggggccgtttccagttcagatgcttccactgaaaaactgaaaagcctcggcattcacgtttttgatctcaacgaagtcgacagccttggcatctacgttgatggcgcagatgaaatcaacggccacatgcaaatgatcaaaggcggcggcgcggcgctgacccgtgaaaaaatcattgcttcggttgcggaaaaatttatctgtattgccgacgcctccaagcaggttgatattctgggtaaattcccgctgccagtagaagttatcccgatggcacgtagtgcagtggcgcgccagctggtgaaactgggcggtcgtccggaataccgtcagggcgtggtgaccgataatggcaacgtgatcctcgacgtccacggcatggaaatccttgacccgatagcgatggaaaacgccataaatgcgattcctggcgtggtgactgttggcttgtttgctaaccgtggcgcggacgttgcgctgattggcacacctgacggtgtcaaaaccattgtgaaatga

SEQ ID NO: 458411 - DNA, 1233 bp, Shigella boydii
atggcaaaggtatcgctggagaaagacaagattaagtttctgctggtagaaggcgtgcaccaaaaggcgctggaaagccttcgtgcagctggttacaccaacatcgaatttcacaaaggcgcgctggatgatgaacaattaaaagaatccatccgcgatgcccacttcatcggcctgcgatcccgtacccatctgactgaagacgtgatcaacgccgcagaaaagctggtcgctattggctgtttctgtataggaacaaaccaggttgatctggatgcggcggcaaagcgcgggatcccggtatttaacgcaccgttctcaaatacgcgctctgttgcggagctggtgattggcgaactgctgctgctattgcgcggcgtgccggaagccaatgctaaagcgcaccgtggcgtgtggaacaaactggcggcgggttcttttgaagcgcgcggcaaaaagctgggtatcatcggctacggtcatattggtacgcaattgggcattctggctgaatcgctgggaatgtatgtttacttttatgatattgaaaataaactgccgctgggcaacgccactcaggtacagcatctttctgacctgctgaatatgagcgatgtggtgagtctgcatgtaccagagaatccgtccaccaaaaatatgatgggcgcgaaagaaatttcactaatgaagcccggctcgctgctgattaatgcttcgcgcggtactgtggtggatattccggcgctgtgtgatgcgctggcgagcaaacatctggcgggggcggcaatcgacgtattcccgacggaaccggcgaccaatagcgatccatttacctctccactgtgtgaattcgacaacgtacttctgacgccacacattggcggttcgactcaggaagcgcaggagaatatcggcctggaagttgcgggtaaattgatcaagtattctgacaatggctcaacgctctctgcggtgaacttcccggaagtctcgctgccactgcatggtggtcgtcgtctgatgcacatccacgaaaaccgtccgggcgtgctaactgcgctgaacaaaatcttcgccgagcagggcgtcaacatcgccgcgcaatatctacaaacttccgcccagatgggttatgtagttattgatattgaagctgacgaagacgttgccgaaaaagcgctgcaggcaatgaaagctattccgggtaccattcgcgcccgtctgctgtactaa

SEQ ID NO: 458412 - DNA, 603 bp, Shigella boydii
atgacgcaactaccagaactcccactgacattatcccgacaagaaatccgcaaaatgattcggcaacgtcgtcgtgcgttaacgccggaacaacagctggaaatgggtcaacaagccgctacccggatgatgacttatcccccggtggtgatggcgcatacggtcgctgtattcctctcttttgatggtgaactcgacacccagccgctaatagaacaactctggcgcgccggtaagcgcgtatgtcttccagttttgcatccctttagtgctggtaatttgctgttcctgaattaccatccgcaaagcgaactggtgatgaacaggttgaaaatccatgagccaaaactggatgtgcgtgacgtgctacccctttcccgattagacgtgctgatcacaccgctggtcgcctttgatgagtacggtcagcgcctgggaatgggcggtggtttttatgatcggaccttacaaaactggcagcactataaaacgcaaccggtgggttatgcgcatgattgtcagttggtggaaaaactccccgttgaagagtgggatatccctcttcctgcggtggttacaccgtcgaaagtctgggagtggtaa

SEQ ID NO: 458413 - DNA, 330 bp, Shigella boydii; identical to SEQ ID NO: 29270

SEQ ID NO: 458414 - DNA, 579 bp, Shigella boydii
atgtctatacagaacgaaatgcctggttacaacgaaatgaaccagtatctgaaccaacaagggacgggtctgacccctgccgagatgcatggtttaatcagtgggatgatatgtggcggtaacgatgacagctcatggctgccgctacttcacgacctgacgaacgaaggcatggctttcggtcatgagctggcacaggcactgcgtaaaatgcactctgccaccagcgatgccctgcaggatgacggcttcctttttcagctttatctgcctgatggcgatgatgtcagcgttttcgatcgggctgatgcattggcaggttgggtcaatcacttcctgcttggtcttggcgttacgcaaccgaagctggataaagtgaccggcgaaaccggtgaagctatcgacgatctgcgtaacattgcgcaactgggttacgacgaagacgaagatcaggaagagcttgaaatgtcgcttgaagagatcatcgaatacgttcgtgttgccgcgctgttatgccacgacacctttactcatccgcaaccgaccgcgccagaagtacaaaaaccgactctacactaa

SEQ ID NO: 458415 - DNA, 1326 bp, Shigella boydii
atgagtgagatatcccggcaagagtttcagcgtcgccgtcaggccctggtggagcaaatgcaacccggcagcgccgcgctgatttttgctgcaccagaagtaacacgtagcgccgacagcgaatacccctatcgtcagaacagtgacttctggtacttcaccggctttaacgaaccggaagcggtgctggtgctgattaaaagcgatgacactcataaccacagcgttctgtttaaccgcgttcgcgacctgacggcggagatctggtttggccgtcgcttaggccaggatgccgcgccagagaaactgggcgttgaccgcgcactggcattcagcgaaatcaatcagcaactttatcaactacttaacggcctggatgtggtttaccatgcccagggcgaatatgcatatgctgatgaaatcatgaacagtgcgctggaaaaactgcgtaaaggttcgcggcaaaatctcaccgcaccggcaacgatgatcgactggcgtcctgttgttcatgaaatgcgcctgttcaaatcgccagaagagattgccgtactccgccgcgcgggagaaatcaccgccatggcacatacacgggcgatggaaaaatgccgtccgggaatgttcgagtaccatctggaaggcgaaattcaccacgaatttaaccgccacggtgcgcgctatccgtcctataacaccattgtcggcagcggtgaaaacggctgcattctgcactacaccgaaaacgagagtgaactgcgcgacggtgacctggtgttgattgacgcgggttgtgaatacaaaggttacgcgggcgatattacccgcaccttcccggtcaacggcaaattcacccaggcccagcgtgaaatctacgacattgtgctggagtctctcgaaaccagcctgcgcctgtatcgtccgggaacttccattctggaagtcactggtgaagtggtgcgcatcatggttagcggcctggtaaaactcggcattctgaaaggtgatgttgatgaactgatcgctcagaatgcccatcgtcctttctttatgcatggccttagccactggttagggctagatgtccatgacgttggcgtttatggtcaggatcgctcgcgcattctggaaccgggcatggtactgaccgtagagccagggctgtatattgcgccggatgcagaagtgccagaacaatatcgcggtatcggcattcgtattgaagacgacattgtgattaccgaaaccggtaacgaaaacctcaccgccagcgtggtgaaaaagccggaagaaatcgaagcgttgatggctgctgcgagaaagcaatga

SEQ ID NO: 458416 - DNA, 1179 bp, Shigella boydii
atgagcgtaatcatcgtcggtggcggcatggcgggcgcgacgctggcgctggctatttcccggttaagtcacggggcgctgccggtacatttgattgaagcgactgcgccagagtcacatgctcatccgggctttgatggacgagcgatagcgctggcggcgggtacctgtcagcaactggcgcgcatcggcgtctggcaatctctggcggattgcgcaactgccatcaccaccgtgcatgtcagcgatcgtggtcacgctggatttgtcaccctcgccgcagaagattaccaactggcggcgctgggacaggttgtcgaattgcacaatgtcgggcaacggctgtttgcattgctgcgtaaagcacctggcgtaacgctgcattgccctgatcgcgtggctaacgttgcccgtactcagagtcacgttgaagtgacgctggagagtggcgagacgctgacgggccgcgtgctggtagcagctgatggcacccattcagcgttagccaccgcgtgcggcgttgactggcagcaggagccttacgaacaactggccgtgattgccaacgttgcgacttccgttgcgcacgaaggccgcgcttttgaacgcttcacgcaacatggcccgctggcgatgttgccgatgtctgacggacgctgttcgctggtctggtgtcatccactggaacggcgcgaagaggtgctgtcgtggagcgacgagaagttttgccgtgaactccagtcggcctttggctggcgacttggaaaaattacccacgccggtaaacgcagtgcttatccgctggcgttaacccgcgccgccagagctattacccatcgtaccgtgctggtgggcaatgcggcgcaaactctgcacccgattgccgggcaagggtttaacctcggtatgcgagatgtcatgagccttgcggaaaccctgactcaggcgcatgagcgcggagaagacatcggtgattacggcatattgtgccgctatcagcagcgtcgacagagcgatcgcgaagcaaccatcggcgtcacggacagcctggtacatctttttgccaaccgttgggcaccgctggttgtcgggcgcaacatcggactgatgacgatggaattattcaccccggcacgcgatgtgctggcgcagcgcaccctcggttgggtggcgcgttga

SEQ ID NO: 458417 - DNA, 1203 bp, Shigella boydii
atgcaaagtgttgatgtagccattgttggtggcggcatggtggggctggcggttgcctgcggcttacaggggagcggcttacgcgttgccgtactggagcagcgcgtaccggaacctctggcggcggatgcaccaccacaactgcgcgtttcggctatcaatgccgccagcgaaaaattactcacccgtcttggcgtctggcaggacattctctctcgtagggccagttgttatcacggtatggaagtgtgggacaaagacagttttggtcacatttcgtttgacgatcaaagcatgggctatagccatcttgggcatatcgttgaaaactcagtgattcactacgcgctgtggaacaaagcgcagcagtcgtcagatatcactctgttggcccccgcagaattacagcaggtcgcctggggagaaaatgaaactttcctgacgctgaaagatggcagcatgttaacggcgcgtctggtgattggcgcggacggtgctaattcctggttgcgcaacaaagcagatatttcgctgactttctgggattatcagcatcacgcgctggtagcgaccattcgcacggaagaaccgcatgatgcggtggcgcggcaggttttccatggcgaaggcattctggcctttttaccgcttagcgatccgcatctttgctcaattgtctggtcactgtcgccagaggaagcgcagcggatgcagcaggcaagtgaagatgaatttaatcgcgcgttaaatatcgcttttgataatcgcctgggcttatgcaaggttgagagcgcgcgtcaggtgttcccactgacggggcgttatgcgcgccagtttgccgcgcaccgtctggtgctagtgggcgacgccgcgcataccattcacccgctggcggggcagggagtaaatctcggctttatggatgctgcagagctgattgctgaactgaaacggttgcatcgtcaggggaaagacatcgggcagtacatttacctgcgccggtatgagcgtagccgcaagcacagtgcggcgctgatgctggctggtatgcagggattccgcgatctgttttccggtaccaatccggcgaaaaaactgctgcgtgatattggtttgaaactggccgacacgcttcctggcgttaaaccacaacttatccgccaggcaatgggattaaacgatttgcctgaatggctgcgttaa

SEQ ID NO: 458418 - DNA, 1095 bp, Shigella boydii
atggcacaacagactcctttgtacgaacaacacacgctttgcggcgctcgcatggtggatttccacggctggatgatgccgctgcattacggttcgcaaatcgacgaacatcatgcggtacgtaccgatgccggaatgtttgatgtgtcacatatgaccatcgtcgatctccgcggcagccgcacccgggagtttctgcgttatctgctggcgaacgatgtggcgaagctcaccaaaagcggcaaagccctttactcggggatgttgaatgcctctggcggtgtgatagatgacctcatcgtctactactttactgaagatttattccgcctcgttgttaactccgccacccgcgaaaaagacctctcctggattacccaacacgctgaacctttcggcatcgaaattaccgttcgtgatgacctttccatgattgccgtgcaagggccgaatgcgcaggcaaaagctgccacactgtttaatgacgcccagcgtcaggcggtggaagggatgaaaccgttctttggcgtgcaggcgggcgatctgtttattgccaccactggttataccggtgaagcgggctatgaaattgcgctgcccaatgaaaaagcggccgatttctggcgtgcgctggtggaagcgggtgttaagccatgtggcttgggcgcgcgtgacacgctgcgtctggaagcgggcatgaatctttatggtcaggagatggacgaaactatttctcctttagccgccaacatgggctggactatcgcctgggaaccggcagatcgtgactttatcggtcgtgaagccctggaagtgcagcgtgagcatggtacagaaaaactggttggtctggtgatgaccgaaaaaggcgtgctgcgtaatgaactgccggtacgctttaccgatgcgcagggcaaccagcatgaaggcattatcaccagcggtactttctccccgacgctgggttacagcattgcgctggcgcgcgtgccggaaggtattggcgaaacggcgattgtgcaaattcgcaaccgtgaaatgccggttaaagtgacaaaacctgtttttgtgcgtaacggcaaagccgtcgcgtga

SEQ ID NO: 458419 - DNA, 390 bp, Shigella boydii
atgagcaacgtaccagcagaactgaaatacagcaaagaacacgaatggctgcgtaaagaagccgacggcacttacaccgttggtattaccgaacatgctcaggagctgttaggcgatatggtgtttgttgacctgccggaagtgggcgcaacggttagcgcgggcgatgactgcgcggttgccgaatcagtaaaagcggcgtcagacatttatgcgccagtaagcggtgaaatcgtggcggtaaacgacgcactgagcgattccccggaactggtgaacagcgaaccgtatgcaggtggctggatctttaaaatcaaagccagcgatgaaagcgaactggaatcactgctggatgcgaccgcatacgaagcattgttagaagacgagtaa

SEQ ID NO: 458420 - DNA, 2874 bp, Shigella boydii
atgacacagacgttaagccagcttgaaaacagcggcgcttttattgaacgccatatcggaccggacgccgcgcaacagcaagaaatgctgaatgccgttggcgcacaatcgttaaacgcgctgaccggccagattgtaccgaaagatattcagcttgcgaccccgccgcaggttggcgcaccggcgaccgaatacgccgcactggcagaactcaaggctattgccagtcgcaataaacgcttcacgtcttacatcggcatgggttacaccgccgtgcagctaccgccggttatcctgcgtaacatgctggaaaatccgggctggtataccgcgtacactccgtatcaacctgaagtctcccagggccgccttgaagcactgctcaacttccagcaggtaacgctggatttgactggactggatatggcctctgcttctcttctggacgaggccaccgctgccgccgaagcaatggcgatggcgaaacgcgtcagcaaactgaaaaattccaaccgcttcttcgtggcttccgatgtgcatccgcaaacgctggatgtggtccgtactcgtgccgaaacctttggttttgaagtgattgtcgatgacgcgcaaaaagtgctcgaccatcaggacgtcttcggcgtgctgttacagcaggtaggcactaccggtgaaattcacgactacactgcgcttattagcgaactgaaatcacgcaaaattgtggtcagcgttgccgccgatattatggcgctggtgctgttaactgcgccgggtaaacagggcgcggatattgtttttggttcggcgcaacgcttcggcgtgccgatgggctacggtggcccacacgcggcattctttgcggcgaaagatgaatacaaacgctcaatgccgggccgtattatcggtgtatcgaaagatgcagctggcaataccgcgctgcgcatggcgatgcagactcgcgagcaacatatccgccgtgagaaagcgaactccaacatttgtacttcccaggtactgctggcaaacatcgccagcctgtatgccgtttatcacggcccggttggcctgaaacgtatcgctaaccgcattcaccgtttgaccgatatcctggcggcaggcctgcaacaaaaaggtctgaagctgcgccatgcgcactatttcgacactctgtgtgtggaagtggccgacaaggcgggcgtactggcgcgtgccgaagcggctgaaatcaacctgcgtagcgatatcctgaacgcggttgggatcacccttgatgaaaccaccacgcgtgaaaacgtaatgcagcttttcagcgtgctgctgggcgataaccacgggctggagatcgacacgctggacaaagacgtggctcacgacagccgctctattcagcctgcgatgctgcgcgacgacgaaatcctcactcatccggtgtttaatcgctaccacagcgaaaccgaaatgatgcgctatatgcactcgctggagcgtaaagatctggcgctgaatcaggcgatgatcccgctgggttcctgcaccatgaaactgaactccgccgccgagatgatcccaatcacctggccggaatttgccgaactgcacccgttttgcccgccggaacaggctgaaggttatcagcagatgattgcgcagctggctgactggctggtgaaactgaccggttacgacgccgtttgtatgcagccgaactccggcgcacagggcgaatacgcgggcctgctggcgattcgtcattatcatgaaagccgcaacgaagggcatcgcgatatctgcctgatcccggcttctgcgcacggaactaaccccgcttctgcacatatggcaggaatgcaggtggtggttgtggcgtgtgataaaaacggcaacatcgatctgactgatctgcgcgcgaaagcggaacaggcgggcgataacctctcctgtatcatggtgacttatccctctacccacggcgtgtatgaagaaacgatccgtgaagtgtgtgaagtcgtgcatcagttcggcggtcaggtttaccttgatggcgcgaacatgaacgcccaggttggcatcacctcgccgggctttattggcgcggacgtttcgcacctcaacctgcataaaactttctgcattccgcacggcggtggtggtccgggtatgggaccgatcggtgtgaaagcgcatctggcaccgtttgtaccgggtcatagcgtggtgcaaatcgaaggcatgttaacccgtcagggcgcagtttctgcggcaccgttcggtagcgcctctatcctgccaatcagctggatgtacatccgcatgatgggcgcagaagggctgaaaaaagcaagccaggtggcaatcctcaacgccaactatattgccagccgcctgcaggatgccttcccggtgctgtataccggtcgcgacggtcgcgtggcgcacgaatgtattctcgatattcgcccgctgaaagaagaaaccagcatcagcgagctggatattgccaagcgcctgatcgactacggtttccacgcgccgacgatgtcgttcccggtggcgggtacgctgatggttgaaccgactgaatctgaaagcaaagtggaactggatcgctttatcgacgcgatgctggctatccgcgcagaaattgaccaggtgaaagccggtgtctggccgctggaagataacccgctggtgaacgcgccgcacattcagagcgaactggtcgccgagtgggcgcatccgtacagccgtgaagttgcggtattcccggcaggcgtggcagacaaatactggccgacggtgaaacgtctggatgatgtttacggcgaccgtaacctgttctgctcctgcgtaccgattagcgaataccagtaa

SEQ ID NO: 458421 - DNA, 744 bp, Shigella boydii
atggctatagcacttgtgaccggtggcagtcgcggcatcgggcgggcaactgcattactgttggcgaaagaagagtatacggtggcggttaattatcaacaaaacctccatgcggcgcaggaagtggtgaacttaatcacgcaagccggtggcaaggcattcgtgctccaggcggatatcagcgacgaaaatcaggtcatagcaatgtttacagcaatcgatcagcacgatgaaccgctagcagcgctggtcaataacgccgggatcttgtttacccagtgcaccgttgaaaaccttaccgcagagcgaatcaaccgagtactttccaccaacgtgacgggatattttctctgctgccgcgaggcggtaaaacgcatggcgcttaaaaatggtggcagtggcggcgctatcgtcaatgtctcttcggtggcctcacggttgggttcgccaggggaatatgttgattacgcggcatcgaaaggggcgattgatacgttaaccaccggactatcgctggaagtcgccgcgcaggggatccgcgttaactgcgtgcggccagggtttatttataccgaaatgcacgccagcggcggcgagcttggacgcgtcgatcgcgttaagtcgaacatccccatgcagcgtggtggacaggcagaagaggtcgcgcaggccattgtctggctactaagtgataaagcctcttacgtcacgggaagttttatcgatttggcgggcgggaaataa

SEQ ID NO: 458422 - DNA, 1434 bp, Shigella boydii
gtgaaaaaactcaccttaccgaaagatttcttatggggtggcgccgttgccgctcatcaggtcgaaggcggctggaacaaaggcggcaaaggaccgagcatttgtgacgttctgaccggtggcgcacacggcgtgccgcgcgaaatcaccaaagaagtcttgccaggaaaatactatccaaaccatgaagccgttgatttttatggtcactacaaggaagacatcaagctatttgccgaaatgggcttcaaatgttttcggacttccatcgcctggacgcgtatttttccaaaaggtgatgaagctcagccaaacgaagaagggctgaagttttacgactctctgttcgatgaactgctgaaatacaacatcgaaccggtgataaccctctcccactttgaaataccgctgcatctggtgcagcaatacggtagctggaccaaccgtaaagtcgttgatttctttgtccgtttcgcggaagtggtattcgaacgctacaagcataaagtcaaatactggatgaccttcaacgaaataaacaaccagcgtaactggcgtgcgccgctgtttggttactgctgctccggcgtggtgtataccgagcatgacaacccggaagagacgatgtaccaggtgctgcatcaccagtttgtcgccagcgccctggcagtgaaagccgcgcgtcgcattaacccggagatgaaagtcggctgtatgctggcgatggtgccgctctatccttactcctgtaacccggacgatgtgatgttcgctcaggagtcgatgcgcgaacgctacgtctttaccgatgtgcagctacgcggctattacccgtcctatgtgttgaacgagtgggagcgtcgcggatttaacatcaaaatggaagatggcgatctggatgtactgcgtgaaggcacctgcgattatcttggtttcagctattacatgatcaacgcagtgaaggccgaaggcggcaccggcgatgcgatctctggttttgaaggcagcgtaccgaacccgtatgttaaagcgtctgactggggctggcagattgatccagtaggtctgcgctatgccctttgcgaactgtatgagcgttatcagaggccgctgtttattgtcgaaaacggttttggcgcttacgacaaagtggaagaagatggctgcatcaacgacgactaccgcattgactacctgcgcgcccatattgaagagatgaaaaaagcagtgacttacgatggtgtggatctgatgggctacacactgtggggctgcatcgactgcgtgtcattcactaccgggcagtacagcaaacgctacggctttatctatgtgaataaacatgacgacggtactggcgatatgtcgctttcacgtaagaagagctttaactggtacaaagaggtgattgccagcaacggcgagaagctttaa

SEQ ID NO: 458423 - DNA, 312 bp, Shigella boydii
atgcagccaaacgacatcactttttttcaacgtttccaggatgacattatggctgggcgtaaaaccatcaccatccgcgacgagtctgaatcgcacttcaaaacgggtgatgtgcttcgtgtcggacgttttgaagatgacggttatttttgcacgattgaagtcaccgcaacctcaaccgtaacgctggatacgctgacggaaaaacatgcagagcaggaaaatatgaccctgactgaactgataaaggtcattgccgacatctatcccggtcagacacagttttatgtgattgaatttaaatgtctttaa

SEQ ID NO: 458424 - DNA, 660 bp, Shigella boydii
atggttcagaagcccctcattaagcagggatattcgctggcagaggaaattgccaacagcgtcagtcacggcattgggttggtgtttggtatcgttgggctggtgttgctactggttcaggcggtggatctcaatgccagcgccacagcgataaccagctacagcctctatggcggcagtatgatcctgctgttcctcgcttcgacgctctatcacgccattcctcatcaacgggcaaaaatgtggctgaagaaatttgaccattgcgctatttacctgttgattgccggaacctacacgccgtttttgctggtggggctggattctccgttagcgcgcgggttgatgattgttatctggagcctggcattgctggggattctgtttaaactgaccatcgcgcaccgattcaaaattttatctctggtgacctatctggcgatgggctggctgtcgctggtggtaatttatgaaatggcagttaagctcgcggcgggcagcgttaccttactggcggtaggcggcgtggtttattcgctcggagtgattttctatgtctgcaaacgcattccctacaatcatgccatctggcacggcttcgtgctcggcggcagtgtgtgccactttctggcgatctatttgtatattgggcaggcgtaa

SEQ ID NO: 458425 - DNA, 981 bp, Shigella boydii
atggcttttacaccttttcctccccgtcagcctacggcttctgcccgtttaccgctgacgctgatgacgcttgatgactgggcgcttgccaccattactggcgcggacagcgaaaaatatatgcagggtcaggtgacagcagatgtcagccagatgacagaaaatcagcacctgctcgccgcccattgcgacgccaaaggtaaaatgtggagcaatttacgtctgttccgcgacggcgatggctttgcgtggattgaacggcgcagcgtgcgtgaaccgcagctgactgaactgaaaaaatatgcggtgttctctaaagtgaccatcgcgccagacgacgagcgtgtgctgcttggtgttgccggttttcaggcgcgcgccgcgctcgccaatctctttagtgaactaccttcgagagaaaaacaggtagttaaagaaggcgcgaccactttgctatggtttgaacacccggcagaacgtttcctgatcgtaaccgatgaagctactgccaatatgctgaccgataaactgcgcggtgaagcggaactgaacaatagccaacagtggctggcattaaacattgaagcgggtttcccggtgattgatgccgcgaacagcgggcagtttatcccacaggcgaccaatctccaggcgctgggcggtatcagttttaagaaaggctgttataccggacaagagatggtggcgcgagcaaaattccgtggtgccaataaacgtgcgctctggttgctggcaggtagcgccagccgactgccggaagctggtgaagacttagagctgaaaatgggcgagaactggcgtcgtaccggtacggtgctggctgcggtaaaactggaagatggtcaggtcgtggtacaggtcgtcatgaataacgatatggaaccggacagcatcttccgcgtacgcgacgatgcgaatacactgcatatcgagccgctgccgtattcactcgaagagtaa

SEQ ID NO: 458426 - DNA, 267 bp, Shigella boydii
atggacattaacaacaaagcccgcattcattgggcatgccgccgtggtatgcgcgaactcgatatttcaatcatgccgtttttcgaacatgagtacgacagcttaagcgatgacgaaaaacgcatctttattcgtctgctggaatgtgacgatccggacctgtttaactggctgatgaatcacggtaaaccggccgatgcagaactggaaatgatggtccgactcatccagacacggaaccgggaacgtggtcctgtggcaatctga

SEQ ID NO: 458427 - DNA, 408 bp, Shigella boydii
gtggtcctgtggcaatctgatttgcgcgtctcctggcgcgcacagtggctttccttgctgattcatgggctggttgccgctgttattttactcatgccctggccgctcagttacaccccgttatggatggtgttactttcgctggtggtatttgattgcgttcgcagccagcggcgtattaatgctcgccagggggaaattcgattgttgatggacgggcgtttgcgttggcaagggcaggagtggagcatcgtcaaagcaccgtggatgattaagagcggcatgatgctgcgtttacgttctgatggcggtaaacggcaacatttatggctggcagccgacagcatggacgaagctgaatggcgggatttacggcggattttgttgcaacaagagacgcaaagataa

SEQ ID NO: 458428 - DNA, 522 bp, Shigella boydii
atgaatatgggtcttttttacggttccagcacctgttacaccgaaatggcggcagaaaaaatccgcgatattatcggcccagaactggtgaccttacataacctcaaggacgactccccgaaattaatggagcagtacgatgtgctcattctgggtatcccgacctgggattttggcgaaatccaggaagactgggaagccgtctgggatcagctcgacgacctgaaccttgaaggtaaaattgttgcactgtatgggcttggcgatcaactgggatacggcgagtggttcctcgatgcgctcggtatgctgcatgacaaactctcgaccaaaggcgtgaagttcgtcggctactggccaacggaaggatatgaatttaccagcccgaaaccggtgattgctgacgggcaactgttcgtgggtctggcgctggatgaaactaaccagtatgaccttagcgacgagcgtattcagagctggtgcgagcaaatcctcaacgaaatggcagagcattacgcctga

SEQ ID NO: 458429 - DNA, 897 bp, Shigella boydii
gtgaaacaggatctggcacgcatcgagcagtttcttgatgctctgtggctggaaaaaaatctggctgaaaatacgttgaacgcttaccgtcgcgatctgtcaatgatggtggagtggttgcatcaccgcgggttgacgctggcgacggcgcaaagtgacgatttgcaggcattactggcagaacggctagagggcgggtataaagccaccagctcagcgcgtttgctgagtgcagtgcgccgattgttccagtatctttatcgcgaaaagtttcgtgaagacgatcccagtgcgcatctcgcttcaccgaaattgccacagcgtttgccaaaagatttaagcgaagcgcaggtcgaacgtttattacaggcaccattaattgatcagccactggagctacgcgataaagccatgcttgaagtgttgtatgctaccgggctgcgtgtctctgaactggtcgggctgacaatgagtgatatcagcctacgtcagggcgtagtgcgggtcattggtaaaggcaacaaagagcgcctggtgccgttaggtgaagaggccgtttactggctggaaacctatctggaacatgggcgtccgtggctgttgaatggtgtgtcaattgacgtgttgtttcccagccagcgtgcgcagcagatgacgcgacagaccttctggcaccgcattaaacattatgccgtgctggcgggtatcgacagcgaaaagctgtcaccgcatgtgttgcgtcacgcttttgccactcatttattaaatcatggtgcggatttacgcgtggtgcagatgctactgggccacagcgatctctccaccacgcaaatttatacgcatgtcgctaccgagcgtctgcggcaacttcatcaacagcatcacccgcgggcgtga

SEQ ID NO: 458430 - DNA, 711 bp, Shigella boydii
atgaagaaaggttttatgttgtttactttgttagcggcgttttcaggctttgctcaggctgatgacgcggcaattcaacaaacgttagccaaaatgggcattaaaagcagcgatattcagccagcacccgtggctggcatgaagactgtgctgactaacagcggtgtgttgtacatcaccgatgacggtaaacatatcattcaggggccaatgtatgacgttagtggcgcggctccggtcaatgtcaccaataaaatgctgctaaagcagttgaatgcgcttgaaaaagagatgatcgtttataaagcgccgcaggaaaaacacgtcatcaccgtgtttactgatattacctgtgggtactgccacaaactgcatgagcaaatggcagactacaacgcgctggggatcaccgtgcgttatcttgctttcccgcgccaggggctggagagccaggctgagcaacaaatgaaagccatctggtgtgcgaaagataaaaacaaagcgtttgatgatgtgatggctggtaaagctgccactccggcaagttgcgatatcgatattgccgatcattacgcacttggcgtccagcttggcgttagcggcactccggcaattgtgctgagcaatggcacacttgttccgggttaccagccgccgaaagagatgaaagaattcctcgacgaacaccaaaaaatgaccagcggtaattaa

SEQ ID NO: 458431 - DNA, 1734 bp, Shigella boydii
gtgaaacaacagatacaacttcgtcgccgtgaagtcgatgaaacggcagacttgcccgctgaattgcctcccttgctgcgccgtttatacgccagccggggagtacgcagtgcgcaagaactggaacgcagtgttaaaggtatgttgccctggcagcaactaagcggtgtcgaaaaggccgttgagatcctttacaacgcttttcgcgaaggaacgcggattattgtggtcggtgatttcgacgccgacggcgcgaccagcacggctctaagcgtgctggcgatgcgcccgcttggttgcagcaatatcgactacctggtaccaaaccgtttcgaagacggttacggcttaagcccggaagtggtcgatcaggcccatgcccgtggcgcgcagttaattgtcacggtggataacggtatttcctcccatgcgggggttgaacacgctcgctcgttgggcattccggttattgttaccgatcaccatttgccaggcgaaacattacccgcggcggaagcgatcattaaccctaacttgcgcgactgtaatttcccgtcgaaatcactggcaggcgtgggtgtggcgttttatctgatgctggcgctgcgcacctttttgcgcgatcagggctggtttgatgagcgcggcatcgcaattcctaacctggcagaactgctggatctggtcgcgctggggacagtggcggacgtcgtgccgctggacgctaataatcgcattctgacctggcaggggatgagtcgcatccgtgccggaaagtgccgtccagggattaaagctctgctggaagtggcaaaccgtgatgcacaaaaactcgccgccagcgatttaggttttgcgctggggccacgtctcaatgctgccgggcgactggacgatatgtccgtcggtgtggcgctgttgctgtgcgacaacatcggcgaagcgcgcgtgctggcaaatgaactcgatgcgctaaatcagacgcgaaaagagatcgaacaaggaatgcagattgaagccttgaccctgtgcgagaaactggagcgaagtcgcgacacgctacccggcgggctggcaatgtatcaccccgaatggcatcagggcgttgtcggtattctggcttcgcgcatcaaagagcgttttcaccgtccggttatcgcctttgcgccagcaggtgatggtacgctgaaaggttccggtcgctccattcaggggctgcatatgcgtgatgcgctggagcgattagacacactctaccccggtatgatgctgaagtttggcggtcatgcgatggcggcgggtttgtcgctggaagaggataaattcgaactctttcaacaacggtttggcgagctggttaccgagtggctggacccttcgctattgcaaggcgaagtggtgtcagacggcccgttaagcccggccgaaatgaccatggaagtggcgcagctgctgcgcgatgctggcccgtgggggcagatgttcccggagccgctgtttgatggtcatttccgtctgctgcaacagcggctggtgggcgaacgtcatttgaaagtcatggtcgaaccggtcggcggcggtccgctgctggatggtattgcttttaatgtcgataccgccctctggccggataacggcgtgcgcgaagtgcaactggcttacaagctcgatatcaacgagtttcgcggcaaccgcagcctgcaaattatcatcgacaatatctggccaatttag

SEQ ID NO: 458432 - DNA, 882 bp, Shigella boydii
atgaaacaggggctggaagatgtttctggtctgctggaactggctgtagaagctgacgacgaagaaacctttaacgaagccgttgctgaactcgacgccctggaagaaaaactggcgcagcttgagttccgccgtatgttctctggcgaatatgacagcgccgactgctacctcgatattcaggcggggtctggcggtacggaagcacaggactgggcgagcatgcttgagcgtatgtatttgcgctgggcagaatcgcgtggtttcaaaactgaaatcatcgaagagtcggaaggtgaagtggcgggtattaaatccgtgacgatcaaaatctccggcgattacgcttacggctggctgcgtacagaaactggcgttcaccgcctggtgcgtaagagcccgtttgactccggtggtcgtcgccacacgtcgttcagctccgcgtttgtttatccggaagttgatgatgatattgatatcgaaatcaacccggcggatctgcgcattgacgtttatcgcgcgtccggcgcgggcggtcagcacgttaaccgtaccgaatctgcggtgcgtattacccacatcccgaccgggatcgtgacccagtgccagaacgaccgttcccagcacaagaataaagaccaggccatgaagcagatgaaagcgaagctttatgaactggagatgcagaagaaaaatgctgagaaacaggcgatggaagataacaaatccgacatcggctggggcagccagattcgttcttatgtccttgatgactcccgcattaaagatctgcgcaccggggttgaaacccgcaatacgcaggccgtgctggacggcagcctggatcaatttatcgaagcaagtttgaaagcagggttatga

SEQ ID NO: 458433 - DNA, 1518 bp, Shigella boydii
atgtctgaacaacacgcacagggcgctgacgcggtagtcgatcttaacaatgaactgaaaacgcgtcgtgagaagctggcgaacctgcgtgagcagggaattgccttcccgaacgatttccgtcgcgatcatacctctgaccaattgcacgcagaattcgacggtaaagagaacgaagaactggaagcgctgaacatcgaagtcgccgttgctggccgcatgatgacccgccgtattatgggtaaagcctcttttgttaccctgcaggacgttggcggtcgtattcagctgtacgttgcccgtgacgatcttccggaaggcgtttacaacgagcagttcaaaaaatgggatctcggcgacatcctcggcgcgaaaggtaaactgttcaaaaccaaaaccggcgaactgtctatccactgcaccgagctgcgtctgctgaccaaagcactgcgtccgctgccggacaaattccacggcttgcaggatcaggaagcgcgctatcgtcagcgttatctggatctcatctctaacgatgaatcccgcaacacctttaaagtgcgttcgcagatcctctctggcattcgccagttcatggtaaatcgcggctttatggaagttgaaacgccgatgatgcaggtgatcccaggcggtgccgctgcgcgtccgtttatcacccatcataacgcgctggatcttgacatgtacctgcgtatcgcgccggaactgtacctcaagcgtctggtggtcggtggcttcgagcgtgtattcgaaatcaaccgtaacttccgtaacgaaggtatttccgtacgtcataacccagagttcaccatgatggaactctatatggcttacgcagattacaaagatctgatcgagctgaccgaatcgctgttccgtactctggcacaggatattctcggtaagacggaagtcacctacggcgacgtgacgctggacttcggtaaaccgttcgaaaaactgaccatgcgtgaagcgatcaagaaatatcgcccggaaaccgacatggcggatctggacaacttcgactctgcaaaagcgattgctgaatctatcggcatccacgttgagaagagctggggtctgggccgtatcgttaccgagatcttcgaagaagtggcagaagcacatctgattcagccgaccttcattactgaatatccggcagaagtttctccgctggcgcgtcgtaacgacattaacccggaaatcacagaccgctttgagttcttcatcggtggtcgtgaaatcggtaacggctttagcgagctgaatgacgcggaagatcaggcgcagcgcttcctggatcaggttgccgcgaaagacgcaggtgacgacgaagcgatgttctacgacgaagattacgtcaccgcactggaacacggcttaccgccgacagcaggtctgggaattggtatcgaccgtatggtaatgctgttcaccaacagccataccatccgcgacgttattctgttcccggcgatgcgtccagtaaaataa

SEQ ID NO: 458434 - DNA, 549 bp, Shigella boydii
atgcaaacggaacacgtcattttattgaatgcacagggagttcccacgggtacgctggaaaagtatgccgcacacacggcagacaccctcttacatctcgcgttctccagttggctgtttaatgccaaggggcaattattagttacccgccgcgcactgagcaaaaaagcatggcctggcgtgtggactaactcggtttgtgggcacccacaactgggagaacgcaacgaagacgcagtgatccgccgttgccgttatgagcttggcgtggaaattacgcctcctgaatctatctatcctgactttcgctatcgcgccaccgatccgaatggcattgtggaaaatgaagtgtgtccggtatttgccgcacgcaccaacagtgcgttacagatcaacgatgatgaagtgatggattatcaatggtgtgatttagcagatgtattacacggtattgatgccacgccgtgggcgttcagtccgtggatggtaatgcaggcagccaatagtgaagcaagaaaattgttgtctgctttcgcgcagcacaattaa

SEQ ID NO: 458435 - DNA, 354 bp, Shigella boydii
atgaaaaccaaagttgctgctatttatggcaagcgggatgtccgtctgcgcgaatttgaactgccagaaattaccgataatgaactgttagtgagtgtaatttctgacagcgtctgtttatcgacctggaaagcggcgttactcggtagtgaacataaacgcgtacccgacgatttagaaaatcatccggtcattaccgggcatgaatgtgccggggttattgtcgaagtgggtaaaaatctcactggcaaatataaaaaaggccagcgttttgtattgcaaccggcgatggggttaccaagcggatattcagcaggctacagctacgaatattttggcggtaacgccacctag

SEQ ID NO: 458436 - DNA, 1389 bp, Shigella boydii
atggaaaacaagtctgctcgtgcaaaggtccaggcttttgggggctttttgactgcaatggtcatccccaatattggtgcttttattgcctggggttttattactgcgttatttattcccaccggttggctgcctaacgaacatttcgccaaaattgtcggcccgatgattacctatttattgcccgtgatgattggttctacaggtggtcatctggtcggcggtaaacgcggggcggtcatgggcggaataggtactattggtgtgatcgttggcgcagagatcccgatgttccttggctcaatgatcatggggccgctcggtgggttggtcataaaatatgtcgataaggcactggaaaaacgcatacctgccggttttgagatggttatcaataacttctcattaggtatcgcggggatgctcctttgtctgctgggttttgaagtgatcggcccggcggtgttaattgccaatactttcgtcaaagagtgtatcgaggcgctggtacatgcgggttatctgcctctgctgtcagtcatcaatgaaccggcgaaagtgcttttccttaataatgcgatcgatcagggcgtctattatccgctgggaatgcaacaggcttcggttaacggtaaatccatcttctttatggtggcctctaacccaggtccgggcctggggctgctgctggcgtttaccttgtttggtaaagggatgagtaaacgttctgcgcccggggcgatgattattcacttcctcggtgggatccacgaactgtatttcccatatgtgctgatgaagccgctgactattattgccatgattgcgggcggtatgtctggtacctggatgtttaacttactggacggtggtctggtggctggcccaagtccggggtctatctttgcttacctggcactgacgccgaaaggctcgttcctggcgacaattgccggtgttacggtaggtaccctggtgtcctttgctattacttcgctgatactgaagatggaaaaaacggtggaaacggagagcgaagatgagtttgctcagtcagccaatgcggttaaggcgatgaaacaagagggtgcattctcgttaagcagggttaagcgtatcgcctttgtttgcgatgcggggatgggctccagtgcgatgggcgcgaccaccttccgtaaacgcctggaaaaagcggggctggcaatagaagtaaaacattacgcgatagaaaacgtgcctgcggatgccgatatcgtcgtcactcacgccagtctggaagggcgcgtgaaacgtgtgacggataaaccgctgatattgattaataactatattggcgatccaaaactcgacactttatttaatcaattaaccgccgaacataaacactga

SEQ ID NO: 458437 - DNA, 444 bp, Shigella boydii
atgcggcttagtgactattttccagaatcatcaatctcagttatacattcagcaaaagattggcaggaagctatcgatttctcgatggtatcattgctggataaaaactatatcagcgagaattacattcaggcaattaaagattccaccattaacaatggcccttattatattctcgcaccaggcgtggcaatgcctcatgcgcgaccggaatgtggggcgcttaaaaccgggatgtctttgacattacttgaacaaggtgtttattttccggggaatgacgaaccaattaaattactcatcggactctctgctgccgatgccgattcgcacattggcgctattcaggcgttaagtgaattactgtgcgaagaagaaatactcgaacaactcttaacagcatcaccagaaaaacaattagcggacattatcagccgcggataa

SEQ ID NO: 458438 - DNA, 1992 bp, Shigella boydii
atgtcctcacgtaaagagcttgccaatgctattcgtgcgctgagcatggacgcagtacagaaagccaaatccggtcacccgggtgcccctatgggtatggctgacattgccgaagtcctgtggcgtgatttcctgaaacacaacccgcagaatccgtcctgggctgaccgtgaccgcttcgtgctgtccaacggccacggctccatgctgatctacagcctgctgcacctcaccggttacgatctgccgatggaagaactgaaaaacttccgtcagctgcactctaaaactccgggccacccggaagtgggttacaccgctggtgtggaaaccaccaccggtccgctgggtcagggtattgccaacgcagtcggtatggcgattgcagaaaaaacgctggcggcgcagtttaaccgtccgggccacgacattgtcgaccactacacctacgccttcatgggcgacggctgcatgatggaaggcatctcccacgaagtttgctctctggcgggtacgctgaagctgggtaaactgattgcgttctacgatgacaacggtatctctattgatggtcacgttgaaggctggttcaccgacgacaccgcaatgcgtttcgaagcttacggctggcacgttattcgcgacatcgacggtcatgacgcggcatccatcaaacgcgcagtagaagaagcgcgcgcagtgactgacaaaccgtccctgctgatgtgcaaaaccatcatcggtttcggttccccgaacaaagccggtactcacgactcccacggtgcgccgctgggcgacgctgaaattgccctgacccgcgaacagctgggctggaaatatgcaccgttcgaaatcccgtctgaaatctatgctcagtgggatgcgaaagaagcaggccaggcgaaagaatccgcatggaacgagaaattcgctgcttacgcgaaagcttatccgcaggaagccgctgaatttacccgccgtatgaaaggcgaaatgccgtctgacttcgacgcgaaagcaaaagagttcattgctaaactgcaggctaacccggcgaaaatcgccagccgtaaagcgtctcagaatgctatcgaaactttcggtccgctgttgccggaattcctcggcggttctgctgacctggcaccgtctaacctgaccctgtggtctggttctaaagcaatcaacgaagatgctgcgggtaactacatccactacggtgttcgcgagttcggtatgaccgcgattgctaacggtatctccctgcacggtggtttcctgccgtacacctccaccttcctgatgttcgtggaatacgcacgtaacgccgtacgtatggctgcgctgatgaaacagcgtcaggtgatggtttacacccacgactccatcggtctgggcgaagatggcccgactcaccagccggtagagcaggtcgcttctctgcgcgtaaccccgaacatgtctacatggcgtccgtgtgaccaggttgaatccgcggtcgcgtggaaatacggtgttgagcgtcaggacggcccgaccgcactgatcctctcccgtcagaacctggcgcagcaggaacgaactgaagagcaactggcaaacatcgcgcgcggtggttatgtgctgaaagactgcgccggtcagccggaactgattttcatcgctaccggttcagaagttgaactggctgttgctgcctacgaaaaactgactgccgaaggcgtgaaagcgcgcgtggtgtccatgccgtctaccgacgcatttgacaagcaggatgctgcttaccgtgaatccgtactgccgaaagcggttactgcacgcgttgcggtagaagcgggtattgctgactactggtacaagtatgttggcctgaatggcgctatcatcggtatgaccaccttcggtgagtcagctccggcagagttgctgttcaaagagttcggcttcaccgtcgacaacgtcgttgcgaaagcaaaagaactgctgtaa

SEQ ID NO: 458439 - DNA, 759 bp, Shigella boydii
atgaaaattcgcgccttattggtagcaatgagcgtggcaacggtactgactggttgccagaatatggactccaacggactgctctcatcaggagcggaagcttttcaggcttacagtttgagtgatgcgcaggtgaaaaccctgagcgatcaggcatgtcaggagatggacagcaaggcgacgattgcgccagccaatagcgaatacgctaaacgtctgacaactattgccaatgcgctaggcaacaatatcaacggtcagccggtgaattacaaagtgtatatggcgaaggatgtgaacgcctttgcaatggctaacggctgtatccgcgtctatagcgggctgatggatatgatgacggataacgaagtcgaagcggtgatcggtcacgagatggggcacgtggcgttaggccatgtgaagaaagggatgcaggtggcgcttggtacaaatgccgtgcgagtagctgcggcctctgcgggcgggattgtcggcagtttatctcaatcacaacttggtgatctgggcgagaaattagtcaattcgcaattctcccagcgccaggaagcagaagccgatgattattcttacgatcttctgcgccaacgcggcatcagcccggcaggtcttgccaccagctttgaaaaactggcgaaactggaagaaggccgccaaagctcaatgtttgacgaccatccggcatccgccgaacgcgcccagcatattcgcgatcgcatgagcgcggatgggattaagtaa

SEQ ID NO: 458440 - DNA, 921 bp, Shigella boydii
atgagcaccttaggtaatcaatacgataactcactggtttccaacgcctttggttttttacgcctgccgatgaacttccagccgtatgacagcgatgctgactgggtgattactggtgtgccgttcgatatggccacttctggtcgtgcggggggacgccacggtccggcagcgatccgtcaggtttcgacgaatcttgcctgggaacacaatcgcttcccgtggaatttcgacatgcgtgagcgcctgaacgtcgtggactgcggcgatctggtatatgcctttggcgatgcccgtgagatgagcgaaaaactgcaggcacacgccgagaagctgctggctgccggtaagcgtatgctctctttcggtggtgaccactttgttacgctgccgctgctgcgtgctcatgcgaagcatttcggcaaaatggcgctggtacactttgacgcccacaccgatacctacgcgaacggttgtgaatttgaccacggcaccatgttctataccgcgccgaaagaaggtctgatcgacccgaatcattccgtgcagattggtattcgtaccgagtttgataaagacaacggttttaccgtgctggacgcctgccaggtgaacgatcgcagcgtggatgacgttatcgcccaagtgaaacagattgtgggtgatatgccggtttacctgacctttgatatcgactgcctggatcctgctttcgcgccgggaaccggtacgccagtgattggcggcctgacctccgatcgcgccattaaactggtacgcggcctgaaagatctcaacattgttgggatggacgtagtggaagtggctccggcatacgatcagtcggaaatcaccgctctggctgcggcgacgctggcgctggagatgctgtatattcaggcggcgaaaaagggcgagtaa

SEQ ID NO: 458441 - DNA, 1977 bp, Shigella boydii
atgtctgacgacatgtctatgggtttgccttcgtcagcgggcgaacacggtgtactacgctccatgcaggaggttgcaatgagctcccaggaagccagcaagatgctgcgtacttacaatattgcctggtggggcaataactactatgacgttaacgagctgggccacatcagcgtgtgcccggacccggacgtcccggaagctcgcgtcgatctcgcgcagttagtgaaaactcgtgaagcacagggtcagcgtctgcctgcactgttctgtttcccacagatcctgcagcaccgtttgcgttccattaacgccgcgttcaaacgtgcgagggaatcctacggctataacggcgattacttccttgtttatccgatcaaagttaaccagcaccgccgcgtgattgagtccctgattcattcgggcgaaccgctgggtctggaagccggttccaaagccgagttgatggcagtgctggcacatgctggcatgacccgtagcgtcatcgtctgcaacggttataaagaccgcgaatatatccgcctggcattaattggcgagaagatggggcacaaggtctatctggtcattgagaagatgtcagaaatcgccattgtgctggatgaagcagaacgtctgaatgtcgttcctcgtctgggcgtgcgtgcacgtctggcttcgcagggctcgggtaaatggcagtcttccggcggggaaaaatcgaagttcggcctggctgcgactcaggtactgcaactggttgaaacgctgcgtgaagctgggcgtctcgacagcctgcaactactgcacttccacctcggttcgcagatggcgaatattcgcgatatcgccacgggcgttcgtgaatccgcgcgtttctatgtggaactgcacaagctgggcgtcaatattcagtgcttcgacgtcggcggcggtctgggcgtggactatgaaggcacccgttcgcagtctgactgctccgtaaactacggcctcaatgaatatgccaacaacatcatctgggcgattggtgatgcgtgtgaagaaaacggtctgccgcatccgacggtaatcaccgaatcgggtcgtgcggtgactgcgcatcacaccgtgctggtgtctaatatcatcggcgtggaacgtaacgaatacacggtgccgaccgcgcctgcagaagatgcgccgcgcgcgctgcaaagcatgtgggaaacctggcaggagatgcacgaaccgggaactcgccgttctctgcgtgaatggttacacgacagtcagatggatctgcacgacattcatatcggctactcttccggcacctttagcctgcaagaacgtgcatgggcagaacaactctatctgagcatgtgccatgaagtgcagaagcaactggatccgcaaaaccgtgcgcatcgtccgataatcgacgaactgcaggaacgtatggcggacaaaatgtacgtcaatttctcgctgttccagtcaatgccggacgcatgggggatcgaccagttgttcccggttctgccgctggaagggctggatcaagtgccggaacgtcgcgctgtgctgctggatattacctgtgactctgacggtgctatcgaccactatattgatggtgatggtattgccacgacaatgccaatgccggagtacgatccagagaatccgccgatgctcggtttctttatggtcggcgcatatcaggagatcctcggcaacatgcacaacctgttcggtgataccgaagcggttgacgtgttcgtcttccctgacggtagtgtagaagtggaactgtctgacgaaggcgataccgttgcggatatgctgcaatatgtgcagctcgatccgaaaacgctgttaactcagttccgcgatcaagtgaagaaaaccgatcttgatgctgaactgcaacaacagttccttgaagagttcgaggcaggtttgtacggttatacttatctggaagatgagtaa

SEQ ID NO: 458442 - DNA, 252 bp, Shigella boydii
gtggtagcggatcctaccacgactctgcaggttaaaaacactggcagtctgagtgttaatcggtatggatggattaacatctggatggctattttaggtcaattcttcacccgatttccacttttttttgaatcgtgtctcattctgttaaaaacgtggctggaaatttttcctgacaatgccggcattctgcgtatttatattttgcaattttctgccattgtggggtataaaacgcagcgcgcggcttaa

SEQ ID NO: 458443 - DNA, 1155 bp, Shigella boydii
atggcaaaacacctttttacgtccgagtccgtctctgaagggcatcctgacaaaattgctgaccaaatctctgatgccgttttagacgcgatcctcgaacaggatccgaaagcacgcgttgcttgcgaaacctacgtaaaaaccggcatggttttagttggcggcgaaatcaccaccagcgcctgggtagacatcgaagagatcacccgtaacaccgttcgcgaaattggctatgtgcattccgacatgggctttgacgctaactcctgtgcggttctgagcgctatcggcaaacagtctcctgacatcaaccagggcgttgaccgtgccgatccgctggaacagggcgcgggtgaccaaggtctgatgtttggctacgcaactaatgaaaccgacgtgctgatgccagcacctatcacctatgcacaccgtctggtacagcgtcaggctgaagtgcgtaaaaacggcactctgccgtggctgcgcccggacgcgaaaagccaggtgactttccagtatgacgacggcaaaatcgttggtattgatgctgtcgtgctttccactcagcactctgaagagatcgaccagaaatcgctgcaagaagcggtaatggaagagatcatcaagccaattctgcccgctgaatggctgacttctgccaccacattcttcatcaacccgaccggtcgttttgttatcggtggcccgatgggtgactgcggtctgactggtcgtaaaattatcgttgatacctacggcggcatggcacgtcacggtggcggagcattctctggtaaagatccatcaaaagtggaccgttccgcagcctacgcagcacgttatgtcgcgaaaaacatcgttgctgctggcctggccgatcgttgtgaaattcaggtttcctacgcaatcggcgtggctgaaccgacctccatcatggtagaaactttcggtactgagaaagtgccttctgaacaactgactctgctggtacgtgagttcttcgacctgcgcccatacggtctgattcagatgctggatctgctgcacccgatctacaaagaaaccgcagcatacggtcactttggtcgtgaacatttcccgtgggaaaaaaccgacaaagcgcagctgctgcgcgatgctgccggtctgaagtaa

SEQ ID NO: 458444 - DNA, 1395 bp, Shigella boydii
atgcctgacgctaaaaaacaggggcggtcaaacaaggcaatgacgtttttcgtctgcttccttgccgctctggcgggattactctttggcctggatatcggtgtaattgctggcgcactgccgtttattgcagatgaattccagattacttcgcacacgcaagaatgggtcgtaagctccatgatgttcggtgcggcagtcggtgcggtgggcagcggctggctctcctttaaactcgggcgcaaaaagagcctgatgatcggcgcaattttgtttgttgccggttcgctgttctctgcggctgcgccaaacgttgaagtactgattctttcccgcgttctactggggctggcggtgggtgtggcctcttataccgcaccgctgtacctctctgaaattgcgccggaaaaaattcgtggcagtatgatctcgatgtatcagttgatgatcactatcgggatcctcggtgcttatctttctgataccgccttcagctacaccggtgcatggcgctggatgctgggtgtgattatcatcccggcaattttgctgctgattggtgtcttcttcctgccagacagcccacgttggtttgccgccaaacgccgttttgttgatgccgaacgcgtgctgctacgcctgcgtgacaccagcgcggaagcgaaacgcgaactggatgaaatccgtgaaagtttgcaggttaaacagagtggctgggcgctgtttaaagagaatagcaacttccgccgcgcggtgttccttggcgtactgttacaggtaatgcagcaattcaccgggatgaacgtcatcatgtattacgcgccgaaaatcttcgaactggcgggttataccaacactaccgagcaaatgtgggggacagtgattgtcggcctgaccaacgtacttgccacctttatcgcaatcggccttgttgaccgctggggacgtaaaccaacgctaacgctgggcttcctggtgatggctgctggcatgggcgtactcggtacaatgatgcatatcggtattcactctccgtcagcgcagtatttcgccatcgccatgctgctgatgtttattgtcggttttgccatgagtgccggtccgctgatttgggtactgtgctccgaaattcagccgctgaaaggccgcgattttggcatcacctgctccaccgccaccaactggattgccaacatgatcgttggcgcaacgttcctgaccatgctcaacacactgggtaacgccaacaccttctgggtgtatgcggctctgaacgtactgtttatcctgctgacattgtggctggtaccggaaaccaaacacgtttcgctggaacatattgaacgtaatctgatgaaaggtcgtaaactgcgcgaaataggcgctcacgattaa

SEQ ID NO: 458445 - DNA, 456 bp, Shigella boydii
atgcgtcgcctgcgggaaaaactcgcccaggctaacctgaaattggggcgtaactacccggagccaaaactctcttatacccagcgcggcacctccgccggaacagcctggctggaaagctataaaatccgcctcaatcccgttttgctgttggaaaacagtgaagcctttattgaagaagtggtgccgcacgaactggcacatttgctggtatggaaacatttcgggcgcgtagcaccacatggcaaagagtggaagtggatgatggaaaacgtgctgggtgttcccgcccgtcgtacgcatcagttcgaactgcaatccgtgcgtcgcaacaccttcccctaccgctgcaagtgccaggagcatcagcttaccgtacgccgccataatcgcgtagttcgtggcgaagccgtctatcgctgtgttcactgcggcgaacaactggtcgcaaaataa

SEQ ID NO: 458446 - DNA, 708 bp, Shigella boydii
atgtaccgttatttgtctattgctgcggtggtactgagcgcagcattttccggcccggcgttggccgaaggtatcaatagtttttctcaggcgaaagccgcggcggtaaaagtccacgctgacgcgcccggtacgttttattgcggatgtaaaattaactggcagggcaaaaaaggcgttgttgatctgcaatcgtgcggctatcaggtgcgcaaaaatgaaaaccgagccagccgcgtagagtgggaacacgtcgttcccgcctggcagttcggtcaccagcgccagtgctggcaggacggtggacgtaaaaactgcgctaaagatccggtctatcgcaagatggaaagcgatatgcataacctgcagccgtcagtcggtgaggtgaatggcgatcgcggcaactttatgtacagccagtggaatggcggcgaaggccagtacggtcaatgcgccatgaaggtcgatttcaaagaaaaagctgccgaaccaccagcgcgtgcacgcggtgccattgcgcgcacctacttctatatgcgcgaccaatacaacctgacactctctcgccagcaaacgcagctgttcaacgcatggaacaagatgtatccggttaccgactgggagtgcgagcgcgatgaacgcatcgcgaaggtgcaaggcaatcataacccgtatgtgcaacgcgcttgccaggcgcgaaagagctaa

SEQ ID NO: 458447 - DNA, 732 bp, Shigella boydii
atgcgtatcccccgcatttatcatcctgaaccactgaccagccattctcacatcgcgctttgcgaagatgccgccaaccatatcgggcgcgtactgcgcatggggccggggcaggcgttgcaattgtttgacggtagcaaccaggtctttgacgccgaaattaccagcgccagcaaaaaaagcgtggaagtgaaggtgctggaaggcaagatcgacgatcgcgaatctccgctgcatattcacctcggtcaggtgatgtcgcgtggtgaaaaaatggaatttacgatccagaaatcgatcgaactcggtgtaagcctcattacgccacttttttctgagcgctgcggcgttaaactggatagtgaacgtctgaacaagaagctccagcagtggcagaagattgcaattgctgcctgtgagcagtgtggtcgtaaccgggtgccggaaatccgtccagcgatggatctggaagcctggtgtgcagagcaggatgaaggactgaaactgaatcttcacccgcgcgccagtaacagcatcaatacgttgccgttaccggttgaacgcgtccgcctgctgattggcccggaaggcggtttatcggcagatgaaattgccatgactgcccgctatcaatttactgatatcctgttgggacctcgcgttttgcgtacagagacaactgcgctcaccgccattaccgcgctacaagtacgatttggcgatttgggctaa

SEQ ID NO: 458448 - DNA, 951 bp, Shigella boydii
atgatcaagctcggcatcgtgatggaccccatcgcaaacatcaacatcaagaaagattccagtttcgctatgttgctggaagcacagcgtcgtggttacgaacttcactatatggagatgggcgatctgtatctgatcaatggcgaagcccgcgcccatacccgcacgctgaacgtgaagcagaactacgaagagtggttttcgttcgtcggtgaacaggatctgccgctggccgatctcgatgtgctcctgatgcgtaaagacccgccgtttgataccgagtttatctacgcgacctatattctggaacgtgccgaagagaaagggacgctgatcgttaacaagccgcagagcctgcgcgactgtaacgagaaactgtttaccgcctggttctctgacttaacgccagaaacgctggttacgcgcaataaagcgcagctaaaagcgttctgggagaaacacagcgacatcattcttaagccgctggacggtatgggcggcgcgtcgattttccgcgtgaaagaaggcgatccaaacctcggcgtgattgccgaaaccctgactgagcatggcactcgctactgcatggcgcaaaattacctgccagccattaaagatggcgacaaacgcgtgctggtggtggatggcgagccggtaccgtactgcctggcgcgtattccgcaggggggcgaaacccgtggcaatctggctgccggtggtcgcggtgaacctcggccgctgacggaaagtgactggaaaatcgcccgtcagatcgggccgacgctgaaagaaaaagggctgatttttgttggtctggatatcatcggcgaccgtctgactgaaattaacgtcaccagcccaacctgtattcgtgagattgaagcagagtttccggtgtcgatcaccggaatgttaatggatgccatcgaagcacgtttacagcagcagtaa

SEQ ID NO: 458449 - DNA, 636 bp, Shigella boydii
gtgacagcgcccttctttccacgcatactgggcgctgttgcttttttgaaccaggaaacagaacctctgacaatgaatttacagcatcactttcttattgccatgcctgctctccaggatccgattttccgtcgttccgtggtctacatttgcgaacataataccaatggtgcaatggggatcatcgtcaacaagccgctggaaaacctcaaaattgaagggattctggaaaagctgaagatcacgccggagccgcgtgatgaatcaatccgtctggataaaccggttatgctcggcggcccactggctgaagatcgcgggtttattttgcatactccgccctccaattttgcttccagcattcgcatttcagacaacacggtgatgaccacttcccgcgatgtgctggaaacgctcggcaccgataaacaaccgtctgacgtattggtggctctgggctatgcctcctgggaaaaaggtcaactggaacaagaaattctcgataacgcgtggctaacggccccggcggatctgaatattctgttcaaaacgccgattgccgaccgctggcgcgaggcggcaaaactgattggtgtggatattctcaccatgcctggtgtggcagggcacgcctga

SEQ ID NO: 458450 - DNA, 417 bp, Shigella boydii
atgagtggaaccttactcgccttcgacttcggcaccaaaagcattggcgtagcggtcggccaacgcattaccggcactgctcgccctttgcctgcaattaaagcacaggacggtacgccggactggaacctcatcgaacgtttactgaaagagtggcagccggacgaaatcatcgtcggtttgccgctgaatatggacggcaccgagcaaccattgactgccagagcgcgtaaatttgccaaccgtattcatggtcgtttcggtgttgaagtaaagctccatgacgaacgtcttagcaccgtggaagcccgttccggtctgtttgaacagggcggctatcgggcgctcaacaaaggcaaagtcgactcagcctctgcggttattattctcgaaagctatttcgagcagggatattaa

SEQ ID NO: 458451 - DNA, 981 bp, Shigella boydii
atgaatatggaagaaattgtggcccttagtgtaaagcataacgtctcggatctacacctgtgcagcgcctggcccgcacgatggcgcattcgcgggctaatggaagctgcgccgtttgatgcgccggacgtcgaagagctactgcgggagtggctggatgacgatcagcgggcaatattgctggaaaatggccagctggattttgccgtgtcgctggcggaaaaccagcgattgcgtggcagcgcattcgcgcaacggcatggcatttcgctggcgttacggctgttaccttcgcactgcccgcagctcgaacagcttggcgcaccaacggtattgccggaattactcaagagcgagaatggcctgattctggtgacgggggcgacggggagcggcaaatctaccacgctggcggcgatggttggctatctcaatcaacatgccgatgcgcatattctgacgctggaagatcctgttgaatatatctatgccagccagcgatgtttgatccagcagcgggaaattggtttgcactgtatgacgttcgcatcgggattgcgggccgcattgcgggaagatcctgatgtgattttgctcggagagctgcgtgacagcgagccaatccgtctggcactgacggcggcagaaaccgggcatttggtgctggcaacattacatacgcgtggtgccgcgcaggcagttgagcgactggtggattcatttccggcgcaggaaaaagatcccgtacgtaatcaactggcaggtagtttacgggccgtgttgttacaaaagctggaagtggataaacaggaaggacgcgtggcgctgtttgaattattgattaacactcccgcggtggggaatttgattcgcgaagggaaaacccaccagttaccgcatgttattcaaaccgggcagcaggtggggatgataacgtttcagcagagttatcagcagcgggtgggggaagggcgtttgtga

SEQ ID NO: 458452 - DNA, 705 bp, Shigella boydii
atgaacgatattgcgcataacctggcacaggtccgggacaaaatctcagcggctgcaacgcgttgcggccgttctccagaagaaattacgctgcttgcagtcagtaaaacaaaacctgcgagcgccatcgcagaagccattgatgccgggcagcgtcaatttggtgaaaactacgttcaggaaggggtagataaaattcgccactttcaggaactgggcgtaacaggattagaatggcattttattggcccgttgcagtctaataaaagccgcctggtggcagagcatttcgactggtgtcataccatcgaccgtttgcgcattgctacccgcctcaacgatcagcgcccggcagaacttccccctcttaacgtactgattcaaattaatattagtgatgaaaacagtaagtctgggattcaactggcagaactggacgagctggcagcggcggtcgctgaactaccgcgtttacgtctgcgcgggctgatggcaatccctgcgcctgagtcagaatatgtaaggcagtttgaagttgcacgccaaatggctgtagcatttgccggactgaaaacgcgctacccgcatatcgacacgctctctctgggaatgtcggacgatatggaagccgccattgcggcaggtagcacgatggttcgtatcggcactgcaatttttggtgcgcgtgattactctaaaaaataa

SEQ ID NO: 458453 - DNA, 567 bp, Shigella boydii
atgaatacgttgactttcctgctttcaacggtcattgagctgtataccatggtgctgttattacgcatctggatgcagtgggctcattgtgatttttacaaccccttctcacagtttgtagtgaaggtaacgcagccaattatcgggccactgcgccgcgttattccggcaatgggtcccattgacagcgcctcgctgctggttgcctatattctcagttttatcaaagccattgtgctgtttaaagtggtgaccttcctgccaatcatctggattgccggtttactgattctgctgaaaaccatcggcttgctgattttctgggtcctgctggtgatggcgattatgagctgggtaagccagggtcgtagcccgattgaatacgtgctgattcagctggccgatccgctgctgcgcccgattcgccgcttgctaccggcaatgggtgggattgatttctcgccgatgatcctcgttctgctgctgtatgtcatcaatatgggtgtcgcagaagtattacaggcaaccggaaacatcctgctgccggggctgtggatggcgttatga

SEQ ID NO: 458454 - DNA, 291 bp, Shigella boydii
atgaatgccgtaacagttaatgatgacggtctggttttacggctctatattcagccgaaagccagccgtgattctattgtcggtttacatggcgacgaagttaaagtcgccattaccgcgccgccagttgacggccaggccaacagtcatctggtgaagtttctcggtaagcaattccgggttgccaaaagccaggtggtgattgaaaaaggcgaacttggccgccacaaacaaattaaaatcattaatccgcaacaaatcccgccagaaatcgcggcgttaattaattag

SEQ ID NO: 458455 - DNA, 594 bp, Shigella boydii
atgcaaaaagttgtcctcgcaaccggcaatgccggtaaagtgcgtgagctggcgtcgctgcttagcgactttggtcttgatatcgtggcacaaacagacctcggcgttgattccgctgaagaaaccggcctaacctttatcgaaaacgcgattctgaaagcgcgccatgcggcaaaagtgaccggtttaccggcaattgccgacgactctggtctggcggtagatgcgctgggtggcgcgccgggtatttactccgcgcgttattccggtgaagacgcgaccgatcaaaagaatctgcaaaaactgttggaaacactgaaagacgtaccggacgaccaacgtcaggcacgtttccactgcgtgctggtatatctgcgtcacgcggaagatccgactccgctggtatgccacggcagctggccgggcgtgattactcgcgaaccagcgggcactggtggctttggttatgatccaatcttcttcgtaccttccgaagggaaaaccgccgccgaactgacccgcgaagaaaagagcgccatttcccaccgtggtcaggcgttgaaactgctgctggacgctttacgtaatggttaa

SEQ ID NO: 458456 - DNA, 1137 bp, Shigella boydii
atggttaaattaccgccgctgagtctctacattcacatcccgtggtgcgtgcagaaatgcccgtactgcgatttcaactctcacgcgttgaaaggagaagtgccgcacgacgattatgttcagcatctgctttgcgatctggacaatgatgtggcttacgctcagggccgtgaagtaaagacaatctttattggcggtggtacgccgagcctgctttccggcccggcgatgcaaacgctgctggacggcgtgcgtgcgcgtttgccgctggcagcggatgcagaaattactatggaagcgaaccctggtacggtagaagccgatcgctttgtcgattatcagcgtgctggtgtgaaccgcatctctattggtgtgcagagttttagcgaagaaaagctgaaacgacttgggcgcattcatggcccgcaagaagcgaaacgagcggcaaagctggcgagcggtttagggttacgtagctttaaccttgatttgatgcatggactaccggatcaatcactggaagaggcgcttggcgatctacgccaggccattgaactgaatccgccgcatctttcctggtatcaactgaccatcgaacccaatacgctgtttggttcgcgaccaccggtgctgccggacgatgacgcgctgtgggatattttcgaacaggggcatcagttattaaccgcagcgggttatcagcaatatgaaacttccgcttacgccaaacccggttatcagtgccagcacaatctcaactactggcgatttggtgactacatcggtattggctgcggcgcgcacggcaaagtcaccttcccggatgggcgcattctgcgtaccactaaaacgcgtcatcctcgtggttttatgcaaggaaggtatctggaaagccagcgtgatgtcgaagccgcagataagccgtttgagttctttatgaaccgctttcgcttgctggaggccgcgccacgcgcagagtttagtgcgtataccgggctttgcgaagatgtgattcgcccacagttagacgaggcgattgcccagggttatctcacagaatgtgcggattactggcagataacggaacatgggaagctgtttttaaattcgctgctggagctttttctggctgagtaa

SEQ ID NO: 458457 - DNA, 1008 bp, Shigella boydii
gtgaaaaagcaatggattgttggcacggcactgcttatgttgatgactggtaatgcctgggcagatggcgaaccgccaactgaaaatatcttaaaagatcaattcaaaaagcagtatcacggcattctcaagcttgatgctatcaccttaaaaaatcttgatgctaagggtaatcaggccacctggtcagcggaaggcgatgtctcttccagtgacgatctctatacctgggtcggtcagttggcagattacgaactgctcgaacagacctggacgaaagataaaccggtaaaattctcggcgatgttaaccagtaaaggaacgcccgcgtctggctggtcggtgaacttttactcttttcaggcggcagccagcgatcgtgggcgggtggtcgacgatatcaaaacgaataataaatatctgatcgtgaatagcgaagatttcaattatcgctttagtcagcttgaatctgcgttgaatacccagaagaactcgattcctgcgctggaaaaggaagtgaaagcgcttgataagcaaatggtggcggcgcagaaagcagcggatgcatattggggaaaagatgcaaacggtaagcaaatgacccgcgaagaagcctttaaaaaaattcaccaacagcgtgatgagtttaataaacagaacgatagcgaggcgttcgcggttaaatatgacaaagaggtttatcaaccggcgattgcggcatgtcataaacagagtgaagagtgttatgaagtgccgattcagcagaaacgagatttcgatatcaacgaacaacggcgacagacttttctgcaatcacaaaaactcagccgtaaattgcaggatgactgggtaacgctcgaaaaagggcaatatccgttaacgatgaaagtttcagaaataaacagtaaaaaagtcgcgattttgatgaaaattgacgatatcaaccaagctaatgaacgctggaaaaaagataccgaacaactgcggcgcaatggggtgattaagtaa

SEQ ID NO: 458458 - DNA, 1047 bp, Shigella boydii
atggagtttttcaaaaagacggcacttgccgcactggttatgggttttagtggtgcagcattggcattacccaatatcaccattttagcaaccggcgggaccattgccggtggtggtgactccgcaaccaaatctaactacacagcgggtaaagttggcgtagaaaatctggttaatgcggtgccgcaactaaaagacattgcgaacgttaaaggcgagcaggtagtgaatatcggctcccaggacatgaacgataatgtctggctgacactggcgaaaaaaattaacaccgactgcgataaaaccgacggcttcgtcattacccacggtaccgacacgatggaagaaaccgcttacttcctcgacctgacggtgaaatgcgacaaaccggtggtgatggtcggcgcaatgcgcccgtccacgtccatgagcgcagacggtccattcaacctgtataacgcggtagtgaccgcagctgataaagcatccgctaatcgtggcgtgctggtggtgatgaacgacactgtactggacggtcgcgatgtaaccaaaaccaacaccaccgacgtagcgaccttcaagtctgttaactacggtcctctgggatacattcacaacggtaagattgactaccaacgtaccccggcacgtaagcacaccagcgatacgccattcgatgtctctaagctgaatgagctgccgaaagtcggcatcgtttataactacgctaacgcatccgatcttccggctaaagcactggtagatgcgggctatgatggcatcgttagcgctggtgtgggtaatggtaacctgtataaatccgtgttcgacaccctggcaaccgccgcgaaaaacggcactgcagtagtgcgttcttcccgcgtaccgacgggtgctaccactcaggatgctgaagtggatgatgcgaaatacggcttcgtcgcctctggcacgctgaacccgcaaaaagcgcgcgtcctgctgcagctggctctgacgcaaaccaaagatccgcagcagatccagcagatcttcaatcagtactaa

SEQ ID NO: 458459 - DNA, 720 bp, Shigella boydii
atgatgcgcaaaatgctgctggcggcagcactttcagtgacggcaatgaccgctcacgccgactaccagtgcagcgtcacgccgcgtgacgatgtgattgtcagcccgcaaaccgtgcaggtgaagggcgaaaacggcaatctggtgatcacgccagacggcaacgtgatgtataacggtaagcaatattccctgaatgccgcccagcgcgagcaggcgaaggattatcaggctgaactacgcagcacgctgccgtggattgatgaaggcgcgaaaagccgcgtcgaaaaagcccgtattgcgctggataaaattatcgttcaggagatgggcgaaagcagcaaaatgcgcagccgtctgaccaaacttgatgcgcagctgaaagagcagatgaaccgcattatcgaaacgcgcagcgatggcctgacgtttcactataaagccattgatcaggttcgcgccgaaggccagcaattagtgaatcaggcaatgggtggaattttacaggacagcattaatgaaatgggcgcgaaagcggtgctgaaaagcggcggtaacccattacagaatgtgctgggaagcctgggggggctgcaatcctcaatccaaaccgaatggaaaaagcaggaaaaagatttccagcagtttggcaaagatgtttgtagccgcgttgtgactctggaagatagccgcaaagccctggtcgggaatttaaaataa

SEQ ID NO: 458460 - DNA, 327 bp, Shigella boydii
atggcaaagaaccgtagccgtcgtctgcgtaaaaaaatgcacatcgacgaattccaggaattaggattttcggtggcatggcgattcccggaaggtacatcggaagaacagattgataaaaccgttgatgattttattaacgaggttatcgaaccgaacaaactggcctttgacggcagcggttatctggcctgggaaggtctgatctgcatgcaggaaatcggcaaatgcaccgaagaacatcaggcgattgtgcgtaagtggctggaagagcgcaaactggatgaggtacgcaccagcgaacttttcgacgtttggtgggactaa

SEQ ID NO: 458461 - DNA, 720 bp, Shigella boydii
atgaaaaacgacgtcatttcaccggaatttgatgaaaacggccgcccactgcgccgtatccgtagttttgtgcgccgccaggggcgactgaccaaaggccaggaacatgcgctggaaaactactggccggtgatgggcgttgagttcagcgaagatatgctggatttccccgcgctttttggccgtgaagcgccggtgacgcttgagattggttttggcatgggggcgtcgctggtggcaatggctaaagatcgccctgagcaggacttcctcggcattgaagtgcattcaccgggcgttggtgcgtgcctggcttctgcgcatgaagaaggtttaagcaacctgcgagtgatgtgtcacgatgcggttgaagtgctgcataaaatgattcctgacaattcattgcgcatggtgcagctctttttccctgacccgtggcacaaagcgcgccataataaacgccgtatcgtacaggtgccgtttgccgaactggtaaaaagcaaactgcagctggggggcgtattccatatggcgaccgactgggaaccttatgcggaacatatgcttgaagtgatgtcttctattgacggttataaaaacctgtcagagagcaatgattacgtaccgcgtccggcatcacgtccggtgacgaaatttgaacaacgtggtcatcgtcttggtcacggagtatgggacttaatgttcgagagggtgaaataa

SEQ ID NO: 458462 - DNA, 1053 bp, Shigella boydii
atgcaagcgtcgcaattttcagcccaggttctggactggtacgataaatacgggcgaaaaacgctgccctggcaaattgacaagacgccctacaaagtatggctctcagaagtgatgttgcaacaaactcaggttgcgaccgttatcccctattttgaacgctttatggcgcgcttcccgacggtgaccgatctcgccaatgcgccgctcgacgaagttctccacttgtggaccgggcttggctattacgcccgcgcgcgcaatatgcataaagcggcacaacaagtggcgaccttacacggcggtaaattcccggaaacctttgaagaagtcgcggcgttaccgggcgtcgggcgttccaccgcaggcgcgattctctcgctttctctgggtaagcactttccgattctcgacggtaacgtcaaacgcgtgctggcgcgctgctatgctgtaagcggctggcctgggaaaaaagaggtcgagaataaattatggagtttgagcgagcaggtgacgcccgcggtcggcgtggaacggtttaatcaggcgatgatggatttgggcgcgatgatttgtacgcgctcgaagccgaaatgttcgctctgtccgctacaaaacggatgtattgccgccgccaataatagctggtcgctttatccgggcaaaaaaccgaaacagacgctgccggagcgcaccggctactttttgctgttacagcacgaagatgaagtattgctggcgcagcgtccgccgagcggattgtggggcggtttatactgtttcccgcagtttgccgacgaagaaagtttgcggcagtggctggcgcaacggcagattgctgccgataacctgacgcaactgaccgcgtttcggcataccttcagccatttccacttagatattgtgcctatgtggcttcccgtgtcgtcattcaccggctgcatggatgaaggcaatgcgctctggtataacttagcgcaaccgccgtcagttggcctggcggctcccgtggagcgtttgttacagcagttacgcactggcgcgccggtttag

SEQ ID NO: 458463 - DNA, 276 bp, Shigella boydii
atgagcagaacgattttttgtactttcctgcaacgagaagcagaaggtcaggattttcagctgtaccccggcgagctgggaaaacgcatctataacgagatctccaaagaagcctgggcgcagtggcagcacaagcaaaccatgctgattaatgaaaagaaactcaacatgatgaatgccgagcaccgcaagctgcttgagcaggagatggtcaacttcctgttcgagggtaaagaggtgcatatcgagggctatacgccggaagataaaaaataa

SEQ ID NO: 458464 - DNA, 1080 bp, Shigella boydii
atgaaaaaatatctcgcgctggctttgattgcgccgttgctcatctcctgttcgacgaccaaaaaaggcgatacctataacgaagcctgggtcaaagataccaacggttttgatattctgatggggcaatttgcccacaatattgagaacatctggggattcaaagaggtggtgatcgccggtcctaaggactacgtgaaatacaccgatcaatatcagacccgcagccacatcaacttcgatgacggtacgattactatcgaaactatcgccgggacagaacctgccgcgcatttgcgccgggcaattatcaaaacgttgctgatgggtgacgatccgagttcggtcgatctctattccgacgttgatgatattacgatttcgaaagaacctttcctttacggtcaggtggtggacaacaccgggcagccgattcgctgggaaggtcgcgcaagcaacttcgcggattatctgctgaaaaaccgtctgcaaagccgcagtaacgggctgcgtatcatctacagcgtcaccattaacatggtaccgaaccaccttgataaacgtgcgcacaaatatctcggcatggtccgccaggcgtcacggaaatatggcgttgatgagtcgctgattctggcaattatgcagaccgaatcttcctttaacccgtatgcggtcagccgttccgatgcgctgggattaatgcaggtggtacaacatactgccgggaaagatgtgttccgctcgcaggggaaatccggcacgccgagccgcagtttcttgtttgatcctgccagcaatattgataccggcaccgcgtatctggcgatgctgaacaatgtttatctcggcggaattgataacccaacatcgcggcgttatgccgtcatcaccgcctataacggcggcgcaggcagcgtgctgcgagtcttttcgaatgataagattcaggctgccaatattattaacaccatgacgccgggcgatgtttatcagacgctgacgacccgccatccctctgcggaatctcgccgttatctttataaagtgaataccgcgcaaaaatcctaccgccgccgataa

SEQ ID NO: 458465 - DNA, 1257 bp, Shigella boydii
atgaatcttaagctgcagctgaaaatcctctcttttctgcagttctgtctgtggggaagttggctgacgaccctcggctcctatatgtttgttaccctgaagtttgacggtgcttctattggcgcagtttatagctcactgggtatcgcagcggtctttatgcctgcgctgctggggattgtggccgacaaatggttaagtgcgaaatgggtatatgccatttgccacaccattggcgctatcacgctgttcatggcggcacaggtcacgacaccggaggcgatgttccttgtgatattgattaactcgtttgcttatatgccaacgcttgggttaatcaacaccatctcttactatcgcctgcaaaatgccgggatggatatcgttactgacttcccgccaatccgtatctggggcaccatcggctttatcatggcaatgtgggtggtgagcctgtctggcttcgaattaagccacatgcagctgtatattggcgcagcactttccgccattctggttctgtttaccctgactctgccgcatattccggttgctaaacagcaagcgaatcagagctggacaaccctgctgggcctcgatgcattcgcgctgtttaaaaacaagcgtatggcaatcttctttatcttctcaatgctgctgggcgcggaactgcagattaccaacatgttcggtaataccttcctgcacagcttcgacaaagatccgatgtttgccagcagctttattgtgcagcatgcgtcaatcatcatgtcgatttcgcagatctctgaaaccctgttcattctgaccatcccgttcttcttaagccgctacggtattaagaacgtaatgatgatcagtattgtggcgtggatcctgcgttttgcgctgtttgcttacggcgacccgactccgttcggtactgtactgctggtactgtcgatgatcgtttacggttgcgcattcgacttcttcaacatctctggttcggtgtttgtcgaaaaagaagttagcccggcaattcgcgccagtgcacaagggatgttcctgatgatgactaacggcttcggctgtatcctcggcggcatcgtgagcggtaaagttgttgagatgtacacccaaaacggcattaccgactggcagaccgtatggttgattttcgctggttactccgtggttctggccttcgcgttcatggcgatgttcaaatataaacacgttcgtgtcccgacaggcacacagacggttagccactaa

SEQ ID NO: 458466 - DNA, 234 bp, Shigella boydii
gtgcggattcgtgatgccgaagggcgaattgcggcagaaggggcgttgccttatccacctggcgtgctttgcgtggtacccggggaagtctggggtggggcggttcaacgttatttccttgcactggaagaaggggtaaatttgttgccgggattttcgccggagctgcaaggtgtttatagcgaaaccgatgcggatggcatgaaacggttgtacggttatgtgttgaagtaa

SEQ ID NO: 458467 - DNA, 897 bp, Shigella boydii
atgagtcgtttagtcgtagtatctaaccggattgcaccaccagacgagcacgccgccagtgccggtggccttgccgttggcatactgggggcactgaaagccgcaggcggactgtggtttggctggagtggtgaaacagggaatgaggatcagccgctaaaaaaggtgaaaaaaggtaacattacgtgggcctcttttaacctcagcgaacaggaccttgacgaatactacaaccaattctccaatgccgttctctggcccgcttttcattatcggctcgatctgatgcaatttcagcgtcctgcctgggacggctatctacgcgtaaatgcgttgctggcagataaattactgccgctgttgcaagacgatgacattatctggatccacgattatcacctgttgccctttgcgcatgaattacgcaaacgtggggtgaataatcgcattggtttctttctgcatattcctttcccgacaccggaaatcttcaacgcgctgccgacatatgacaccttgcttgaacagctttgtgattatgatttgctgggtttccagacagaaaacgatcgtctggcgttcctggattgtctttctaacctgacccgcgtcacgacacgtagcgcaaaaagccatacagcctggggcaaagcatttcgaacagaagtctacccgatcggcattgaaccgaaagaaatagccaaacaggctgccgggccactgccgccaaaactggcgcaacttaaagcggaactgaaaaacgtacaaaatatcttttctgtcgaacggctggattattccaaaggtttgccagagcgttttctcgcctatgaagcgttgctggaaaaatatccgcagcatcatggtaaaattcgttatactgaagtggcacactga

SEQ ID NO: 458468 - DNA, 798 bp, Shigella boydii
gtgacagaaccgttaaccgaaacccctgaactatccgcgaaatatgcctggttttttgatctcgatggaacgctggaaatcaaaccgcatcccgatcaggtcgtcgtgcctgacaatattctgcaaggactacagctactggcaaccgcaagtgatggtgcattggcattgatatcagggcgctcaatggtggagcttgacgcactggcaaaaccttatcgcttcccgttagcgggcgtgcatggggcggagcgccgtgacatcaatggtaaaacgcatatcgttcatctgccggatgcgattgcgcgtgatattagcgtgcaactgcatacagttatcgctcagtatcccggcgcggagctggaggcgaaagggatggcttttgcgctgcattatcgtcaggctccgcagcatgaagacgcattaatgacattagcgcaacgtattactcagatctggccacaaatggcgttacagcagggaaagtgtgttgtcgagatcaaaccgagaggtaccagtaaaggtgaggcaattgcagcttttatgcaggaagctccctttatcgggcgaacgcccgtatttctgggcgatgatttaaccgatgaatctggcttcgcagtcgttaaccgactgggcggaatgtcagtaaaaattggcacaggtgcaactcaggcatcatggcgactggcgggtgtgccggatgtctggagcaggcttgaaatgataaccaccgcattacaacaaaaaagagaaaataacaggagtgatgactatgagtcgtttagtcgtagtatctaa

SEQ ID NO: 458469 - DNA, 987 bp, Shigella boydii
atgtcttctgtttctacatcgggttctggcgcacctaagtcgtcattcagcttcgggcgtatctgggatcagtacggcatgctggtggtgtttgcggtgctctttatcgcctgtgccatttttgtcccaaattttgccaccttcattaatatgaaagggttgggcctggcaatttccatgtcggggatggtggcgtgtggcatgttgttctgccttgcttccggtgactttgacctttctgtcgcctccgtaattgcctgtgcgggtgtcaccacggcggtggttatcaacctgactgaaagcctgtggattggcgtggcagcggggttgctgcttggcattctctgtggcctggtcaatggctttgttatcgccaaactgaaaataaatgctctgatcacaacactggcaacgatgcagattgttcgaggtctggcgtacatcatttcagacggtaaagcggtcggtatcgaagatgaaagcttctttgcccttggttacgctaactggttcggtctgcctgcgccaatctggctcaccgtcgcgtgtctgattatctttggtttgttgctgaataaaaccacctttggtcgtaacaccctggcgattggcgggaacgaagaggctgcgcgtctggcgggtgtaccggttgttcgcaccaaaattattatctttgttctctctggcctggtatctgcgatagccggaattattctggcttcacgtatgaccagtgggcagccaatgacgtcgattggttacgagctgattgttatctccgcctgcgttttaggtggcgtttctctgaaaggaggcatcggaaaaatctcatatgtggtggcgggtatcttaattttaggcaccgtggaaaacgccatgaacctgcttaatatttctcctttcgcgcagtacgtggttcgcggcttaatcctgctggcagcggtgatcttcgaccgttacaagcaaaaagcgaaacgcactgtctga

SEQ ID NO: 458470 - DNA, 1515 bp, Shigella boydii
atgcaacagtctaccccgtatctctcatttcgcggcatcggtaaaacgtttcccggcgttaaggcgctgacggatattagttttgactgctatgccggtcaggttcatgcgttgatgggtgaaaatggcgcaggaaaatcaactctcttaaaaatcctcagcggcaactatgcgccaaccacgggttctgtagtgattaatgggcaggaaatgtccttttccgacacgaccgcagcacttaacgcgggtgtggcgattatttaccaggaactgcatctcgtgccggaaatgaccgtcgcggaaaacatctatctcggccagctgccgcataaaggcggcattgtgaatcgctcattgctgaattatgaggcgggtttacaacttaaacatcttggtatggatattgacccggacacgccgctgaaatatctctccattggtcagtggcagatggttgaaatcgccaaggcgctggcgcgtaacgctaaaattatcgcctttgatgagccaaccagctccctttctgcccgcgaaatcgacaatcttttccgcgttattcgtgaactgcgaaaagaggggcgggtgatcttatacgtttctcaccgtatggaagaaatatttgccctcagcgatgccatcactgtctttaaagatggacgttatgtcaaaacctttaccgatatgcagcaggttgaccacgacgcgctggtgcaggcgatggtcgggcgcgacattggcgatatctacggctggcaacctcgtagttatggcgaggagcgcctgcgtcttgatgctgtgaaagcactaggcgtgcgtacgccaataagtctggcggttcgcagtggtgaaattgttgggctgtttggtctggtaggggcggggcgtagcgaattaatgaaaggcttgtttggcgggacgcaaatcaccgccggtcaggtttatatcgaccaacagccgatcgatattcgtaaaccgagccacgccattgccgcaggcatgatgctctgcccggaagatcgcaaagcggaaggcattattcccgtgcactccgttcgcgacaatatcaacatcagtgccagacgcaaacatgtgctcggcggttgtgtaatcaacaacggttgggaagaaaacaatgccgatcagcacattcgttcgctcaacatcaaaacgccgggcgctgagcaactgatcatgaatctctcaggcggaaatcagcaaaaagccattctgggccgctggttatcggaagagatgaaggtcattttgctggatgaacctacgcgcggcattgatgttggtgctaagcacgaaatatataacgtaatttatgcgctggcggcgcagggtgtggcggtgctgtttgcctccagcgacttacctgaagtcctcggcgttgccgaccggattgtggtgatgcgggaaggtgaaatcgccggtgaattgttacacgagcaggcagatgagcgtcaggcactgagccttgcgatgcctaaagtcagccaggcagttgcctga

SEQ ID NO: 458471 - DNA, 990 bp, Shigella boydii
atgcacaaatttactaaagccctggcagccattggtctggcagccgttatgtcacaatccgctatggcggagaacctgaagctcggttttctggtgaagcaaccggaagagccgtggttccagaccgaatggaagtttgccgataaagccgggaaggatttagggtttgaggttattaagattgccgtgccggatggcgaaaaaacattgaacgcgatcgacagcctggctgccagtggcgcaaaaggtttcgttatttgtactccggaccccaaactcggctctgccatcgtcgcgaaagcgcgtggctacgatatgaaagtcattgccgtggatgatcagtttgttaacgccaaaggtaagccaatggataccgttccgctggtgatgatggcggcgactaaaattggcgaacgtcagggtcaggaactgtataaagagatgcagaaacgtggctgggatgtcaaagaaagcgcggtgatggtgattaccgccaacgaactggataccgcccgccgccgtactacgggatctatggatgcgctgaaagcggccggattcccggaaaaacaaatttatcaggtacctaccaaatctaacgacatcccgggggcatttgacgctgccaactcaatgctggttcaacatcctgaagttaaacattggctgatcgtcggtatgaacgacagcaccgtgctgggcggcgtacgcgcgacggaaggtcagggctttaaagctgctgatattatcggcattggcattaacggtgtggatgcggtgagcgaactgtctaaagtacaggcaaccggcttctacggttccctgctgccaagcccggacgtacatggctataaatccagcgaaatgctttacaactgggtagcaaaagacgttgaaccgccaaaatttaccgaagttaccgacgtggtgctgatcacgcgtgacaactttaaagaagaactggagaaaaaaggtttaggcggtaagtaa

SEQ ID NO: 458472 - DNA, 504 bp, Shigella boydii
atggcaaccgctggaatgcttctcaaactcaactctcaaatgaaccgcgagttttacgcatccaatctctaccttcacctgagtaactggtgttctgaacagagtctgaacggcaccgccactttccttcgcgcccaggcacagagtaatgtgacccaaatgatgcgcatgtttaactttatgaagagtgtcggcgctacccccatcgttaaagccattgatgttcccggtgaaaaactgaactctctggaagaactgttccaaaaaacgatggaagaatacgagcaacgttctagtacgttggcacagttagccgatgaagcgaaagaactgaatgatgattcaaccgtcaatttcctgcgcgatctggaaaaagaacagcagcatgatggtctgttgctgcaaaccattcttgatgaagtgcgcagtgcgaaacttgctggtatgtgcccagtgcagaccgaccaacatgttctgaatgtcgtgtcgcatcagctgcattga

SEQ ID NO: 458473 - DNA, 252 bp, Shigella boydii
atgtcccagccgctgaatgccgatcaggaactggtttctgatgtggttgcttgccagttggttatcaaacaaattctggatgttctcgatgtaatcgcgcccgttgaagttcgtgaaaaaatgtccagtcagctgaagaatatcgactttagtaaccatcccgccgccgcagacccggtcaccatgcgggcaatccaaaaagccatcgcgctgattgaactcaagtttaccccacaaggcgaatcccattaa

SEQ ID NO: 458474 - DNA, 324 bp, Shigella boydii
atgagacttctgattctgactctttcattaataacgctggcggggtgtacggttactcgccaagcccatgtgagcgaagttgacgcggcaacaggtattgtacggttggtttatgaccaggcttttttgcagcatgcccataccgatcgttatgtcagtcgcgggatcgccgatcgcgcatgccagcaggaaggctatacccacgcgatcccctttggtcagccagtaggcaactgtagcctttttgcgggttccttatgtttgaatacggaattcactttgtcatatcagtgccatcattccgccttccctgtctttctctaa

SEQ ID NO: 458475 - DNA, 498 bp, Shigella boydii
atgctgaaaccagaaatgattgaaaaacttaatgagcagatgaacctggaactgtactcttcactgctttatcagcaaatgagcgcctggtgcagctatcataccttcgaaggtgctgccgcgttcctgcgccgtcacgcccaggaagagatgacgcatatgcagcatctgtttgattacctgactgataccggcaatttaccgcgtattaataccgttgaatctccgtttgctgaatattcctcacttgatgaattattccaggaaacctataaacacgaacaattaatcacccagaaaattaacgaactggctcatgctgcaatgaccaatcaggactacccaacatttaatttcctgcaatggtatgtttctgagcagcatgaagaagagaaactgttcaaatcgattattgataaattaagcctggcaggcaaaagcggcgaaggtctgtattttatcgacaaagaactctctaccctcgacacacaaaactaa

SEQ ID NO: 458476 - DNA, 240 bp, Shigella boydii
atggactctattcacggtcatgaagtgttaaatatgatgattgaatcaggcgagcaatatacgcatgccagtctggaagcagcaattaaagcgcgttttggtgaacaggcacgttttcacacctgctcggcagaagggatgacagcgggagagctggtagcgtttctggcagcaaaaggcaaatttataccttcgaaagacggtttttcgaccgatcagagtaagatttgccgtcactga

SEQ ID NO: 458477 - DNA, 1212 bp, Shigella boydii
gtgaaaaacagaactctgggaagtgtttttatcgtggcgggaaccacaattggcgcaggcatgctggcaatgccgctggctgcggcaggtgttggttttagcgtcacgttaatcttgttgattgggctttgggcgttgatgtgctacacggcgctattactgctggaggtgtaccagcatgttccggcagataccggtctgggcacgctggcaaaacgctatctgggacgctacggtcaatggctgacgggcttcagtatgatgttcttaatgtatgctctgactgcggcatacatcagcggtgccggtgaattgttggcctccagcatcagcgactggacaggtatttcaatgtcggcaaccgctggcgtgctgttgttcacttttgttgccggtggcgtggtttgtgttggaacatcgctggtcgatttatttaaccgttttctgttcagcgccaaaattatttttctggtggtgatgctggtattgctgctaccgcatattcacaaagtgaatcttttaaccctgccgttgcaacaggggctggctctgtcagcaatcccggtgatttttacctcatttggttttcacggtagcgtgccgagtattgtcagctatatggatggcaacgttcgtaagctacgcagggtgtttataaccggtagtgcgatccccctggtggcatatattttctggcaggtggcaacgcttggcagcattgattcaacaacctttatgggattgctggctaatcatgctggattaaacgggctgttacaggcgttacgcgaaatggtggcctctccgcatgttgagctggcagtgcatttatttgctgatttagccctcgccacgtcatttctcggcgttgcgttaggcttatttgattatctggctgatttatttcagcgttcaaataccgttggtggacggttgcaaactggtgcaattacctttctgccgccgttggcgtttgcactgttttatccacgaggatttgtgatggcgctgggttacgccggtgtggcgctggcggtactggcattgattatcccttcgctgttgacctggcaaagcagaaagcacaatcctcaggcgggttaccgggtcaaaggtggtcgtccggcgctggtggtggtgtttctctgtggtattgctgtgattggcgtgcaatttttgattgcggcagggttgttaccagaagtggggtga

SEQ ID NO: 458478 - DNA, 666 bp, Shigella boydii
atgaaaacgggaccgttaaacgaaagtgagttggaatggctggacgatattctgaccaaatacaacactaaccacgccatccttgatgtggcggagctggacgatttattgacggcggtgttgagttctccgcaagagattgaaccggaacagtggctggttgccgtgtggggtggggctgactatgtgccgcgctgggcgtcagagaaagagatgacgcgctttatgaacctggcttttcaacatatggccgataccgcagcgcgtctgaacgaattcccggagcagtttgagccgttattcggcttgcgagaagttgatggcagcgagctgacgattgttgaggagtggtgctttggctatatgcggggcgtggcactttctgactggtcaacgttgcccgattcgttaaaaccagcgctggaggcgattgcgctgcacggtactgaggaaaacttcgagcgggtagaaaagatgtcgccagaagcgtttgaagagcgcgtagatgccattcgactggcggcgcttgatctacatgcgtactggatggcgcatccgcaggaaaaagctgttcagcaaccgatcaaagcagaagagaaaccggggcgtaacgatccttgcccgtgcggtagtggtaagaaatttaagcagtgctgcctgcattaa

SEQ ID NO: 458479 - DNA, 549 bp, Shigella boydii
atgcaatttaatatccctacgttgcttacactgttccgtgtcatccttatcccattctttgtattggtcttttatctgcctgtcacctggtcgccgtttgccgccgcgctcattttctgcgtcgcggcggtgactgactggttcgatggttttctggcacgccgctggaaccagagtacccggtttggtgctttccttgaccctgtagcagataaagttctcgtggctatcgccatggtgctggtaaccgagcattatcacagctggtgggtgaccctaccggcggcaacgatgatcgcccgtgaaattattatttctgcgctacgcgaatggatggcggagttgggtaaacgcagtagcgtggctgtctcctggattgggaaagtgaaaaccactgcccagatggtggcgttggcctggctgctgtggcgtccgaacatttgggttgagtacgccggtattgcacttttctttgtggctgcggtactgactctgtggtcaatgttgcaatatttgagcgctgcgcgtgcagatttgcttgatcagtga

SEQ ID NO: 458480 - DNA, 1833 bp, Shigella boydii
gtgagtgatcagtttgacgcaaaagcgtttttaaaaaccgtaaccagccagccaggcgtttatcgcatgtacgatgctggtggtacggttatctatgtaggcaaagcgaaagacctgaaaaaacggctttccagctatttccgtagcaacctcgcttcgcgcaaaaccgaagcgctggtcgcccagattcagcaaattgatgtaacggttactcatacagaaaccgaagcgctgttgctggaacacaactacatcaaactctatcagccgcgttacaacgttttgctacgcgatgataaatcttatccttttatcttcctgagtggcgatacccacccgcgtctggcgatgcatcgtggtgcgaagcatgccaaaggtgaatatttcggcccgttcccgaatggctatgccgtacgtgaaactctggcgctactgcaaaagattttccccattcgccagtgcgaaaatagtgtttatcgcaatcgctcgcgtccgtgtctgcaatatcagatagggcgctgtctgggaccgtgcgttgaaggactggtgagtgaagaagaatacgctcagcaggtcgagtatgtgcgcctgtttttgtctggcaaagatgatcaggtgcttacgcaactcattagccgtatggaaactgccagtcagaatctggagtttgaagaagcggcacgtattcgcgaccaaattcaggcggtgcgacgcgtcaccgaaaaacagtttgtttccaataccggcaacgaccttgacgttattggtgtggcgttcgatgcgggcatggcttgtgtccacgtattgttcattcgtcagggcaaagtgctcggcagccgcagctatttcccgaaagtgcctggcggtacggaactgagcgaggtggtagaaaccttcgtaggtcagttctatttacaaggcagccagatgcgcaccttaccgggtgagatcctgctcgattttaatcttagcgataaaacgctgctcgccgattccctttcagaactggcgggacgcaagattaatgttcaaaccaaacctcgcggcgatagggcgcgttatctgaaactcgcgcgcaccaatgcggcgacggccttaatcagcaaactttcgcagcaatctaccgttcaccagcgactgaccgcgcttgccagcgtgttgaaattgccggaagtgaagcggatggagtgctttgacatcagccataccatgggcgaacaaaccgtcgcttcctgtgtggtgtttgatgctaacggcccgctgcgtgcggagtatcggcgctataacattacaggcatcacgccgggcgatgattatgcggcgatgaatcaggtgctgcgtcggcgttatggtaaagccattgacgacagtaagatcccggatgtgatccttatcgacggcggcaaaggccagcttgcgcaggcgaaaaatgtcttcgccgaactggatgtctcatgggataaaaatcatccgctgctacttggcgttgccaaaggagcagatcgtaaggctggactggaaacgctgttctttgagccggaaggtgagggatttagtttgccgccagattcacccgcgctgcatgttatccagcatattcgcgatgaatcacatgatcacgcgattggcgggcaccgtaaaaaacgggcgaaggtcaaaaataccagttccctggaaaccattgaaggcgtcgggccaaaacgtcggcaaatgttgttgaaatatatgggcggtttgcaaggtttacgtaacgccagcgtcgaggaaattgcaaaagtgccgggtatttcgcaaggtctggcagaaaagatcttctggtcgttgaaacattga

SEQ ID NO: 458481 - DNA, 657 bp, Shigella boydii
ttgatcaacgttctacttgttgatgaccacgaactggtgcgcgcagggatacgacgcattctggaagatataaagggtataaaagtcgtcggtgaggcatcgtgcggtgaagacgccgttaagtggtgccggacaaatgccgttgacgtggtgctaatggacatgagtatgccgggcattggcggtcttgaggcgacgcgtaaaatcgcgcgttccacagctgatgtcaaaatcatcatgcttaccgttcatacagaaaaccctttaccagcgaaagtcatgcaggccggtgctgcgggctacctcagcaaaggcgcggctccgcaggaagtcgtgagtgcgattcgttctgtctattcagggcagcgttacattgcttctgacatcgctcaacaaatggcgttaagccagatcgaaccagaaaaaacagaaagcccatttgccagtttgtctgaacgtgaattgcagattatgctgatgatcaccaagggccagaaggtcaatgagatctcagaacagctcaatctcagtccgaaaacggtgaacagctaccgctatcgtatgttcagtaaactaaacattcatggcgatgttgagctgactcacctggcaattcgccatggtctgtgtaatgcggagacattatcaagtcagtga

SEQ ID NO: 458482 - DNA, 225 bp, Shigella boydii; identical to SEQ ID NO: 1574

SEQ ID NO: 458483 - DNA, 723 bp, Shigella boydii
atgcaggatacggattttttcagctggcgtcgcacgatgctgttgcgttttcagaggatggaggccgcagaagaggtctaccatgaaatagagcttcaggctcagcagctggagtacgattactattcgttatgtgttcgccacccggtaccattcacgcgacctaaagtggctttctacaccaattaccctgagtcgtgggttagttattatcaggcaaaaaattttctcgcaattgatcctgtgctgaaccctgaaaactttagtcagggccatttaatgtggaatgatgacttattcagcgaagcacagccattatgggaagccgcgcacgcacatggtttacgccgcggtgtcactcagtatttaatgctgccaaatcgggcgctgggctttttgtccttttcccgttgcagcacgcgcgaaatacccattcttagtgatgaactgcaattaaaaatgcagttactggtgcgcgaaagtctgatggctctgatgcgtttaaatgatgaaatagtgatgacgccagagatgaatttcagcaagcgcgaaaaagaaattctgaaatggacggcggaagggaagacatcagcagagatagcgatgattttgtcaatctctgagaatacggtcaatttccatcagaaaaacatgcagaaaaaaatcaatgcaccaaataagacccaggtggcctgttacgcggccgctactggcttaatttga

SEQ ID NO: 458484 - DNA, 753 bp, Shigella boydii
atgagtgccattgaagttaagaacctggtgaaaaaattccacggtcagacggtgctacacggtatcgacctcgaggtaaagcctggcgaagtggtggcaattatcggtccgagtggttccggcaaaaccacgttgctacgcagcataaatctgctggaacaaccggaagcgggaacgatcaccgttggcgatatcactattgatactgcacgttcattaagtcagcaaaaatcgctgattcgccagttgcgtcagcacgtcgggtttgtcttccagaactttaatttgtttccgcatcgtacggtgctggaaaacattattgaagggccggtgatcgtcaaaggcgaaccgaaagaagaggccacggcgcgcgctcgcgagctgctggcgaaagttgggctggccggtaaagaaaccagctatccacgtcgtttgtctggcggtcaacagcagcgtgtagcgattgcgcgtgcgctggcaatgcgtcctgaggtgattttgtttgacgagccaacgtcagcgctggatccagagctggtgggcgaagtcctgaacacaatccgccagctggcgcaggaaaagcgcacgatggtgattgtgacgcacgaaatgagctttgcccgggatgttgcggaccgggcgatttttatggacctggggcggatagtcgagcagggggcagcaaaagcgttatttgccgatccccagcagcctcgcacccgacagttcctcgagaagtttctgctgcaataa

SEQ ID NO: 458485 - DNA, 669 bp, Shigella boydii
atgcaagaaagtatacaactggttattgattccttgccgttcctgttgaaaggggctgggtataccctgcaactcagtatcggcggcatgttttttggcttactactcgggtttattctcgcgctgatgcgcctgtcgccaatctggcccgtgcgctggctggcgcgtttttatatctctatttttcgtggtacgccgctcatcgcacaactgtttatgatctattacggcctgccgcagtttggtatcgaattagatcccattccgtcagcaatgattggtctgtcgctgaacactgccgcctatgccgccgaaacgctgcgcgccgccatttcttctattgataaaggtcagtgggaagccgctgccagtattggtatgacgccgtggcagaccatgcgtcgcgcgattttgccacaggcggcgcgggtggtgttgccgccgctgtcgaacagctttatcagtctggtaaaagatacgtcgctggccgcgacaatccaggtgccggagctgttccgtcaggcgcagttgattacctcgcgcacgctggaggtgttcaccatgtacctggcggcttcgctcatctactggatcatggcgactgtgttatcgacgttgcagaaccattttgagaatcaacttaatcgccaggagagagaacccaaatga

SEQ ID NO: 458486 - DNA, 987 bp, Shigella boydii
atgccactgcataatttaacccgttttccacggctggagtttatcggcgcgccaacgccgctcgaatatctgccgcgcttttctgattatcttggacgggaaattttcatcaaacgggatgacgtcacacccatggcaatgggcggcaataaattacgtaagctggaatttctcgcggcagatgccctgcgcgaaggtgccgatacgctgattactgccggcgcgatccagtctaaccatgtgcggcagactgccgcagttgcggcgaaactcggcctgcactgcgtggcgctgctggaaaatcctattggcacaaccgcagaaaactatttaaccaacggcaatcgtttgttgctgaatctgttcaatacccagattgaaatgtgcgacgcactgaccgatcccaatgcccaactggaagagctggcgacgcgagtcgaagcacaaggctttcgcccgtatgtcattccggttggcggttctaatgctctgggcgcgctgggttatgtggagagtgcgctggaaatcgcgcaacagtgtgaaggggcggttaatatttcgtcggtggtggtcgcatcgggcagtgccggaactcacgccggattggctgttgggctggaacacctgatgcctgaaagcgaactgattggcgtgaccgtgtcgcgttccgttgccgatcaattgccgaaagtggttaacctacaacaggcgattgcgaaagaactggagctgaccgcatcagcggaaattttactctgggatgactattttgcacctggctacggcgtgccgaacgacgaaggcatggaagcagtgaaattgctggcgcgtctggaaggcattctgcttgatcctgtgtataccggaaaagcgatggcggggctgattgacggtatcagtcagaaacgcttcaaagatgaagggccgattctgtttattcataccggcggcgcgcctgcgctgttcgcctatcatccccacgtttag

SEQ ID NO: 458487 - DNA, 858 bp, Shigella boydii
gtgtttacaaacaatggctctacactgcaaacagacataacaacattcggggtgaatatgaaattagcacatctgggacgtcaggcattgatgggtgtgatggccgtggcgctggttgcgggcatgagcgttaaaagttttgcagatgaaggtctgcttaataaagtcaaagagcgcggtacgctactggtagggctggaaggaacttatccgccgttcagttttcagggggatgacggcaaattaaccggttttgaagtggaatttgcccaacagctggcaaaacatcttggcgttgaggcgtcactaaaaccgaccaaatgggacggtatgctagcgtcgctggactctaaacgtattgatgtggtgattaatcaggtcaccatttctgatgagcgcaagaaaaaatacgatttctctaccccgtacaccatttctggtattcaggcgctggtgaaaaaaggtaacgaaggcaccattaaaacggctgctgatctgaaaggcaaaaaagtgggtgtcggtctgggcaccaactatgaagagtggctgcggcagaatgttcagggcgtcgatgtgcgtacctatgatgatgacccgaccaaatatcaggatctgcgcgtaggccgtatcgatgcgatcctcgttgaccgtctggcggcgctggatctggtgaagaaaaccaacgatacgctggcagtaaccggtgaagcattctcccgtcaggagtctggcgtggcgctgcgtaaaggaaatgaagacctgctgaaagcagtgaacgatgcaattgcggaaatgcaaaaagatggcactctgcaagccctttccgaaaaatggtttggtgctgatgtgaccaaataa

SEQ ID NO: 458488 - DNA, 552 bp, Shigella boydii
atgatggtgcagcacctgaaaagacggccattaagccgctatcttaaagactttaaacacagccaggcccattgcgcgcattgccgtaaattactcgatcgcattaccttagttcgcgacggcaaaatagtgaataaaatcgagatttcccgcctggacacgctgcttgatgaaaatggctggcaagtggaacaacagtcatgggcggcattgtgccgattttgcggtgatttacattgcaaaacgcagagtgattttttcgatattatcggctttaagcaatttctttttgagcaaactgaaatgagcccaggtacggtgcgtgaatatgtcgttcgtttgcgccgtttggggaatcatctacatgagcaaaatatttccctcgatcagctgcaggacggtttccttgatgaaatcctcgccccgtggctgcccaccaccagcaccaacaattaccgcatcgcattacggaagtatcaacactatcagcgtcaaacgtgtaccggacttgtgcagaaatcctccagcctgcctgcttctgatatatattaa

SEQ ID NO: 458489 - DNA, 207 bp, Shigella boydii
atgttgctcgacaccaataacagccagcttttctcctacgatgagtggcgcgaagagcacggcgatagcatcgaactggttactgatgatcatcagcgagaaaacccgctacaacaactgctggacagtaatctgcgccagcgggtgatggaagctatcgaaacgttgccggagcgcgaaaaactggtattaaccctctattactag

SEQ ID NO: 458490 - DNA, 318 bp, Shigella boydii
gtgaattcactctataccgctgaaggtgtaatggataaacactcgctgtggcagcgttatgtcccgctggtgcgtcacgaagcattgcgcctgcaggttcgactgcccgcgagcgtggaacttgacgatctgctacaggcgggcggcattgggttacttaatgccgtcgaacgctatgacgccctacaaggaacggcatttacaacttacgcagtgcagcgtatccgtggcgctatgctggatgaacttcgcagccgtgactgggtgccgcgcagcgtgcgacgcaacgcgcgtgaagtggcacaggcaatagggtaa

SEQ ID NO: 458491 - DNA, 1707 bp, Shigella boydii
atggcacaagtcattaataccaacagcctctcgctgatcactcaaaataatatcaacaagaaccagtctgcgctgtcgagttctatcgagcgtctgtcttctggcttgcgtattaacagcgcgaaggatgacgccgcaggtcaggcgattgctaaccgttttacttctaatattaaaggcctgactcaggcggcccgtaacgccaacgacggtatctccgttgcgcagaccactgaaggcgcgctgtccgaaatcaacaacaacttacagcgtattcgtgaactgacggttcaggcttctaccgggactaactccgattcggatctggactccattcaggacgaaatcaaatcccgtctggacgaaattgaccgcgtatctggccagacccagttcaacggcgtgaacgcactggcgaaagacggttcaatgaaaattcaggttggtgcgaatgacggccagactatcacgattgatctgaagaaaattgactcagatacgctggggctgaatggttttaacgtgaatggcaaaggcactattgcgaacaaagctgctacagtcagcgatctgaccgctgctggtgcaacgggaacaggtccttatgctgtgaccacaaacaatacagtactcagcgctagcgatgcactgtctcgcctgaaaaccggagatacagttactactactggctcgagtgctgcgatctatacttatgatgcggctaaagggaacttcaccactcaagcaacagttgcagatggcgatgttgttaactttgcgaatactctgaaaccagcggctggcactactgcatcaggtgtttatactcgtagtactggtgatgtgaagtttgatgtagatgctaatggcgatgtgaccatcggtggtaaagccgcgtacctagacgctactggtaacctatctacaaacaacgccggcattgcatcttcagcgaaattgtccgatctgtttgctagcggtagtaccttagcgacaactggttctatccagttgtctggcacaacttataactttggtgcagcggcaacttctggcgtaacctacaccaaaactgtaagcgctgatactgtactgagcacagtgcagagtgctgcaacggctaacacagcagttactggtgcgacaattaagtataatacaggtattcagtctgcaacggcgtccttcggtggtgcgaatactaatggtgctggtaattcgaatgacacctatactgatgcagacaaagagctcaccacaaccgcatcttacactatcaactacaacgtcgataaggataccggtacagtaactgtagcttcaaatggcgcaggtgcaactggtaaatttgcagctactgttggggcacaggcttatgttaactctacaggcaaactgaccactgaaaccaccagtgcaggcactgcaaccaaagatcctctggctgccctggatgaagctatcagctccatcgacaaattccgttcatccctgggtgctattcagaaccgtctggattctgcagtcaccaacctgaacaacaccactaccaacctgtctgaagcgcagtcccgtattcaggacgccgactatgcgaccgaagtgtccaacatgtcgaaagcgcagatcatccagcaggccggtaactccgtgctggcaaaagccaaccaggtaccgcagcaggttctgtctctgctgcagggttaa

SEQ ID NO: 458492 - DNA, 1407 bp, Shigella boydii
atggcaagtatttcatcgctgggagtcgggtcaggtctggatttaagttcaatccttgatagcctcaccgccgcgcaaaaagcgacgctaacccctatttcaaatcagcaatcgtcgtttaccgctaaacttagcgcctacggtacgctgaaaagcgcgctgacgactttccagaccgccaatactgcattgtctaaagccgatcttttttccgccaccagcactaccagcagcaccaccgcgttcagtgccaccactgcgggtaacgccatcgccgggaaatacaccatcagcgtcacccatctggcgcaggcgcaaaccctgaccacgcgcaccaccagagatgatacgaaaacggcgatcgccaccagcgacagcaaactcaccattcaacaaggcggcgacaaagatccgattaccattgatatcagcgcggctaactcatcgttaagcgggatccgtgatgctatcaacaacgcaaaagcgggcgtaagtgcgagcatcattaacgtgggtaacggtgaatatcgtctgtcagtcacatcaaatgacaccggccttgataatgcgatgacactctcggtcagcggtgatgatgcgctacaaagttttatgggctatgacgccagtgccagcagcaacggtatggaggtctcggtcgccgcccagaatgcgcagctgacggtcaacaacgtcgccattgagaacagcagcaacaccatcagcgacgcgctggaaaacatcaccctgaacctgcacgatgtcaccacgggcaaccagacgctaaccatcactcaggacacctccaaagcgcaaacggcgattaaagactgggtgaatgcctataactcgttaatagataccttcagtagcctgaccaaatacaccgccgtagatgcggaagctgatagccagagttctagcaatggcgcactgctcggcgactccacgctgcggacgattcagacgcagttgaagtcgatgctgagtaataccgtcagttcttccagctataaaacgctggcgcagattggtatcacgaccgatcccagcgatggcaaactggaactggatgccgacaaactcaccgctgcactgaaaaaagatgccagcggcgtaggtgcattgattgttggcgatggtaaaaaaaccggcatcacgaccaccatcggcagcaacctgaccagttggctttcgacaacgggcattattaaagccgctaccgatggcgttagtaagaccctgaataagttaactaaagactacaacgccgccagcgatcgcattgatgcgcaggtcgcgcgctacaaaaaacaatttacccaactggacgttttaatgacctcgttaaacagcaccagcagctacttaacgcagcagttcgaaaacaacagtaattccaagtaa

SEQ ID NO: 458493 - DNA, 411 bp, Shigella boydii
atgtacgcggcaaaaggcacccaggcctatgcacaaattggcgtcgaaagcgccgtaatgagcgccagccagcagcagctggtcaccatgctatttgatggagtgctgagcgcactggttagagcgcgcctgtttatgcaggacaacaatcagcaaggcaaaggcgtctctttgtcaaaagcgatcaacatcattgagaacggactgcgggtgagtcttgatgaagagagcaaagacgaactaacccaaaacttgattgctctttatagctatatggtcaggcgcttgctgcaagccaatttacgcaacgatgtctccgcagtcgaagaagtggaagcattaatgcgcaatattgccgatgcctggaaagagtcgttactctccccttctttgattcaggacccagtctga

SEQ ID NO: 458494 - DNA, 156 bp, Shigella boydii
atgaaccatgcaccgcatttgtatttcgcctggcaacaactcgtcgaaaaaagccagctcatgttacgcctggcaacggaagaacaatgggacgaactcatcgccagcgaaatggcgtatgtgaatgcggtgcaggagtatagcacacctgactga

SEQ ID NO: 458495 - DNA, 168 bp, Shigella boydii
atgctgcgcctgattcccgacaacgaaagcaaggtaaagcagttattacagattcgtatggatgaactggcgaaactggtcggtcagtcatcggtgcaaaaatcggtgttaagtgcctatggcgatcagggcggctttgtgctggctccgcaagataacttctcgtga

SEQ ID NO: 458496 - DNA, 1488 bp, Shigella boydii
atgcgtaatcccacgctgttacaatgttttcactggtattacccggaaggcggtaagctctggcctgaactggccgagcgcgccgacggttttaatgatattggtatcaatatggtctggttgccgcccgcctataaaggcgcatcgggcgggtattcggtcggctacgactcctatgatttatttgatttaggcgagtttgatcagaaaggcagcatccctactaaatatggcgataaagtacaattgctggccgccattgacgccctgaaacgtaatgacattgcggtgctgttggacgtggtagtcaaccacaaaatgggcgcggatgaaaaagaagctattcgcgtgcagcgtgtaaatgctgacgaccgtacgcaaattgatgaagaaatcattgagtgcgaaggctggacgcgttacaccttccccgcccgtgccgggcaatactcacagtttatctgggatttcaaatgttttagcggtatcgaccatatcgaaaaccctgatgaagatggcatatttaaaattgttaacgactacaccggcgaaggctggaacgatcaggttgatgatgaattaggtaatttcgattatctgatgggcgagaatatcgattttcgcaatcatgccgtgacggaagagattaaatactgggcgcgctgggtgatggaacaaacgcaatgcgacggttttcgtcttgatgcggtcaaacatattccggcgtggttttataaagagtggatcgaacacgtacaggaagttgcgccaaagccgctgtttattgtggcggagtactggtcgcatgaagtcgataaactgcaaacgtatattgatcaggtggaaggcaaaaccatgctgttcgatgcgccgctgcagatgaaattccatgaagcatcgcgcatggggcgcgactacgacatgacgcaggttttcacgggtacattagtggaagccgatcctttccacgccgtgacgctcgttgccaatcacgacacccaaccgttgcaagccctcgaagcgccggtcgaaccgtggtttaaaccgctggcgtatgccttaattttgttgcgggaaaatggcgttccttcggtattctatccggacctctacggtgcgcattacgaagatgtcggtggtgacgggcaaacctatccgatagatatgccaataatcgaacagcttgatgagttaattctcgcccgtcagcgtttcgcccacggtgtacagacgttatttttcgaccatccgaactgcattgcctttagccgcagtggcaccgacgaatatcccggctgcgtggtggtcatgtcgaacggggatgatggcgaaaaaaccattcatctgggagagaattacggcaataaaacctggcgtgattttctggggaaccggcaagagagcgtaataaccgacgaacacggcgaagcaaccttcttttgcaacggcggcagcgtcagcgtgtgggttatcgaagaggtgatttaa

SEQ ID NO: 458497 - DNA, 414 bp, Shigella boydii
atgaaaaaactcgcaattgcaggcgcgctcatgttgctggcgggctgtgccgaagtcgaaaactataacaatgtcgtgaaaacccccgcgccggactggctggcgggctactggcagaccaaagggccgcaacgtgcgctggtcagtccggaagcgataggcagcctgattgtcactaaagagggtgatactctggattgccgtcagtggcagcgggtgattgctgtgccgggtaagttgacattgatgtctgatgatctcactaacgttaccgtaaaacgtgagctgtacgaggttgagcgtgacggtaacaccattgagtacgatggtatgacgatggagcgtgtggatcgcccgacggcagagtgtgccgccgcgctggataaagcgccgttaccgacgccactgccgtaa

SEQ ID NO: 458498 - DNA, 1206 bp, Shigella boydii
atgtcatggcagcaattcaaacacgcctggttgattaaattctgggcacccatccctgcagtcatcgcggcgggtattctctccacttactattttggcattactggcaccttttgggctgtcacgggtgaatttacccgttggggcggccagctcctgcagctgtttggcgtccatgctgaagagtggggttattttaaaattatccatctggaaggatcgccattaacccgcatcgacgggatgatgatcctcggcatgtttggcggctgctttgccgcagcgctgtgggccaacaatgtcaaactgcgcatgccacgcagccgtatccgcattatgcaggccattattggcggtattatcgctggttttggcgcgcgtctggcaatgggctgtaacctggcggcgttctttaccggtattcctcagttctcgctgcatgcctggttctttgccatcgccactgccattggttcatggtttggcgcacgctttaccctgctgcccatcttccgtattcccgtgaaaatgcagaaagtttctgccgcctcaccgctgacgcaaaaaccggatcaggcgcggcgtcgttttcgtctcgggatgctggtctttttcggtatgctgggctgggcgctgctcacggcgatgaaccaaccaaaactggggctggcaatgctgtttggcgtcggctttggtttactgattgaacgtgcgcaaatctgctttacttcggcgttccgcgatatgtggatcaccggacgtacccatatggcgaaagcaatcattatcggtatggcggtgagtgccatcgggatcttcagttacgtacagttaggcgttgaacccaaaatcatgtgggcgggaccaaacgcggtaattggtggtttactgtttggttttggcatcgtgctggcaggcggctgcgaaaccggctggatgtaccgcgcggtagaaggccaggtgcactactggtgggtcggtctgggcaatgtgatcggctcgacgattctggcgtattactgggatgatttcgctccggggctggccaccgactgggacaaaatcaacctgctgaaaacctttggcccgatgggtggcctgctggtgacatatttgctgttgtttactgcgctgatgttgattatcggctgggaaaaacgcttcttccgccgtgcggcaccgcagactgctaaggagatcgcatga

SEQ ID NO: 458499 - DNA, 234 bp, Shigella boydii
atgaaaaatatcgttcctgattaccgccttgatatggtgggtgaaccctgcccttatccggcagtcgcaacccttgaggcgatgccgcagttaaaaaaaggggaaatcctggaagtggtgagcgactgtccacagtcgatcaataatattccactggatgcgcgtaatcacggctatacggtgcgggatattcagcaagacgggccgaccattcgttatttaattcagaagtaa

SEQ ID NO: 458500 - DNA, 672 bp, Shigella boydii
atgtgtggacgctttgcccaatcccaaacgcgtgaagattaccttgcgcttctcgcggaagatattgaacgcgatattccctacgatcccgaacccattggcagatacaacgtcgcgccgggaaccaaagttcttctgctcagtgaacgtgatgaacaccttcatctggatccggttttctggggatatgctcccggatggtgggataaaccgccgctgattaacgcccgcgtagaaactgccgcaaccagtcgcatgtttaaaccgctctggcaacatggtcgggcaatctgttttgccgatggctggtttgagtggaaaaaagaaggcgacaaaaaacagcctttttttatctatcgtgctgatggacaacctatttttatggccgcgataggtagcacaccatttgagcatggtgacgaagccgaaggatttttaattgtcactgctgcagcagaccagggtctggtagacattcatgaccgccgcccgctggttctgtcgccagaagctgcacaggaatggatgcggcaagagattggcggtaaagaagcatcagaaattgctaccaacggctgtgtgccagcaaaccagttcacctggcacccggtatcgcgcgcggtaggtaatgtcaaaaaccagggcgcggagttaattcaacctgtttgttga

SEQ ID NO: 458501 - DNA, 291 bp, Shigella boydii
atgcgccgccagcttgagtacaagcagctctggcgtggcggtcaggtgcttgctgttccgccagcgtacacaagccagcgttgcgcgtgctgtggtcatacagcgaaagaaaaccgcctgtcacaaagtaaattcagatgccaggtatgtggatatacagcgaacgccgatgtaaatggcgctcgtaacattttagcggcggggcacgccgttcttgcctgtggagagatggtgcagtcaggccgcccgttgaagcaggaacccaccgaaatgattcaggcgacagcctga

SEQ ID NO: 458502 - DNA, 1533 bp, Shigella boydii
gtgattctgaaaatggaaatgatgccatttttagactcggtgggactggtacttgatgataataaatattatctcttttcacggagggcgaatgataaaatcgttgtttatcatcaggaacaagtaaatggaccgcttgtcgacgagtcagggcgggttatttttgccgattttaacccatcgaaacgaccgtggtcggtggcttcagatgactctaacaacagctggaatccggcatacaattgctttgatcgtccgggtaaaaaatgtatctcttttacgctacgtatcaacggcaaagatcacgatttgttagcggtagataaaattcatgtcgatttaaactggcggtatttgaacgagtatcttgatcaaatcagcgctaatgatgaagttctatttttgaaacaaggtcatgagatcattgccaagaatcaactcgctcgtgaaaaactgattatttataatagcgaaggtaattatcatattattgattctgtcgatacggagtatattgcaaagacatcagcagtgccaaataatgcattgttcgaaatctatttttattatcctggcggtaatttattgaacgcatcagataaacttttttatctaccgtttgcgttcattattatcgtgttgctggtggtatatttcatgaccactcgtgtgttccgtcggcaattttctgaaatgaccgagctggttaatacgctggcatttttgcccgactcaacggatcagatcgaggctctgaaaattcgcgaaggcgatgcgaaagagattatcagcatcaaaaattcgatcgcggaaatgaaagatgccgaaattgaacggtcaaataaattgctctcactgatctcttacgatcaggaaagcggttttattaaaaatatggcgattattgagtccaacaataatcagtatctggctgtggggatcatcaaactgtgtggtctggaagccgtggaagccgtggaagcggtgtttggtgttgatgaacgcaataaaatcgtcaggaaattgtgtcagcgaattgccgagaaatatgcgcaatgctgcgatatcgtgacattcaatgccgatctctatttacttctgtgtcgggaaaatgtacagacatttacccgtaaaatagcgatggtaaacgattttgacagcagctttggctaccgcaatctgcgcatccataagtctgccatttgtgaacctttgcagggggaaaacgcctggagttacgcagaaaaactgaaactggcgatttccagtatccgtgaccatatgttctccgagtttattttctgtgatgacgcgaaactcaacgaaatagaagagaatatctggattgcgcgtaatattcgccatgcaatggaaattggcgaactattcctcgtctatcaaccgatcgttgatattaacacccgcgccattctgggcgcggaggcgttgtgccgttgggtttctgcggagagggggatcatttcaccgctgaagttcattaccattgctgaagatattgaagtggcacactga

SEQ ID NO: 458503 - DNA, 912 bp, Shigella boydii
atgcgactatttaactggcgacgtcaggcggtgttaaacgccatgccactggtcaaacctgaccaggtgcgtacaccgtggcatgaattctggcgacgatttcgccgtcagcatatggcgatgaccgccgcattattcgttattttattgattgtggtggccatttttgcacgctggatcgctccctatgacgccgaaaattattttgattatgacaatctgaataacggaccttctttgcagcactggtttggcgtcgattcactggggcgcgacattttcagccgtgtcctggttggtgcgcaaatctcgctggcggcgggcgtgtttgccgtgtttatcggtgcggcgatcgggacgttgctgggcttgttggctggatattatgaaggctggtgggatcggctgatcatgcgcatttgcgatgtgctgtttgccttcccgggtattttactggcgatcgctgttgttgcggtgttgggaagcggcattgctaacgtgattatcgcagtcgccattttttccatccccgcgtttgcccgactggtgcgcggcaacacgctggtgttgaaacagcaaacctttattgagtcagcacgcagtattggtgccagcgatatgaccattttattgcgtcatatcttgcctgggaccgtctcgtctatcgtggtgtttttcaccatgcgcattggcacctcgattatctctgccgccagcctgtcatttctcggcctcggtgcgcagccgccgacaccagagtggggagcaatgctcaatgaggcacgagcggatatggttatcgcgccgcatgtcgctgtttttccggccctggctatttttctgaccgtactggcgttcaatttgttgggcgatggtttacgcgatgcgctggatccgaaaattaaaggatag

SEQ ID NO: 458504 - DNA, 921 bp, Shigella boydii
atgcttaattacgttatcaaacgcttactggggttgattccgacgctgtttatcgtctcggtgctggtgtttttatttgtgcatatgctgcccggcgatccggcgcgattgattgccgggcccgaagctgatgcgcaggttatagaactggtgcgtcagcagctggggttggatcagccgctgtatcaccagttctggcactatatcagcaatgctgtgcagggggattttggcctgtcgatggtgtcgcgtcgtccggttgccgatgagattgccagccgctttatgccaacgctgtggctgaccataaccagtatggtctgggcggtgatatttggtatggcggcgggaattatcgccgccgtctggcgtaatcgttggccggatcgattgagtatgaccattgcggtgtcggggatctcgtttccggcatttgcgctggggatgcttttaattcaggtattctccgttgaactgggctggctgcctaccgtgggagcagacagttggcagcactacattttatcctccctgacgctcggcgcggcagtggcagccgtgatggcgcgctttacccgcgcgtcgtttgtcgatgttttaagcgaagattatatgcgtaccgcgagggcgaaaggggtgagcgaaacctgggttgtcctcaaacacgggctacgtaacgcgatgatcccggtagtgaccatgatgggcttacagtttggctttttgctcggtggttctatcgtggtggagaaagttttcaactggcccggacttggacgcttactcgttgactccgtagaaatgcgcgattacccggtgattcaggcggaaattctgcttttctcgctggaatttattcttatcaacttagtggtggatgtgctttacgccgccattaacccggctatcaggtacaagtaa

SEQ ID NO: 458505 - DNA, 1539 bp, Shigella boydii
atggcaagagctgtacaccgtagtgggttagtggcgctgggcattgcgacagcgttgatggcatcttgtgcattcgctgccaaagatgtggtggtggcggtaggatcgaatttcaccacgctcgatccgtatgacgcgaatgacacgttatctcaggccgtagcgaaatcgttttaccaggggctgttcggtctggataaagagatgaaactgaaaaacgtgctggcggagagttataccgtttccgatgacggcattacttacaccgtgaaattgcgggaaggaattaaattccaggatggtaccgatttcaacgccgcggcggtgaaagcgaatctggaccgggccagcgatccggcgaatcatcttaaacgctataacctgtataagaatattgccaaaacggaggcgatcgatccgacaacggtaaagattaccctcaaacagccgttctcagcgtttattaatattcttgcccatccggcgaccgcgatgatttcaccggcagcgctggaaaaatatggcaaggagattggttttcatccggtgggaaccggaccgtatgaactggatacctggaatcagaccgattttgtgaaggtgaaaaaattcgcgggttactggcagccaggattgcccaaactggacagcataacctggcgtccggtggcggataacaacacccgcgcggcaatgctgcaaaccggtgaagcgcagtttgctttccccattccctacgagcaggccgcactgctggagaaaaacaaaaatatcgagttgatggccagtccgtcaattatgcagcgttatatcagtatgaacgtgacgcaaaagccgttcgataacccgaaggtccgtgaggcgctgaattacgccattaaccgtccggcgctggtgaaagttgcctttgcgggctatgcaacgccagctactggtgtggtaccgccaagtatcgcctacgcgcaaagttataaaccgtggccttacgatccagtgaaagcgcgcgaattactgaaagaggcgggatatcccaacggtttcagtaccacgctgtggtcgtcacataaccacagcaccgcgcagaaagtgctgcaatttacccagcagcagttagcgcaggtcgggattaaagcccaggtgaccgcgatggatgccggacagcgggcggcagaagttgaaggtaaagggcaaaaagagagcggcgtgcggatgttctacactggctggtcggcttcaaccggcgaagcggactgggcgctatcgccactgttcgcctcgcaaaactggccaccgacgctgtttaataccgcattttacagcaataaacaggtggacgacttcctggctcaggcactgaaaactaatgatccggcggaaaagacccgcttgtataaggcggcgcaggatatcatctggcaagagtcgccgtggatcccgctggtggtagaaaaactggtgtcggcacacagtaaaaacctgaccggtttttggatcatgccagacaccggcttcagctttgaagacgcggatttgcaataa

SEQ ID NO: 458506 - DNA, 1872 bp, Shigella boydii
ttgccacacagtgatgaacttgatgccggtaatgtgctggcggttgaaaatctgaatattgcctttatgcaggaccagcagaaaatagctgcggtccgcaatctctcttttagtctgcaacgcggtgagacgctggcaattgttggcgaatccggctccggtaagtcagtgactgcgttggcattgatgcgcctgttggaacaggcgggcggtttagtacagtgcgataaaatgctgttgcagcggcgcagtcgcgaagtgattgaacttagcgagcagagcgctgcacaaatgcgccatgttcgcggtgcggatatggcgatgatatttcaggagccgatgacatcgctgaacccggtatttactgtgggtgaacagattgccgaatcaattcgtctgcatcagaacgccagtcgtgaagaagcgatggtcgaggcgaagcggatgctggatcaggtacgcattcctgaggcacaaaccattctttcacgttatccgcatcaactctctggcgggatgcgccagcgagtgatgattgcgatggcgctgtcatgccgcccggcggtgctgattgccgatgagccaaccaccgcgctggatgtcactattcaggcgcagatcctgcaattaatcaaagtattgcaaaaagagatgtcgatgggcgttatctttatcacgcacgatatgggcgtggtggcagagatagccgatcgggtactggtgatgtatcagggcgaggcggtggaaacgggtaccgtcgaacagatttttcatgcaccgcaacatccttacacccgtgcgctgttagctgctgttccgcaacttggtgcgatgaaagggttagattatccccgacgtttcccattgatatcgcttgaacatccagcgaaacaggacccccccatcgagcagaaaacggtggtggatggcgaacctgttttacgagtgcgtaatcttgtcacccgtttccctttgcgcagcggtttgttgaatcgcgtaacgcgggaagtgcatgccgttgagaaagtcagttttgatctctggcctggcgaaacgctatcgctggtgggcgagtctggcagcggtaaatccactaccgggcgggcgttgctgcgcctggtcgaatcgcagggcggcgaaattatctttaacggtcagcgaatcgataccttgtcacctggcaaacttcaggcattgcgccgggatattcagtttatttttcaggacccttacgcttcgctggacccacgtcagaccatcggtgattcgattatcgaaccgctgcgtgtacacggtttattgccaggtaaagacgcggctgcacgcgttgcgtggttgctggagcgcgtgggcctgttacctgaacatgcctggcgttacccgcatgagttttccggcggtcagcgccagcgcatctgcattgctcgcgcgttggcattgaatccaaaagtgatcattgccgacgaagccgtttcggcgctggatgtttctattcgcgggcagattatcaacttgttgctcgatctccagcgtgatttcggcattgcgtatctgtttatctcccacgatatggccgtggtagagcggattagtcatcgtgtggcggtgatgtatctcgggcaaattgttgaaattggtccacggcgcgcggtcttcgaaaacccgcagcatccttatacgcgtaaattactggcggcagttccggtcgctgaaccgtcccgacaacgaccgcagcgtgtactgctgtcggacgatcttcccagcaatattcatctgcgtggcgaagaggtggcagccgtctcgttgcaatgcgtcgggccggggcattacgtcgcacaaccacaatcagaatacgcattcatgcgtagataa

SEQ ID NO: 458507 - DNA, 966 bp, Shigella boydii
atgggcaaagcagtcattgcaattcatggtggcgcaggtgcaattagccgcgcgcagatgagtctgcaacaggaattacgctacattgaggcgttgtctgccattgttgaaaccgggcagaaaatgctggaagcgggcgaaagtgcgctggatgtggtgacggaagcggtgcgtctgctggaagagtgtccactgtttaacgccggaattggcgctgtctttacgcgtgatgaaacccatgaactggacgcctgtgtgatggatggtaacaccctgaaaaccggtgcggtggcgggcgttagtcatctgcgtaatccggttcttgccgcccggctggtgatggagcaaagcccgcatgtgatgatgattggcgaaggggcagaaaattttgcgtttgctcgtggcatggagcgcgtctcgccggagattttctccacgcctttgcgttatgaacaactactggcagcgcgcaaggaaggggcaaccgtcctcgaccatagcggtgcgccactggatgaaaaacagaaaatgggcaccgtgggggccgtggcgttggatttagacggcaatttggcggcagccacgtccacaggcggaatgaccaataaattacccggacgagttggcgatagtcccttagtgggtgccggatgctacgccaataacgccagtgtggcggtttcttgtaccggcacgggcgaagtcttcatccgcgcgctggcggcatatgacatcgccgcgttaatggattacggcggattaagtctcgcggaagcctgcgagcgggtagtaatggaaaaactccctgcgcttggcggtagcggtggcttaatcgctatcggccatgaagggaatgtcgcgctaccgtttaacaccgaaggaatgtatcgcgcctggggctacgcaggcgatacgccaaccaccggtatctaccgtgaaaaaggggacaccgttgccacacagtga

SEQ ID NO: 458508 - DNA, 1236 bp, Shigella boydii
atggaatttaccaccggattgatgtcgctcgacaccgcgcttaatgagatgctttctcgcgtcaccccactgaccgcccaggaaacgctgccactggtacagtgttttggtcgtattctggcgagcgatgtcgtttcgccgcttgatgttccggggtttgataactccgcaatggacggctacgcggtgcgtttagccgatattgcctccgggcaaccgctgcccgttgccggtaaatcctttgccggtcagccgtatcatggtgaatggcctgcgggcacctgcattcgtattatgaccggtgcgccggtgccggaaggctgcgaagcggtggtgatgcaggagcagactgaacaaacggacaatggcgtgcgttttactgctgaagtgcgtagcgggcaaaatattcgccgtcgcggtgaagatatctctgcaggtgcggttgttttcccggcgggaactcgcctgactaccgcagagctgccagtaattgcttcactggggattgccgaagttccggtgattcgtaaagtgcgtgtagcgcttttttctaccggtgatgaactccagttgcccggtcagccgctgggcgacggccaaatctacgacaccaaccgtctcgccgtacacctgatgttagaacagctgggttgcgaggtaatcaacttagggattatccgcgacgatccccatgccctgcgcgccgcatttattgaagccgacagccaggcggatgtagtgatcagttccggcggtgtttcagtgggtgaagcggattacaccaaaacgattcttgaagagctgggggagatcgccttctggaagctggcgattaaaccaggtaaaccgttcgcgttcggtaaactcagcaatagctggttctgcggcctgccgggcaacccggtttcagcgacgctgaccttctatcaactggtacagcctttgctggcaaaactaagcggcaacaccgccagcggcctgcccgcgcgccagcgcgtacgcacagcgtcccgcctgaaaaaaacgccaggacgtcttgatttccagcgcggcgtgctgcaacgcaacgccgacggtgaacttgaagtgacgaccaccggacatcagggttcacatatatttagctcctttagtctcggcaactgctttatcgtgctggaacgcgatcgcggcaatgtggacgtgggcgaatgggtggaagtagaaccgtttaacgcgttgttcggaggcctgtaa

SEQ ID NO: 458509 - DNA, 750 bp, Shigella boydii
atggcggaactcagcgatcaggagatgctgcgctacaaccggcaaatcattctgcgcggttttgattttgacggtcaggaggcgctaaaagattctcgtgtgctgatcgtcggcctcggtggactcggctgcgcagcttcgcagtatctggcaagcgccggtgtcggcaacctgacgctgctcgacttcgacacggtttcgctctcgaatctgcaacgccagacactgcacagtgatgccacggtcgggcaaccgaaggtggaatccgcccgtgacgccctgacgcggatcaacccacatatcgcgattacgccagtcaatgcactgctagatgacgcagaacttgcagcattgattgctgaacacgatctggtgctcgactgtacggataacgttgcggtacgtaatcaactgaacgcaggctgttttgccgcgaaggtgccgctggtttccggcgcggcaattcgtatggaagggcaaatcacggtcttcacttatcaggacggcgaaccgtgctatcgctgccttagccgtttgtttggcgagaacgcgttaacctgcgtagaagcaggcgtgatggcaccgttgatcggagtaattggttcgttgcaggcaatggaagcgatcaaactgctggcaggttatggcaaaccggccagcgggaaaatcgtcatgtacgatgcgatgacctgtcagtttcgcgaaatgaaactgatgcgtaatccggggtgtgaggtgtgcgggcagtaa

SEQ ID NO: 458510 - DNA, 663 bp, Shigella boydii
atggaactgtatctggatacttcagacgttgttgcggtgaaggcgctgtcacgtatttttccgctggcgggtgtgaccactaacccaagcattatcgccgcgggtaaaaaaccgctggatgttgtgcttccgcaacttcatgaagcgatgggcggtcaggggcgtctgtttgcccaggtaatggctaccactgctgaagggatggtgaatgacgcacgtaaattgcgttctattattgcggatatcgtggtgaaagttccggtgaccgccgaggggctggcagctattaagatgttaaaagcggaagggattccaacgctgggaaccgcggtatatggcgcagcacaagggctgctgtcggcgctggcaggtgcggaatatgttgcgccttacgttaatcgtattgatgctcagggcggtagcggcattcagactgtgaccgacttacaccagttattgaaaatgcatgcgccgcaggcgaaagtgctggcagcgagtttcaaaaacccgcgtcaggcgctggactgcttactggcaggatgtgaatcaattacgctgccactggatgtggcacaacagatgattagctatccggcggttgatgccgctgtgacgaagtttgaacaggactggctgggagcgtttggcagaacgtcgatttaa

SEQ ID NO: 458511 - DNA, 900 bp, Shigella boydii
atgattttcaatattcagcgctactcgacccatgatggccccggtatccgcacggtcgtatttctaaaaggctgttcgctgggctgccgctggtgtcagaacccggaaagccgcgcccgcacgcaggatctgctgtatgacgcacgactgtgtctggaaggctgcgagctgtgcgctaaggcagcgccggaagtgattgagcgcgcattgaatggtttgcttattcatcgggaaaagttaaccccggagcatctgacggcgctaaccgactgctgcccgacacaggcgttaaccgtgtgtggggaagtgaaaagcgttgaggagatcatggcgaccgttctgcgcgataaaccgttttacgatcgcagcggcggcggcttaacgctttcgggtggtgaaccctttatgcagccggaaatagcgacggcgctactgcaagcctgccacgaggcaggcattcatactgcggtagaaacctgtctgcatgtgccgtggaaatatatcgccccttctctgccctatatcgatctgtttcttgccgatttaaaacacattgccgacgcgccgtttaaacagtggaccgacggtaacgccgccaaggtgctggataacctgaaaaaactcgccgcagcgggcaaaaaaatcattatccgcgtgccgctgattcagggctttaatgccgacgaaacctctgtaaaagccattaccgattttgccgccgacgagctgcacgttggcgaaattcattttctgccctaccacacgctgggcatcaacaaatatcacttacttaatctgccctatgacgccccggaaaaaccgcttgatgcgccagacctgctcgactttgcccagcagtatgcctgccagaaagggttaaccgcgaccttacgaggataa

SEQ ID NO: 458512 - DNA, 2433 bp, Shigella boydii
atgaccacactgaaactggacacgctcagcgaccgcattaaagcgcacaaaaatgcgctggtgcatattgtgaaaccgccggtctgtaccgagcgcgcgcagcactataccgagatgtatcaacaacatctcgataagccgatcccggtacgtcgcgcgctggctctggcgcatcacctggcgaatcgcaccatctggatcaagcacgatgagttgatcatcggcaaccaggcaagcgaggttcgcgctgcgccgatcttcccggaatataccgtctcgtggatcgaaaaagagattgatgatctggcagatcgtcccggtgctggttttgcggtgagcgaagagaacaaacgcgttctgcatgaagtgtgcccgtggtggcgcggtcagacggtacaggatcgctgctacggcatgtttaccgatgagcaaaaaggtctgctggcgaccggaatcattaaagcggaaggcaatatgacctccggcgatgcgcacctggcggtgaatttcccgctgctgctggaaaaaggtcttgatggtctgcgcgagaaagtagcggaacgtcgctcgcgcatcaatctgacggtactggaagatttgcacggcgaacagttcctgaaagcgattgatatcgtgctggtggcagtcagcgaacacattgaacgttttgcagccctggcgcgtgaaatggccgcgaccgaaacccgcgaaagccgtcgcgatgaactgctggcgatagcagaaaactgcgatcttatcgcccaccagccgccgcagactttctggcaggcgctgcaactgtgttacttcatccagttgatattgcagatcgaatctaacggtcactcggtatcgtttggtcgtatggaccagtatctctacccgtactatcgccgcgacgttgaactcaaccagacactggatcgcgaacacgccatcgaattgctgcatagctgctggctgaaactgctggaagtgaacaagatccgctccggctcacactcaaaagcctctgcgggaagtcctctgtatcagaacgtcaccattggcggacaaactctggttgatggtcaaccaatggacgcggtgaatccactctcttacgcgatcctcgaatcctgcggtcgcctgcgttccactcagcctaacctcagcgtgcgttaccatgcaggaatgagtaatgatttcctcgacgcctgcgtacaggtgatccgttgcggcttcgggatgccggcgttcaacaacgacgaaatcgtgatcccggaatttattaaactcggtattgaaccgcaggacgcttacgactacgcagcgattggttgtatcgaaaccgccgttggtggcaaatggggctatcgctgtaccggcatgagctttatcaacttcgcccgcgtgatgctggcggcgctggaaggcgggcgtgatgccaccagcggcaacgtgttcctgccacaagaaaaagcgttgtcggcaggcaactttaacaatttcgatgaagtaatggacgcgtgggatacgcaaatccgttattacacgcgtaaatcaatcgaaatcgaatatgtcgtcgacaccatgctggaagagaacgtgcacgatattctctgctcggcgctggtggatgactgtattgagcgagcgaaaagtatcaagcaaggcggcgcgaaatatgactgggtttctggcctgcaggttggcattgccaacctcggcaacagcctggcggcagtgaagaaactggtatttgaacagggcacgattggtcagcaacagctggctgccgcactggcggatgacttcgatggcctgactcatgagcaactgcgtcagcggctgattaacggtgcgccgaagtacggcaacgacgatgatactgtcgatacgctgctggctcgcgcttatcagacctatatcgacgaactgaaacagtaccataatccgcgctacggtcgtggtccggttggcggcaactattacgcgggtacgtcatctatctccgctaacgtaccgtttggtgcgcaaactatggcaacgccggacgggcgtaaagcccacaccccgctggcagaaggcgctagtccggcctctggtactgaccatctcggccctactgcggtcattggctcggtgggtaaactgcctacggcagcgattctcggcggcgtgttgctcaaccagaaactgaatccggcaacgctggagaacgaatctgacaagcagaagctgatgatcctgctgcgcaccttcttcgaggtgcataaaggctggcatattcagtacaacatcgtttcccgcgaaacgctgctggaggcgaaaaaacatccggatcagtaccgcgatctggtagtgcgtgtcgcgggttattccgccttcttcaccgcgctctctccagacgctcaggacgatatcatcgctcgtactgaacatatgctgtaa

SEQ ID NO: 458513 - DNA, 816 bp, Shigella boydii
atgagcgtaaaagttatcgtcacagacatggacggtacttttcttaacgacgccaaaacgtacaaccaaccacgttttatggcgcaatatcaggaactgaaaaagcgcggcattgagttcgttgtcgccagcggtaatcagtattaccagcttatttcgttctttcctgagctaaaggatgagatctcttttgtcgcggaaaacggcgcactggtttacgaacatggcaagcaactgttccacggcgaactgacccgacatgaatcgcggattgttattggcgagttgctaaaagataagcaactcaattttgtcgcctgcggtctgcaaagtgcatatgtcagcgaaaatgcccccgaagcatttgtcgcactgatggcaaaacactaccatcgcctgaaagctgtaaaagattatcaggagattgacgacgtactgttcaagttttcgctcaacctgccagatgaacaaatcccgttagtgatcgacaaactgcacatagcgttcgatggcattatgaaacccgtcaccagtggttttggctttatcgacctgattattcccggtctacataaagcaaacggtatttcgcggttactgaaacgctgggatctgtcaccgcaaaatgtggtagcgattggcgacagcggtaacgatgcggagatgctgaaaatggcgcgttattcctttgcgatgggcaatgctgcggaaaacattaaacaaatcgcccgttacgctaccgatgataataatcatgaaggcgcgctgaatgtgattcaggcggtgctggataacacatccccttttaacagctga

SEQ ID NO: 458514 - DNA, 1266 bp, Shigella boydii
atggcttctacttttaccagcgacacattgccagccgatcacaaagcagctatccgtcagatgaagcacgcgctgcgggcgcagcttggcgacgtccagcagatctttaatcagctaagcgatgacattgccacgcgagtggctgaaatcaacgcactcaaagcacagggcgatgccgtctggccggtgctgtcttatgccgatatcaaagcaggtcatgttactgcagagcagcgcgaacagattaaacgtcgcggttgtgcggtgataaaaggccatttcccccgcgaacaagcgctaggctgggatcagtcgatgctggactatctggaccgcaaccgctttgacgaggtctacaaaggccccggcgataatttcttcgggacgctcagcgcttcacgtcccgagatttaccccatctactggtcgcagacgcaaatgcaggcccgccagagtgaagaaatggcgaatgcgcagtcgtttctcaatcgtctgtggacatttgaaagtgatggaaagcaatggtttaacccggatatgagcgtcatctaccctgaccgtatccgccgccgtccgcccggaacgacctccaaaggtcttggagcgcataccgactccggggcgctggaacgctggctgcttccagcgtatcagcgcgttttcgccaacgtctttaatggcaatctggcgcaatatgatccctggcatgcggcacatcgtacggaagttgaagagtacacggtggacaacaccaccaaatgttccgtgtttcggacattccagggctggacagcgctctctgatatgctgcctggtcaggggttgctgcacgttgtgcccattcctgaagccatggcgtacgtactgttacgtacgctgcttgatgatgtgccggaggatgaactgtgcggcgtagcgcccggaagagtgttgccggtatcagagcaatggcatccactgttaattgaggcgttaaccagcattccaaaactcgaggccggagactccgtctggtggcactgcgacgtcatccattccgttgcccccgttgaaaatcaacagggttggggcaacgtgatgtacattcctgcggcaccgatgtgcaagaaaaatcttgcctacgcgcacaaggtgaaggccgcactggaaaaaggcgcatcgccgggcgacttcccgcgcgaggactatgaaacaaactgggaaggacgctttacgcttgccgacctcaacattcacggtaagcgagcgttgggcatggatgtttga

SEQ ID NO: 458515 - DNA, 1593 bp, Shigella boydii
gtgttagtttccagtaacgtcaccatgcagttcggcagtaagccgttgtttgaaaacatttccgtcaaatttggcggcggcaaccgttacggcctgattggcgcgaacggtagtggtaaatccacctttatgaagatcctcggcggcgacttagagccgactttgggtaacgtttccctcgatcccaacgagcgcattggtaagctgcgtcaggatcagtttgcctttgaagagttcactgtgctggatacggtgatcatggggcataaagagttgtgggaagtgaagcaggagcgtgaccgcatctatgctttgccggaaatgagtgaggaagacggctataaagtggccgatctggaagttaaatacggcgaaatggacggttactctgcggaagctcgcgccggtgaattgttgcttggcgtgggaattccagtggaacagcactacggcccgatgagtgaagttgctcctggctggaagctgcgtgtgcttctggcgcaggcgctgtttgctgatccggatattctcctgctcgacgaaccgaccaacaacctcgacatcgacaccattcgctggctggaacaggtgctgaacgagcgtgacagcaccatgatcatcatctcgcacgaccgtcacttccttaacatggtctgtacccacatggcggatctggattacggcgagctgcgcgtttatccgggtaactacgatgagtacatgacggcggcgacccaggcgcgtgaacgtctgctggccgataacgccaagaagaaagcgcagattgctgagttgcaatctttcgttagccgctttagcgccaacgcctcgaaatctcgccaggcaacttcgcgcgcgcgccagattgataaaatcaaactggaagaggtgaaagcctccagccgtcagaacccgttcatccgttttgaacaggataagaaactgttccgtaacgcgctggaagtggaaggtctgaccaaagggtttgataacggtccactgtttaaaaatctcaacctgctgctggaggtcggtgaaaaacttgcggtactgggtaccaacggcgtcggtaaatcaacgctgatgaaaacgctggtgggcgatctgcaaccggacagcggcaccgtaaaatggtctgaaaacgcgcgcattggttactacgcccaggaccacgaatatgagtttgaaaatgatctgaccgtgttcgaatggatgagtcagtggaagcaggaaggcgatgacgagcaggcggtacgcagcattctcggtcgtttgctgttcagccaggacgacatcaaaaagccagctaaagtgctttccggtggggaaaaagggcggatgctgtttggtaagttaatgatgcagaagccgaacattctgatcatggacgaaccgaccaaccacctggatatggaatccatcgagtcactgaacatggcgctggaactgtatcagggcacgctgatctttgtttcacacgaccgtgagttcgtaagctccctggcgacccgcattctggaaatcaccccggaacgcgtgatcgactttagcggtaattacgaagattacctgcgtagtaaagggatcgagtaa

SEQ ID NO: 458516 - DNA, 921 bp, Shigella boydii
atgaatatgaaattgaaaacattattcgcagcggccttcgctgttgtcggcttttgcagtaccgcctctgcggtaacttatcctctgccaaccgacgggagtcgcctggttggtcagaatcaggtgatcaccattcctgaaggtaacactcagccgctggagtattttgccgcggagtaccagatggggctttccaatatgatggaagcgaacccgggtgtggataccttcctgccgaaaggcggtactgtactgaacattccgcagcagctgatcctgccggataccgttcatgaaggcatcgtcattaacagtgcagagatgcgtctgtattactatccgaaagggaccaacaccgttatcgtgctgccgatcggcattggtcagttaggcaaagatacgcctatcaactggaccaccaaagttgagcgtaagaaagcaggcccgacctggacgccgaccgccaaaatgcacgcagagtaccgcgctgcgggcgaaccgcttccggctgtcgttccggcaggtccggataacccgatgggtctgtatgcactctacatcggtcgcctgtatgctatccatggcaccaacgccaacttcggtatcggcctgcgtgtaagtcatggttgtgtgcgtctgcgtaacgaagacatcaaattcctgttcgagaaagtaccggtcggtacccgcgtacagtttattgatgagccggtaaaagcgaccaccgagccagacggcagccgttatattgaagtccataacccgctgtctaccaccgaagcccagtttgaaggtcaggaaattgtgccaattaccctgacgaagagcgtgcagacagtgaccggtcagccagatgttgaccaggttgttcttgatgaagcgattaaaaaccgctccgggatgccggttcgtctgaattaa

SEQ ID NO: 458517 - DNA, 1119 bp, Shigella boydii
atgagcctgccttttttacgcacgctgcaaggcgatcgtttttttcagttattaattcttgttggtatcggattaagctttttcgtgccctttgcaccgaaatcctggcctgctgctatcgactggcacaccatcatcaccttaagcggcctgatgctgctgaccaaaggtgtggagttaagcggttattttgatgtgctggggcgcaaaatggtgcgccgctttgctacggagcgtcggctggcgatgtttatggtgctggcggcggcgctgctttctacctttctgaccaacgatgtcgcgctgtttattgttgttccgctgactatcacgctaaaaagactgtgtgagatcccggttaatcggctgattatttttgaggcgctggcagtcaatgctggttcgctactgacgccaattggcaacccgcaaaatattcttatctggggacgttctggtctttcgtttgccggatttattgcccaaatggcaccgctggctggcgcaatgatgctgacgctcctgctcctgtgctggtgttgtttccctggaaaggtgctgcaataccatacgggggtgcaaacaccggagtggaaaccgcggctggtgtggagttgtctggggctgtatatcgtctttctaacggcgctggagttcaaacaagagctgtggggactggtgattgtggcggcaggctttgcgctgctggcacgtcgcgtggtgctcagtgtggactggacgctgctgctggtgtttatggcgatgtttatcgacgtccatttactgacccagcttccagcgttgcaaggcgtgttgggtaacgtgagtcatctatctgaacccgggttatggttaacggcaatcggtttatcgcaggtgatcagtaacgtgccgagtaccatattgttgctgaactatgtgccgccgtctttattactggcatgggcggtaaacgtaggtggctttgggttattacccggatcgctggcaagtttgattgcgctacgtatggcgaacgatcgccgcatctggtggcgtttccatctctattcaataccgatgctgttgtgggcggcgttggtgggatatgttttgttagttatactcccggccaactag

SEQ ID NO: 458518 - DNA, 468 bp, Shigella boydii
atgagtcgtcgcgcaggtacgccaacagcaaaaaaagtgacgcagttagtgaacgtggaagagcacgttgaagggttccgccaggtcagagaggcgcatcggcgcgagcttattgatgattacgttgagctgatttctgacttgatcagggaagtgggggaagctcgtcaggtggacatggctgctcgtctgggagtttcgcaaccgacggtggctaaaatgcttaagcggctggcaaccatggggctgattgaaatgatcccctggcgtggcgtgtttttaacggcagaaggagagaagctggcgcaggaaagccgcgagcgacatcagatagtcgaaaatttcttgttggtgttgggcgtcagtccggaaatcgcccgtcgcgacgcggaaggcatggagcaccatgttagtgaagagacgctcgacgcttttcgtttgtttacccagaaacacggtgccaaatga

SEQ ID NO: 458519 - DNA, 129 bp, Shigella boydii
atgaatgagttcaagaggtgtatgcgcgtgtttagtcattctccctttaaagtacggttaatactgctctctatgttgtgcgatatggtcaacaacaaaccgcagcaagataaaccttccgataaatag

SEQ ID NO: 458520 - DNA, 1584 bp, Shigella boydii
atgaatttaaccctcaaagaatcgcttgttacccgtagccgggtatttagcccgtggactgcgttctactttttacagtcgctattaattaacctcggcttaggttaccccttcagtttgctctacaccgctgcgtttacggctattttgcttttgctatggcgaacattgcctcgcgtacaaaaagttctggtcggtgtcagttcgctggtggcggcttgttatttcccttttgctcaggcctacggcgcgcctaatttcaatacattgctggcattgcactccaccaatatggaagagtcgaccgaaatcctgacgatttttccgtggtacagctacctggtcggcttatttatttttgcgctcggcgtaatagcaatcaggcgaaaaaaagagaatgaaaaagcgcgctggaataccttcgacagcctgtgtctggtattcagtgtggcgacattttttgttgctcccgtgcaaaacctggcctggggtggcgtatttaaactgaaagatactggctatccggtatttcgttttgctaaggatgtcatcgtcaataataacgaggtgattgaagagcaagaacggatggcaaaactttccggaatgaaagatacctggacggtcactgccgttaagccgaagtatcagacctatgtggtggtgatcggtgaaagcgcgcgtcgcgatgccctcggtgcctttggcggtcactgggacaataccccgtttgccagcagcgttaacggtttgatatttgctgactacattgccgccagtggctccacgcagaaatcgcttggcttaacgctcaatcgcgtagtcgatggcaaaccacagtttcaggataactttgtcaccctggcaaatcgcgcgggcttccagacctggtggttttccaaccagggccaaatcggcgaatacgatactgctatcgccagcatcgccaaacgtgcagatgaagtgtacttcctgaaagaaggtaattttgaagcagataaaaacacgaaagacgaagcgttactggatatgaccgctcaagtgctggcgcaagagcactcgcaaccgcagctgattgttctgcatctgatgggctcgcatccgcaggcctgcgacaggacacaaggcaaatacgaaacctttgtgcaatcgaaagaaacgtcgtgctatctctataccatgacgcaaacggacgatttactgcgcaagctgtacgatcagttacgcaacagcggcagcagcttctctctggtttacttttctgaccacggtctggcctttaaagagcgcggcaaagacgtgcaataccttgcccatgatgataaatatcagcaaaatttccaggtgccttttatggtcatttccagcgacgataaagcgcatcgggtgattaaagcccgccgctcagccaatgacttcttaggctttttctcgcagtggacgggaattaaagcgaaggaaataaatatcaaatacccgtttatatctgagaagaaagccgggccgatatacatcaccaacttccagttacagaaggtggattacaaccatctcggaaccgatattttcgacccgaaaccttaa

SEQ ID NO: 458521 - DNA, 516 bp, Shigella boydii
atgaaaaaaattgcatgtctttcagcactggccgcagttctggctttcaccgcaggtacttccgtagctgcgacttctaccgtaactggcggttacgcacagagcgacgctcagggccaaatgaacaaaatgggcggtttcaacctgaaataccgctatgaagaagacaacagcccgctgggtgtgatcggttctttcacttacaccgagaaaagtcgtactgcaagctctggtgactacaacaaaaaccagtactacggcatcactgctggtccggcttaccgcattaacgactgggcaagcatctacggtgtagtgggtgtgggttatggtaaattccagaccactgaatacccgacctacaaacacgacaccagcgactacggtttctcctacggtgctggtctgcagttcaacccgatggaaaacgttgctctggacttctcttacgagcagagccgtattcgtagcgttgacgtaggcacctggattgccggtgttggttaccgcttctaa

SEQ ID NO: 458522 - DNA, 888 bp, Shigella boydii
atgcctggttcattacgtaaaatgccggtctggttaccaatagtcatattgctcgttgccatggcgtctattcagggtggagcctcgttagctaagtcactttttcctctggtgggcgcaccgggtgtcactgcgctgcgtctggcattaggaacgctgatcctcatcgcgttctttaagccatggcgactgcgctttgccaaagagcaacggttaccgctgttgttttacggcgtttcgctgggtgggatgaattatcttttttatctttctattcagacagtaccgctgggtattgcggtggcgctggagttcaccggaccactggcggtggcgctgttctcttctcgtcgcccggtagatttcgtctgggttgtgctggcggttcttggtctgtggttcctgctaccgctggggcaagacgtttcccatgtcgatttaaccggctgtgcgctggcactgggggccggggcttgttgggctatttacattttaagtgggcaacgcgcaggagcggaacatggccctgcgacggtggcaattggttcgttgattgcagcattaattttcgtgccaattggagcgcttcaggctggtgaagcactctggcactggtcggttattccattgggtctggctgtcgctattctctcgaccgctctgccttattcgctggaaatgattgccctcacccgtttgccaacacggacatttggtacgctgatgagcatggaaccggcgctggctgccgtttccgggatgattttcctcggagaaacactgacacccatacagctgctggcgctcggcgctatcatcgccgcttcaatggggtctacgctgacagtacgcaaagagagcaaaataaaagaattagacattaattaa

SEQ ID NO: 458523 - DNA, 504 bp, Shigella boydii
atgagtaccgctaaattagttaaatcaaaagcgaccaatctgctttatacccgcaacgatgtctccgacagcgagaaaaaagcaacagtagagttgctgaatcgccaggttatccagtttattgatctttctttgattaccaaacaagcgcactggaacatgcgcggcgctaacttcattgccgtacatgaaatgctggatggcttccgcaccgcactgatcgatcatctggataccatggcagaacgtgcagtgcagctgggcggtgtagctctggggaccactcaagttatcaacagcaaaaccccgctgaaaagttacccgctggacatccacaacgttcaggatcacctgaaagaactggctgaccgttacgcaatcgtcgctaatgacgtacgcaaagcgattggcgaagcgaaagatgacgacaccgcagatatcctgaccgccgcgtctcgcgacctggataaattcctgtggtttatcgagtctaacatcgaataa

SEQ ID NO: 458524 - DNA, 747 bp, Shigella boydii
atgaagtctgtattaaaagtttcactggctgcactgaccctggtttttgcggtttcttctcatgccgcggataaaaaattagttgtcgcgacggataccgccttcgttccgtttgaatttaaacagggcgataaatatgtgggctttgacgttgatctgtgggctgccatcgctaaagagctgaagctggattacgaactgaagccgatggatttcagtgggatcattccggcactgcaaaccaaaaacgtcgatctggcgctggcgggcattaccatcaccgacgagcgtaaaaaagcgatcgatttctctgacggctactacaaaagcggcctgttagtgatggtgaaagctaacaataacgatgtgaaaagcgtgaaagatctcgacgggaaagtggttgctgtgaagagcggtactggctccgttgattacgcgaaagcaaacatcaaaactaaagatctgcgtcagttcccgaacatcgataacgcctatatggaactgggcaccaaccgcgcagacgccgttctgcacgatacgccaaacattctgtacttcatcaaaaccgccggtaacggtcagttcaaagcggtaggtgactctctggaagcgcagcaatacggtattgcgttcccgaaaggttgcgacgagctgcgtgacaaagtcaacggcgcgttgaaaaccctgcgcgagaacggaacttacaacgaaatctacaaaaaatggttcggtactgaaccgaaataa

SEQ ID NO: 458525 - DNA, 660 bp, Shigella boydii
atgcagtttgactggagtgccatctggcctgccattccgcttctgattgaaggtgccaaaatgaccctgtggatttcggtcctcggtctggctggcggtctggtaatcggattgctggcaggttttgcacgcaccttcggtggttggatagccaaccacgtcgcgctggtctttattgaagtgatccgcggcacacctatcgtcgtccaggtgatgtttatctatttcgccctgccgatggcgtttaacgacttacgcatcgacccatttactgcggcggtggtcaccatcatgatcaactccggcgcgtacattgcggaaatcacgcgtggtgcggtgctgtctattcacaaaggttttcgtgaagcaggactggcgctcggtctttcacgttgggaaaccattcgctacatcattttaccgctggcactgcgtcgtatgctgccgccgctgggtaaccagtggatcatcagcattaaagacacctcgctgtttattgttatcggcgtggcggaactgacccgtcaggggcaagaaattattgccggtaacttccgcgcccttgagatctggagcgccgtggcggtgttctatctgattattaccctggtgctgagctttattctgcgtcgtctggaaagaaggatgaaaatcctgtga

SEQ ID NO: 458526 - DNA, 723 bp, Shigella boydii
gtgattgaatttaaaaacgtctccaagcactttggcccaacccaggtgctgcacaatatcgatttgaacattgcccagggcgaagtcgtggtgattatcgggccgtccggttccggtaaatcgaccctgctgcgctgcatcaacaaactggaagaaatcacctccggcgatctgattgtcgatggcctgaaggttaacgatccgaaagttgacgagcgcctgattcgccaggaagcaggtatggtgttccagcagttttacctcttcccgcatctgacggcgctggaaaacgtcatgtttggtccgctacgcgtgcgtggcgcgaacaaagaagaggcggaaaaactggcgcgtgagctgctggcgaaagtcggtctggcagaacgtgcacatcactacccttccgaactttctggtggtcaacagcagcgtgtggcgattgcccgcgcgctggcggtgaagccgaaaatgatgctgtttgatgaaccgacttccgctcttgacccggaactgcgccatgaagtgctgaaggttatgcaggatctggctgaagaagggatgacgatggtgatcgtgacccacgaaatcggttttgccgagaaagtagcttcgcggctgatctttatcgacaaaggccggattgcggaagatggcaatccgcaggtgttgatcaagaacccgccgagccagcgcttgcaggaatttttgcagcacgtctcttaa

SEQ ID NO: 458527 - DNA, 213 bp, Shigella boydii
atgtctaataaaatgactggtttagtaaaatggtttaacgcagataaaggttttggctttatcactcctgatgatggcagcaaagacgttttcgtccatttcactgccatccagagcaatgaattccgcacgctgaacgaaaatcagaaagttgaattttctattgagcaggggcaacgtggccccgcggcagcgaacgttgttacgctctaa

SEQ ID NO: 458528 - DNA, 213 bp, Shigella boydii
ttgtcccgtaaaatgacaggaattgtcaaaacctttgatcgcaaaagcggcaaaggattcattatcccctccgacggtcgtaaagaagttcaggtccatatttccgcattcactccccgcgacgcagaagtgcttataccaggattacgtgtggaattttgccgcgtaaatggcctgcgaggaccaacagcggcaaatgtttatctctcttaa

SEQ ID NO: 458529 - DNA, 306 bp, Shigella boydii; identical to SEQ ID NO: 11148

SEQ ID NO: 458530 - DNA, 645 bp, Shigella boydii
gtgcgccctcttattttatcgattttcgcactatttcttgcgggatgtacgcacagccagcaaagtatggtcgatacatttcgcgccagccttttcgataatcaggatatcaccgtagcggatcagcagatccaggcgttgccttattccacgatgtatttacgccttaatgaagggcaacgaatctttgtggtactgggatatatagaacaagaacaaagcaaatggttatcccaggataacgccatgctggttacccacaatggacgtcttttaaaaaccgtcaaacttaataataatctgctggaagtgacaaattccgggcaggaccctctgcgtaacgcgctggcaataaaagatggcagccgctggacgcgcgatattctctggagtgaagacaaccattttcgctctgcgaccctgagttctactttttcctttgctggattagagacgctgaatattgcgggtcgcaatgtgctgtgtaatgtctggcaggaagaggtgacttccacgcggccagaaaaacagtggcaaaacacattctgggtcgattcggctactggccaggttcgtcaaagtcggcaaatgttaggcgcaggggttattcccgtagaaatgacgtttcttaaacccgcaccatga

SEQ ID NO: 458531 - DNA, 747 bp, Shigella boydii
atgaataaattacagtcgtatttcattgccagcgtactttacgtaatgacaccccatgcctttgcgcaaggaacggtgactatttatctgcctggcgaacaacagacactttccgttggccccatggaaaatgttgtccagttggtgacacaaccgcaactgcgcgatcgcctctggtggcctggtgccttgctgaccgactctgcggcgaaagctaaagcgcttaaagactaccaacatgtcatggcacagcttgcttcctgggaagcagaagctaacgacgatgtggcggcaacgattaaatccgtgcgccagcagttactcaatctcaatatcactggtcgcttaccggtcaaactggaccctgattttgttcgagtggatgagaacagcaatcccccgttggtcggggactatacgctctataccgtacagcgtccggtgactattactctgctgggtgcggtttctggggccgggcaattgccctggcaggcaggccgtagcgttaccgattatctgcaagatcacccccgccttgcaggcgcggacaagaataacgttatggtgattacgcctgagggtgagactgtcgtcgcccctgttgccctgtggaataaaagacatgtggaaccaccgcctggcagccagctttggttgggcttttctgcgcatgtactgcccgaaaaatatgctgatttaaatgaccagattgtgtctgttttaacgcaacgtgttcctgactga

SEQ ID NO: 458532 - DNA, 2097 bp, Shigella boydii
atgaagaagaattcttatcttttaagctgcctggccattgccgtctccagtgcctgtcatgctgaagtattaacctacccggatccgctgggttcgtcgcaatcagactttggcggcacaggattgttgcagatgccaaatgcgcgcatcgcaccggaaggtgaattcagcgtcaactaccgggataacgatcaataccggttctactccacctccgtggcgctgttcccatggctggaaggcaccattcgttatacggatgtgcgcacacgcaaatatagccagtgggaagatttcagcggcgatcagtcatacaaagacaaatcattcgattttaaacttcgcctgtgggaagaaggttactggctaccgcaagtggcgtttggtaaacgtgatattgctggtacgggtctgtttgacggtgagtatctggtggccagcaagcaagcggggccatttgatttcaccctcgggatggcatggggctacgccggtaatgcgggcaatattaccaacccgttttgccgggtgagcgataaatattgtcatcgcgcagagtctcacgatgcgggcgatatcagctttagcgatatctttcgtggcccggcttccatctttggcggcattgagtatcaaacgccgtggaatcccctgcgtctgaaactcgaatacgatggcaacaattaccagaatgatttcgctggcaaactgcctcaggcaagccatttcaacgtcggcgcagtttatcgcgctgccagctgggcagatctcaacctgagttatgaacgcggtaacacgttgatgtttggcttcacgttacggaccaatttcaacgatctgcgccctgccctgcgcgatacgccaaaaccggcatatcaacctgcgcctgaatctgaaggattgcagtacaccacagtagcgaaccaacttaccgcgctgaagtacaacgcaggttttgaagcaccggaaattcagctgcgcgataagacgctgtatatgtctggtcaacaatacaaataccgtgattctcgcgaagcggtcgatcgtgccaaccggattctggtgaataacctgccgcaaggcgttgagaagattagcgtgacgcaaaagcgcgagcatatggcgatggtgactaccgaaaccgacgtagccagcctgcgcaaacagctggctggtacagcgcctggtcaatcagagcaacttcaacaacaacgtgttgaagcagaagatctttctgcctttggtcggggctaccgtattcgtgaagatcgctttagctactctttcaacccaacactttcacagtcgctgggcggcccggaagatttctatatgttccagctggggctgatgcccagtgcccgctactggtttaccgaccacctgctgcttgatggcggtattttcaccaatatttacaacaactacgacaagtttaagtcttcgctgttgcccgcggactctaccctgccccgcgtgcgcacgcatatccgtgattacgttcgcaatgacgtttatctcaacaacttgcaggcgaactactttgccgacttaggcaatggtttctatggccaggtgtatggcggttatctggaaacgatgtacgccggtgtcggttccgagctgctttatcgcccgctagatgccagctgggcgctgggtgtggacgttaactacgtgaagcaacgtgactgggacaacatgatgcgcttcaccgattattccacgccaactggtttcgtgacggcttactggaacccgccgacgctcaatggcgtactgatgaaacttagcgttgggcaatatctggcaaaagataaaggcgcaacgatcgacgtcgccaaacgctttgacagcggcgtggcggtaggggtatgggcggcaatcagtaacgtatctaaagatgactacggcgaaggcggctttagtaaaggtttttatatctcgattccattcgacttgatgaccattggacctaaccgcaaccgcgcggtggtttcgtggacaccattgacgcgtgatggtggacaaatgctgtcacgcaaataccagctctatccaatgacggcagagcgagaagtaccggttggacaataa

SEQ ID NO: 458533 - DNA, 1140 bp, Shigella boydii
atgaaaaagaacatttttaagttttcgatactgacattggctgttctgtctttgacagcatgtacccttgttcctggtcagaatttatcgaccagtaacaaggatgtcattgaactacctgacaatcagtatgacctggacaaaatggtcaatatctatcccgtcacgccaggattgattgatcagttgcgcgccaaaccgattatgtcgcaggctaacccggagctggagcagcaaatcgcaaactatgaatatcgtatcgggattggtgatgtgttgatggttacggtctgggatcacccggaactaaccacccccgcagggcaataccgtagcgccagtgataccggcaactgggttaacgccgatggtgcgattttctacccctatattggtcgcctgaaagtggccgggaaaacacttacccaggtacgcaacgagattacagcgcgtctcgattcagtcattgaaagcccgcaagtcgatgtcagcgtcgcggcgttccgatcgcaaaaagcgtacgtcaccggcgaagtcagcaaatcgggtcagcagccgattaccaatattcctctgaccatcatggatgcgattaacgccgcgggcggtctgaccgcagatgcagactggcgcaacgtggtgctcacccagaatggcgtaaagaccaaagtgaacctctatgcgctgatgcagcgtggcgacttgcgccagaacaaactgctgcacccgggcgatattttatttattccgcgcaacgatgatctgaaagtcttcgtgatgggtgaagtgggtaaacagagcacgctgaaaatggaccgcagcggtatgaccctggcggaagcgctgggtaacgctgagggtatgaatcaggatgtcgctgatgcgacggggatttttgttattcgtgcaacgcaaaacaagcagaatggcaaaatcgccaatatttatcagctgaatgcgaaggacgcatcggcaatgatactcggaacggaattccagcttgaaccttacgacattgtttatgtcactaccgcgccgctggctcgttggaaccgtgtgatttctctgctggtaccgacgatttccggggtgcatgacctgacagagacttcacggtggattcaaacatggcccaactaa

SEQ ID NO: 458534 - DNA, 447 bp, Shigella boydii
atggcccaactaaaatttaactcaatcctggtggtttgtaccggcaacatttgccgttcgcccattggcgagcgcttgctgcgtaaacgtctgccaggcgtaaaagtcaaatcggcaggtgttcatggtctggtaaaacaccctgcagatgcgacagcagcagatgttgccgctaatcatggcgtatctcttgaaggacatgccggacgtaagctcactgctgagatggcacgaaattacgatctgattctggcaatggagtcagagcatattgctcaggttaccgcaatcgctcccgaggtccgcgggaagacaatgctgtttgggcaatggctggaacagaaagagatcccggatccctatcgtaaaagtcaggacgcatttgaacatgtctacggtatgttggagcgcgccagtcaggaatgggcgaagcgcctcagccggtaa

SEQ ID NO: 458535 - DNA, 2181 bp, Shigella boydii
atgacaactaaaaatatgaatacgccaccaggcagtactcaggaaaatgagatcgatctgcttcgtctggtcggcgagttatgggatcaccgtaagtttattatcagcgtgaccgcgttattcacgctgatcgctgtcgcttactcgctgttaagcacaccaatttatcaggcagatactctggtccaggttgagcaaaaacagggcaacgccattctcagcggcctgagcgatatgatccctaactcatcgcccgagtctgcaccggagattcaactgctgcaatcgcgcatgattctcggtaaaaccattgctgaactgaatctgcgcgacatagttgagcagaagtattttccgattgtgggtcgcggctgggcgagattaaccaaagaaaaaccaggtgagctggcgatcagctggatgcatattccacaactgaatggtcaggatcagcaactgacactcacggttggggaaaacggccactatacactggaaggtgaagagttcaccgtcaatggtatggtcggccagcgtctggaaaaagatggcgttgcgctgactatcgcggacattaaggccaaaccaggaacacagtttgtcctgagccagcctaccgaactggaagcgattaacgcattgcaggaaacctttaccgttagcgaacgcagtaaagaaagcgggatgctggaacttaccatgactggtgatgatccccagttgattactcgtattctgaacagcatcgctaacaactatttgcaacagaatatcgctcgccaggcggcgcaggattcacaaagccttgaattcttacagcgccagttgcctgaagtgcgcagcgagctggaccaggcggaagaaaaactcaacgtttatcgccagcagcgcgattcggttgaccttaacctagaagccaaagccgttcttgagcagattgtgaacgttgataatcaactcaatgagctgactttccgcgaggcagagatctcccagctgtataagaaagatcacccaacttatcgtgcgctgctggaaaaacgccagacgctggagcaagaacgcaaacgcctgaataagcgggtatcggcaatgccttccactcaacaggaagtgttacgtttaagccgtgacgtagaagcgggccgtgcggtatatctgcaattacttaaccgccagcaggagttgagtatttcgaaatccagtgccattggtaacgtgcggattatcgacccggcagtcactcagccgcagccagtgaaaccgaaaaaagcgttgaacgtggtgcttggttttattcttggcctgtttatttcggtgggtgccgtgctggcgcgtgcgatgttgcgtcgtggtgtagaagccccggaacaactggaagagcacggcatcagcgtttatgccactatcccaatgtccgagtggctggataaacgtacccgtctgcgtaagaaaaatttattttctaatcagcagcgccatcgtactaaaaatatccccttcctggcggtggataacccggcggattctgctgtggaagccgtacgtgcgctacgaaccagtctgcacttcgctatgatggagacggagaataacattctgatgatcaccggtgcgacgccagacagtggtaaaacgtttgtcagttcaactctggcagcggtgatcgcccagtccgatcaaaaagtgttatttattgatgccgacttacgccgtggttattcgcataacctgtttaccgtgagtaatgaacatggcttgtcggaatatctggcaggtaaagatgagctcaacaaagtgatccagcattttggcaaaggaggctttgatgtgattactcgcggtcaggtgccacctaacccgtctgaactgctgatgcgcgatcggatgcgtcaattactggaatgggcgaacgaccattacgatctggtgattgtcgatacgccgccgatgctggcggtgagtgatgccgcggtcgtggggcgttctgttggcaccagcctgctggttgcgcgttttggcttgaacaccgccaaagaggtgagtttgtcaatgcagcgtctggaacaggcaggcgtcaatattaaaggcgctatcctcaatggtgtgattaaacgcgccagcaccgcttacagttacggctataactattacggttatagttactccgagaaagagtaa

SEQ ID NO: 458536 - DNA, 1299 bp, Shigella boydii
atgaaagcgatcttaatcccatttttatctcttctgattccgttaacctcgcaatctgcattcgctcagagtgagccggagctgaagctggaaagtgtggtgattgtcagtcgtcatggtgtgcgtgctccaaccaaggccacgcaactgatgcaggatgtcaccccagacgcatggccaacctggccggtaaaactgggttggctgacaccgcgcggtggtgagctaatcgcctatttcggacattaccaacgccagcgtctggtggccgacggattgctggcaaaaaagggctgtccgcagcctggtcaggtcgcgattattgctgatgtcgacgagcgtacccgtaaaacaggcgaagccttcgccgccgggctggcacctgactgtgcaataaccgtacatacccaggcagatacgtccagtcccgatccgttatttaatcctctaaaaactggcgtttgccaactggataatgcgaacgtgactgacgcgatcctcagcaaggcaggagggtcaattgctgactttaccgggcatcggcaaacggcgtttcgcgaactggaacgggtgcttaattttccgcaatcaaacttgtgccttaaacgtgagaaacaggacgaaagctgttcattaacgcaggcattaccatcggaactcaaggtgagcgccgacaatgtctcattaaccggtgcggtaagcctcgcatcaatgctgacggagatatttctcctgcaacaagcacagggaatgccagagccggggtggggaaggatcaccgattcacaccagtggaacaccttgctaagtttgcataacgcgcaattttatttgctacaacgcacgccagaggttgcccgcagccgcgccaccccgttattggatttgatcatggcagcgttgacgccccatccaccgcaaaaacaggcgtatggtgtgacattacccacttcagtactgtttattgccggacacgatactaatctggcaaatctcggcggcgcactggagctcaactggacgcttcccggtcagccggataacacgccgccaggtggtgaactggtgtttgaacgctggcgtcggctaagcgataacagccagtggattcaggtttcgctggtcttccagactttacagcagatgcgtgataaaacgccgctgtcattaaatacgccgcccggagaggtgaaactgaccctggcaggatgtgaagagcgaaatgcgcagggcatgtgttcgttggcaggttttacgcaaatcgtgaatgaagcacgcataccggcgtgcagtttgtaa

SEQ ID NO: 458537 - DNA, 1137 bp, Shigella boydii
atgtttgattatgaaacattgcgcttcatctggtggctgctgattggcgtgatcctggtggtctttatgatctccgacggatttgacatggggatcggctgtctgctgccgctggtggcgcgtaatgatgatgaacgccggatagtgataaacagcgttggtgcacactgggaaggcaaccaggtctggttgatcctcgctggtggggcattatttgccgcctggcccagagtgtatgcagcggcgttttccggcttttatgtggcgatgatcctggtgctgtgctcactgttcttccgcccgctggcctttgattatcgcggaaaaatcgccgatgcacgctggcgtaaaatgtgggacgccggtctggtcatcggcagtctggtgccgccggtagtcttcggtatcgccttcggcaacttgttgctcggcgtgccgtttgccttcacaccgcaattacgcgtggagtatctcggcagcttctggcaactgctgacgccattccctttattgtgcggattgctcagccttgggatggtgattttgcaaggtggcgtctggttacaactgaaaactgttggtgtgattcatctgcgttcacagctggccaccaaacgcgctgcactgttggtgatgctgtgctttttgctggcgggttactggctgtgggtcggtattgatggctttgtactgctcgcccaggatgctaacggtccttccaatccgttaatgaaactggtggcagtgctacctggtgcctggatgaataatttcgtcgaatcgcccgttttgtggatcttcccgctgctggggttcttctgcccattgctgacggtgatggcgatttatcgtggtcgcccaggttggggatttttaatggcgtcattgatgcaatttggcgtgattttcacggcaggcatcacgctgttccccttcgtcatgccgtcaagcgtgagtccgatctccagcctgacgttgtgggacagctcttccagccagctgacgctgagcattatgttggtaatcgtgctgatatttttgcccattgtgttgctctacactctctggagctactacaaaatgtgggggcgcatgacaacagaaactctccgccgtaacgaaaacgagttgtactaa

SEQ ID NO: 458538 - DNA, 1545 bp, Shigella boydii
atgtgggatgtcattgatttatcgcgctggcagtttgctctgaccgcgctgtatcactttttatttgtaccccttaccctggggctgatttttttgctggctatcatggaaaccatttacgtggtcaccggcaaaacaatctaccgcgatatgacgcgcttctggggtaagctcttcggtatcaattttgctcttggcgtggctaccggcctgaccatggagtttcagtttggtactaactgggcattctattccaactatgtgggcgatatttttggcgcaccgctggcgatggaagcattaatggccttcttcctcgaatccacctttgtcgggcttttcttcttcggctggcagcggctgaataaataccagcacctgctggtgacgtggctggtggcgttcggttcaaatctctctgcattgtggatattgaatgccaacggttggatgcaatacccgaccggtgcgcattttgatatcgacaccctacgtatggagatgaccagcttcagcgagctggtctttaacccggtcagccaggtgaaatttgtgcacaccgtaatggcgggctacgtgaccggggccatgtttattatggcgatcagcgcctggtatttactgcgcggacgggagcgcgatgttgcattacgctcgtttgccatcggttccgtcttcggtactctggcgattatcggcacgctacaactcggagacagttctgcgtatgaagtcgcgcaagtacaaccggtaaaactggcggcgatggaaggggagtggcaaacggaacctgctcctgcaccgttccatgtggttgcctggccggaacaggatcaagagcgtaacgcctttgccatcaaaattcccgcgctgttagggatcctcgccactcactcattagataaacccgtgccgggtctgaagaatttgatggctgaaacctacccacgtttgcaacgcggacgtatggcctggctgttaatgcaggaaatatcgcaaggcaatcgtgagccgcatgtgttgcaggcattccgggaactggaaggtgacctgggctacggcatgttgctctcccgctatgcgccggatatgaatcatgtcacagccgcacagtaccaggcggcgatgcgtggcgcgatacctcaggttgcgccggtattctggagtttccgcatcatggtgggctgtggttccctgctgctactggtgatgctgattgcgcttgtccagacgctgcgtggcaaaatcgaccagcatcgctgggtgctgaaaatggcgctctggagtttgccgttgccgtggattgcgattgaagccgggtggtttatgaccgagtttggtcgtcagccgtgggcgatacaggacatcttaccgacatactccgcgcactccgctttaaccacaggacaactggctttctcactgatcatgatcgtagggctttacaccctgttcttaatcgccgaagtctacctgatgcagaaatatgcccgtctggggccgagcgcgatgcagagtgaacaaccgacgcagcaacaggggtaa

SEQ ID NO: 458539 - DNA, 858 bp, Shigella boydii
atgagcgaaacttttttccatctgctggggccaggaacgcaaccgaacgatgacagtttcagcatgaatccactgccgatcacctgtcaggtgaatgatgaaccgagtatggcggccctggagcaatgtgctcacagcccgcaggtgattgcgctgttaaacgagttacaacatcaactaagcgaacgccagccgccgttgggcgaggtgctggcagtcgatctgttaaatctcaacgccgacgatcgtcactttatcaatacgcttctcggggaaggggaagtgtcagtgcgcattcagcaggctgacgacagtaaaagtgaaatacaggaggcgatcttctgcggattatggcgggtgcgcagacgtcgcggcgaaaagttgctggaggacaaactggaggctggctgcgcgccgctggcgttgtggcaggcggcaacgcaaaatctcttgccgacagattcgctgttaccgccgcccattgatggcctgatgaatggcctaccgttggcgcatgagttactggcacatgtacgtaaccccgacgcgcagccgcacagcattaatctgacgcaattacccatcagcgaggctgatcggctttttctctcacgtctctgtgggccgggaaatattcagattcgtaccattggctatggcgagagctatatcaacgccacggggttacgccatgtctggcatttacgctgtacggacaccttaaaaggcccgttactggaaagttatgaaatctgcccaataccggaagtggtgctggcagcgccagaagatttggtcgactctgcgcagcggcttagcgaggtatgtcagtggctggcggaagctgcaccgacgtaa

SEQ ID NO: 458540 - DNA, 399 bp, Shigella boydii
atgagcaacgacacgccatttgatgcgttgtggcaacgaatgctggcgcgcggctggacgccggtcagtgaatcccgtcttgacgactggcttacgcaagcgccagacggcgtggtgttattaagcagtgacccgaaacgcacgccagaggtcagcgataatccggtaatgattggcgaattactgcacgagtttcccgactatacatggcaggtggcgattgctgaccttgagcagagcgaagccatcggcgatcgctttggcgtctttcgctttcctaccactttagtgtttaccggcggaaactatcgcggcgtgctgaatggtattcacccgtgggcggaactgataaacctgatgcgcgggcttgtcgaaccgcagcaggagcgtgcctcatga

SEQ ID NO: 458541 - DNA, 588 bp, Shigella boydii
atgagcgagcaacgcgtggtggtcatggggctgggcaacctgctgtgggccgatgaaggcttcggcgtgcgggtggcggaacggctgtatgcccattaccactggcccgagtatgtggagattgtcgatggcggtactcagggactgaacttgctggggtatgtcgaaagcgccagccatctgttgattctcgatgccattgactacgggctggaacctggaacgctgcgaacctatgccggagaacgcattccggcttatctcagcgcgaagaaaatgagcctgcatcagaacagtttctccgaagtgctggcgctggcagatatccgcggacatctgccagcacatattgccctcgtcgggctgcaacccgcgatgctcgacgactacggcggcagtctgagcgaactggcacgggagcaactgctcgctgcggaacaatcggctctggcgcagttggctgcgtggggaagtgtgccgcaaccggctaatgaatcgcgttgtctcaattatgactgtctgtcgatggaaaattacgaaggcgttcgcttgcgccagtaccggatgacacaggaggagcagggatga

SEQ ID NO: 458542 - DNA, 708 bp, Shigella boydii
atgcaacagaaaagcgacaacgttgtcagccactatgtctttgaagcgccagtccgcatctggcactggttgacggtgttatgcatggcggtgttgatggtcaccggatactttatcggcaagccgctaccttccgtcagcggcgaggcgacgtatctgttctatatgggctacatcaggttaattcacttcagcgccgggatggtttttaccgtggttttgctgatgcggatctactgggcttttgttggcaatcgatactcccgcgagctgtttatcgtgccggtatggcgtaaaagctggtggcagggcgtgtggtatgaaatccgctggtatctgtttctggcaaaacgtccgagtgccaatataggccataatcccatcgcccaggcggcgatgttcggctatttcctgatgtcggtctttatgatcatcactggttttgcgctgtacagcgaacacagccagtacgctatttttgcgccgttccgttatgtggtggaatttttctactggacgggtggcaactcaatggacattcacagctggcatcggctggggatgtggctgattggcgcgtttgtgatcggtcatgtctacatggcgctgcgtgaagacatcatgtccgacgacacggtgatctccaccatggtcaacggctaccgtagccacaaatttggcaaaataagtaacaaggagtgttcatga

SEQ ID NO: 458543 - DNA, 1794 bp, Shigella boydii
atgagcactcagtacgaaactcagggatacaccatcaataatgccggacgccgcctggtggtcgacccgattacgcgcatcgaaggccacatgcgctgcgaagtgaatattaacgatcagaatgtgatcaccaatgccgtctcctgcggcaccatgtttcgcgggctggagatcatcctacaagggcgcgacccgcgcgatgcgtgggcgttcgttgaacgtatctgcggcgtctgtactggcgtacacgccctggcttcggtttacgccatcgaagatgctatcggtattaaagtgccggacaacgccaatatcatccgcaacattatgctggcaacgctctggtgccacgatcatctggtgcacttctatcagcttgccgggatggactggatcgatgtgttagatgcgctgaaagccgacccgcggaaaacctccgaactggcgcaaagtctctcctcttggccgaaatcatcccctggctatttcttcgacgtacaaaaccgcctgaaaaaatttgttgaaggcgggcagttggggatcttccgcaatggctactgggggcacccgcagtacaaactgccgccagaagctaacctgatgggctttgcccactatctcgaagctctcgatttccagcgtgaaattgtcaaaatccacgcggtctttggcggtaaaaacccgcatccaaactggattgtcggcgggatgccttgcgccatcaacattgacgaaagcggcgcggtcggggcagtcaatatggaacgcctgaacctggtgcagtcaattatcacccgcacggcggacttcattaacaacgtgatgatccccgacgccttagccatcggtcagttcaacaaaccgtggagcgaaatcggcactggtctttctgataaatgcgttctcagctacggcgcattcccggatattgccaacgactttggcgagaaaagtctgctgatgcttggcggcgcggtgattaacggcgacttcaacaatgtgctgccagtggatttggttgatccgcagcaggtgcaggagtttgtcgaccacgcctggtatcgatatcccaacgatcaggtcgggcgtcatccgttcgatggcatcaccgacccgtggtacaaccccggcgatgtcaaaggcagcgataccaacattcagcagctgaatgaacaggaacgctactcgtggatcaaagcgccacgctggcgcggtaacgcgatggaagtggggccgctggcgcgcacgttaatcgcttatcacaaaggcgatgctgcgaccgttgagtcggtcgatcgcatgatgtcggcgttgaacctgccgctttccggtatccagtcaacgttaggccgcattttgtgccgcgcgcacgaagcgcagtgggccgcaggtaagttgcagtatttcttcgacaagctgatgaccaacctgaaaaacggcaatctcgccactgcttccacggaaaaatgggaacctgcaacctggccgacagagtgccgtggtgtcggttttaccgaagcgccgcgcggggcgttaggccactgggccgccattcgcgatggcaagattgatctctaccagtgcgtggtgccgaccacctggaacgccagcccgcgcgatcccaaagggcagattggcgcttatgaagcggcgctgatgaacaccaaaatggcgatccccgagcaaccgctggagatcctgcgtactctgcacagctttgacccgtgcctcgcctgttcaacacacgtgctgggcgacgacggtagcgagctgatctccgtgcaggtgcgttaa

SEQ ID NO: 458544 - DNA, 1119 bp, Shigella boydii
atgaataacgaggaaacattttaccaggccatgcggcgtcagggcgttacccggcgcagctttctcaaatattgtagtctggctgccacgtcgctgggattaggcgcgggaatggcaccaaagattgcctgggcgctggagaacaaaccccgcattccggtggtatggatccacggtctggaatgcacctgctgtaccgaatcttttatccgctccgctcacccactggcgaaggacgtcatcctttccctgatttccctcgattatgacgatactttgatggctgccgccggaacccaggcggaagaagtcttcgaagacatcatcacgcaatacaatggcaaatatatcctcgcagtagaaggtaatccgccgctgggcgagcaggggatgttctgtatcagcagcggtcgaccgtttattgagaaactcaaacgtgccgctgccggagccagcgcgattatcgcctggggaacctgcgcgtcctggggctgcgtgcaggccgcgcggcccaatccgacgcaggcaacgcctatcgacaaagtcatcaccgacaaacccattatcaaagtacctggctgcccgccgatcccggatgtgatgagcgccatcattacttacatggtgacctttgatcgcttgccagatgtcgacagaatgggccgtccgctgatgttctatggtcagcgaatccacgataaatgctatcgccgcgcccacttcgacgccggagagttcgtccagagttgggatgatgacgctgcccgcaaaggttactgcctgtacaaaatgggctgcaaagggcctaccacctataacgcctgttcctccacacgctggaatgatggcgtttctttcccaatccagtctggtcacggctgcctgggctgtgcggaaaatggtttctgggatcgcggttcgttctacagccgcgtggtcgatattccgcaaatgggtactcattccaccgccgataccgtcggtttaaccgcgcttggcgtggtggcagcggctgttggtgtgcacgcagtcgccagcgccgttgaccagcgcagacgtcataaccagcaacctacagaaaccgaacatcagccaggcaatgaggataaacaggcatga

SEQ ID NO: 458545 - DNA, 660 bp, Shigella boydii
atggatcgtattgttagttcttcacatgaccgtacatcactgcttagcacccataaggtgctgcgtaatacctattttctgctgagcctgacgctggccttttcggcgattaccgcaactgccagtacggtgctgatgctgccatctccgggtctgattctgacgctggtgggtatgtatggtttgatgttcctgacctataaaacggcgaataagccgaccgggattatctccgcattcgcctttaccggttttctgggttatatcctcggacctattctgaacacctatctgtctgccggaatgggtgacgtaatcgctatggcactgggcggaacggcgttagtgttcttctgctgctctgcatatgtgctgaccacccgcaaagatatgtcgttcctcggcggtatgctgatggcgggtattgtggtggtgctgattggtatggttgctaatatcttcctgcagctgcctgctctgcatctggcgatcagcgcggtcttcattttgatctcctctggcgctattttgtttgaaaccagcaacatcgttcatggcggtgaaacgaactatattcgtgccacggttagcctgtatgtttcgctgtacaacatcttcgtcagcctgctgagcattctgggcttcgccagccgcgattaa

SEQ ID NO: 458546 - DNA, 330 bp, Shigella boydii
atgctgatcttcgaaggtaaagagatagaaacggataccgaaggctatctcaaagaaagcagccagtggagtgagccgctggcagtggtgattgcagagaacgaagggatttcgctgtcaccggaacactgggaagtggtgcgttttgtgcgtgatttctatctggaattcaatacttctccggcgattcgtatgctggtaaaagcgatggcgaataaatttggcgaagaaaaaggtaacagccgctatttataccgactgtttccgaaaggtccggctaagcaagccaccaaaattgctggcctgccaaaaccggtaaaatgtatttaa

SEQ ID NO: 458547 - DNA, 279 bp, Shigella boydii
atgtcgaaagtctgcataattgcctgggtttacgggcgagttcagggcgtaggatttcgctacaccacacagtacgaagcgaaaagactgggtttaaccgggtacgccaaaaatcttgacgatggcagcgtggaagtggttgcctgcggtgaagaagggcaggtggaaaaattaatgcagtggttaaagagtggcagcccgcgttctgcgcgtgtagaacgggtgctcagcgagccgcatcatccctcgggggaattaaccgattttcgtatccgttaa

SEQ ID NO: 458548 - DNA, 1176 bp, Shigella boydii
gtgttagccaaagggcgcgaaaaatcattacttcgtcgccatccgtgggtcttttccgggaccgttgcccgcatggaaggtaaagccagcctcggtgaaaccatcgatattgttgatcatcagggaaaatggttagcacgcggcgcttattcgccagcttcgcaaatccgggcgcgcgtctggacgtttgacccgtctgagtctatcgacattgcttttttttcccgccgtttgcaacaagcacaaaaatggcgtgactggctggcgcaaaaagatggcctcgacagctatcgtttaatcgccggagaatctgatggcctgccgggtattactatcgatcgtttcggtaattttctggtgctgcaactgctgagtgctggggcagaatatcagcgcgcggcattagttagtgccctgcaaacgctgtacccggaatgtgcgatttacgatcgcagcgatgttgcggtacgtaaaaaagaagggatggagctgaccctgggcctcgtcaccggcgagttgccgcctgccctgctgccgattgaagaacacggcatgaagctgctggtggatattcagcacgggcacaaaacgggctactacctggaccagcgagacagccgcctggctacccgccgctacgttgaaaataaacgtgtgctgaactgtttctcctataccggtggtttcgccgtatcggcactgatgggcggttgcagccaggttgtcagcgttgatacctcccaggaagcgctggatattgcacggcagaacgttgagctgaacaaactggatctgagcaaggctgagtttgtccgtgatgatgtctttaaattgctgcgtacttatcgcgatcgcggtgaaaaatttgacgttatcgtgatggacccgccgaagtttgttgagaataaaagccagttgatgggcgcgtgtcgtggctataaagatatcaacatgctggcgattcagttgctgaatgaaggcggtattctcctgactttctcctgttccggtctgatgaccagcgatttatttcagaaaatcatcgcggatgccgcaattgatgccggccgtgatgtacaatttatagagcagttccgtcaggcagccgatcatccggtgatcgctacctatccggaagggctatatctgaaagggtttgcctgtcgcgtcatgtaa

SEQ ID NO: 458549 - DNA, 318 bp, Shigella boydii
atgattgccagcaaattcggtatcggccagcaggtccgccattccctgttaggttatctcggagtggtcgtggatatcgacccggtttattcgctctctgaaccgtcgcctgatgagctggcggtaaatgacgagcttcgcgccgctccgtggtatcacgtagtgatggaggacgataacggcctaccggttcatacctacctagctgaagcccagctaagtagcgaattgcaggatgaacatcctgaacagccatccatggatgagctggcgcagaccatccgcaaacaactccaggccccgcgtctgcgtaactga

SEQ ID NO: 458550 - DNA, 414 bp, Shigella boydii
atgaaagaaaccgatattgcaggcattttaacgtccactcacaccattgcgctggtgggggcaagcgacaaacccgatcgtcccagctatcgcgtgatgaaatatctactcgaccaggggtatcatgtcattccggtttcgccaaaagttgccggcaaaacgctgctgggccagcaggggtatggcacgctggcagacgttccggaaaaggtcgatatggtcgatgttttccgtaattcagaagcggcgtggggcgtggcacaggaagctattgccattggcgcgaaaaccctctggatgcaactgggggtgattaatgagcaagcggcagtactggcacgggatgccgggttgaatgtggtgatggatcgctgcccggctattgagatccctcgcctgggcctggccaaataa

SEQ ID NO: 458551 - DNA, 663 bp, Shigella boydii
atgaaaaccggcatcgtgaccaccttgattgcattatgtttgccggtatccgtttttgccaccacgctgcggctttcaaccgatgtcgatcttctggtactcgacggcaagaaggtttccagctctctgctacgcggtgcggacagcattgaactggataatggaccgcatcagttagtgtttcgcgttgagaagacgattcatctttccaatagtgaagaacggctgtatatctccccaccgctggtggtcagttttaatacccagctcatcaaccaggtcaattttcgcctgcctcgcctggagaatgagcgggaagctaaccattttgatgccgcgccgcgccttgaattgttggatggcgatgcgacgccgattccggtaaagctggatattctcgccattacctcaacggcaaaaacgattgattatgaggtcgaggttgaacgctataacaaatccgcgaaacgcgcttcactaccgcaatttgccacgatgatggcagatgacagtacgctgctttcgggtgtttccgagctggatgctattccaccgcagtctcaggtgctcacagaacaacggctgaagtattggtttaaactggctgacccacaaacgcgaaatactttcctgcagtgggcggaaaaacaaccatcttcctga

SEQ ID NO: 458552 - DNA, 459 bp, Shigella boydii; identical to SEQ ID NO: 261429

SEQ ID NO: 458553 - DNA, 2055 bp, Shigella boydii
atggaactgaaagcgacaacgcttggaaaacgtctggcacagcacccttacgatcgggcggtgatcctcaatgccgggattaaagtctccggcgatcgccacgaataccttattcctttcaatcaattactggcgattcactgtaagcgtggtctggtatggggcgagctggaatttgtactgccggacgaaaaagtggtgcgtctgcacggcaccgaatggggcgagacgcagcgtttttaccatcatcttgatgctcactggcggcggtggagtggcgagatgagcgaaattgcgtctggtgttttacgccagcaactggatttgattgccacgcgcactggagaaaataaatggctgacgcgtgagcaaacctctggcgttcagcaacaaatccgccaggctttgtcggcgttgccgttgccggttaaccgactggaagaattcgataactgccgtgaggcgtggcgtaaatgtcaggcctggttgaaagatattgaaagcgctcggttgcagcataaccaggcgtataccgaagccatgcttaccgagtatgcggattttttccgccaggtcgagtcttcaccgctgaatccggcgcaggcccgggcagtcgttaatggcgagcattctctgttagtgctggcaggtgcaggaagcggaaaaacgtcggtgctggtggcccgtgcaggctggttgctggcacgtggtgaagcgtcccctgagcaaattttattgctggcgtttggtcgcaaagccgctgaagagatggacgagcggattcgcgaacggctacataccgaagacattaccgcacgcacgtttcatgcgctggcgctgcatattattcagcagggcagcaaaaaagttccgatagtcagcaaactggaaaatgataccgctgcccgtcatgaactctttattgctgagtggcgcaagcaatgcagcgaaaagaaagcgcaggcgaagggctggcggcaatggctgacggaagaaatgcagtggtcagtgccagaaggtaacttctgggatgatgaaaaattacagcgtcgccttgcctctcgcctcgatcgctgggtaagtctgatgcggatgcacggtggtgcacaggcagaaatgattgccagtgcacccgaagagattcgcgatctgttcagtaaacgtatcaagttgatggccccgttattaaaagcctggaaaggtgcgctgaaggcagaaaacgctgtcgatttttcgggccttattcatcaggcgattgtgattctggagaaaggtcgctttatcagcccgtggaagcatattctggttgatgaatttcaggatatctcgccgcagcgggcagcgttgttagcggcattacgcaagcaaaacagtcagacgacgttgttcgctgttggtgatgactggcaggcgatttaccgattcagcggtgcgcaaatgtcgctcaccaccgctttccatgaaaactttggtgaaggcgaacgttgtgatttagacacgacttaccgttttaacagtcgtatcggtaaggtggcaaaccgttttattcagcagaacccaggccagctgaaaaagccgctaaacagcttaaccaatggagacaaaaaagccgtcacgttattggatgagagtcaacttgacgctttgctggataagctctctggttatgccaaaccggaagagcgcattctgatcctggcgcgttaccatcacatgaggcctgccagcctggaaaaagcggcaacacgctggccgaagttgcaaatcgactttatgaccattcatgccagcaaagggcaacaggctgattacgtcatcatcgttggcttgcaggagggaagtgatggttttccggctgcggcgcgggagtcgattatggaagaggcgctactgccaccggttgaggatttcccggacgctgaagaacggcggttaatgtacgtggcgctgacccgggcacgccatcgggtatgggcactgtttaacaaagagaatccctctccctttgttgaaatactgaaaaatctggatgtgccggtggcgagaaaaccgtaa

SEQ ID NO: 458554 - DNA, 447 bp, Shigella boydii
atgcgtaccgttttgaacattctgaactttgtgcttggcggatttgccaccactctgggctggctgttggcgactctggtcagtattgtgctgatttttaccttaccgctgacacgatcctgctgggagatcactaaactgtctctggtgccttatggcaatgaagctattcatgtcgatgaactgaacccggctggcaaaaatgtgctgctgaatactggcggtacggtattgaatattttctggctgattttctttggctggtggttatgcctgatgcacattgcaacgggcatcgcacaatgtatttcaatcattggcattcctgtcggcattgcgaactttaaaattgccgctattgcactatggccggttggtcgtcgcgtggtatcggtagaaacagcgcaagctgcgcgtgaagccaatgcacgtcgtcgttttgaataa

SEQ ID NO: 458555 - DNA, 2163 bp, Shigella boydii
atggcctttatgctaagtcctttgctcaaacgctatacctggaacagcgcctggctgtattacgcgcgtatttttattgcgctttgtggaaccacagcgtttccgtggtggctgggtgatgtaaaactgacgattccgctaacgctggggatggtggcagcggcgctgaccgatctcgatgaccgactggcgggacgtttgcgtaacctcatcattacgctgttctgcttttttatcgcctcggcctcagtagaattgctgtttccctggccctggctatttgcgattggcttaacgctctctaccagcggcttcattttgctcggcggtctgggtcaacgctatgcaacaattgccttcggtgcattgctgatcgccatttacactatgttgggaacatcactgtatgagcactggtatcagcagccgatgtatctgctggccggtgccgtctggtacaacgtcctgacacttattggtcatctgctgttcccggtccgcccgctgcaggacaacctggcgcgttgctatgaacaactggcgcgttatcttgagctcaagtcgcgcatgtttgatcctgatattgaagatgaaagccaggcaccgctgtacgatttggctctcgccaacggtctgctgatggcgacattgaatcagacgaaactctcgctgctgacccgcttacgtggcgatcgtggtcaacggggaacgcgtcgcacgctgcattattactttgtcgcacaggatattcacgagcgtgccagctcttctcatattcagtatcaaacattgcgtgaacattttcgccacagcgacgtgctgttccgttttcagcggctgatgtcgatgcagggccaggcgtgccagcaactgtcacgctgtattttgttgcgtcagccttatcaacatgatccgcattttgagcgcgcttttacgcatattgatgctgcgctggagcggatgcgcgataacggcgcacccgccgatttactcaaaacactgggatttttgctgaacaatttacgcgccattgatgcccaactggcaacaattgaatcagaacaggcccaggcactaccccataataatgacgaaaatgagctcgctgatgacagcccgcacgggttgagtgatatctggctgcgtcttagccgtcacttcacgccggaatccgccctcttccgtcatgcggtaagaatgtcgctggtgttgtgcttcggctacgccatcattcaaataaccggaatgcatcacgggttttggatcttgctgacaagtttgtttgtctgccagccaaactataacgccacgcgccaccgcctgaagttaaggattattggtacgctggtaggtatcgccattggcattcctgtgctgtggtttgtgccatcactggaagggcagctggtgctgctggttattaccggcgtgctcttttttgccttccgtaacgtgcaatacgctcatgcaacgatgttcatcacacttttggtgctactgtgttttaacttactgggtgaaggttttgaagtagcgttacctcgcgtaatcgatacgctgattggttgtgccattgcgtgggcggcagtgagctacatctggcctgactggcagtttcgcaatctgccgcgcatgctcgaacgcgccacagaggccaactgtcggtatctcgatgccatactggagcaataccatcaggggcgtgataaccgtctggcgtatcgtattgcccgccgcgatgcacacaaccgtgatgctgagctggcgtcggtggtatcaaatatgtccagcgagccgaacgttaccccgcaaattcgcgaagccgcgtttcggttgctgtgccttaaccatacgtttaccagctatatctcagccctcggtgctcaccgggagcagttaactaatcctgaaattctggcgtttcttgatgacgcagtttgctatgttgatgacgcgttacatcatcaacctgctgatgaagaacgcgtcaatgaggcattagctagcctgaaacagcggatgcagcaacttgaaccacgggcagacagcaaagaacctctggtcgtacaacaagttggattattgattgcattactgcctgagattggtcgtctgcaacgccagattactcaagttccgcaggaaactcctgtttcggcgtaa

SEQ ID NO: 458556 - DNA, 345 bp, Shigella boydii
gtgcgtctgtcgaaatattctctcgatgcagcgctgaaagagaaaagcacgcgcaatacccgggaaagactgaaagatttgcccaatatgtcttttcatctggaagcgattctcggggaggtggggattaaggatgtacgggcgttacgtatacttggggcaaaaatgtgttggttgcgactgcggcagcaaaacagtctggtgacagaaaagattctgtttatgcttgaaggtgccattatcggcattcatgaagctgcgctcccggtggcacgccgccaggagcttgcagaatgggctgactcacttacgccgaaacaggagtttcctgcggaacttgagtaa

SEQ ID NO: 458557 - DNA, 672 bp, Shigella boydii
atgcagtacccgattaacgagatgttccagaccctgcaaggtgagggttactttaccggcgtccccgccatttttattcgtttacagggatgcccggttggctgtgcctggtgcgacaccaaacacacctgggaaaagcttgaggatcgggaagtctcccttttcagcattctggcgaagaccaaagagagtgataagtggggggcggcgagcagtgaagatttgctggctgtcattggtcggcagggatataccgcgcggcatgtggtgattacgggtggtgagccttgcattcatgatttgctgccactgactgacctgctcgaaaagaacggttttagctgccagatcgaaaccagtggaactcatgaagtacgctgcacaccgaatacctgggttaccgtatcgccaaagctgaacatgcgcggcggctatgacgtgttgtcacaggcactggagcgagccaacgaaatcaagcatccagtggggcgcgtacgcgatattgaagcactggatgaactattggcaacgctgaccgatgataaaccgcgagtcattgcactgcagccgattagccaaaaggatgatgccacacgtttgtgcattgaaacctgcattgcgcgtaattggcgtttgtcgatgcaaacacataaatatctaaatattgcctga

SEQ ID NO: 458558 - DNA, 141 bp, Shigella boydii
atgtcagaagaaaataaagaaaatggatttaatcatgtcaaaacattcaccaaaattatatttattttttctgtattagtttttaatgataacgagtctaaaattaccgatgccgccgtcaatttatttatccagatttaa

SEQ ID NO: 458559 - DNA, 705 bp, Shigella boydii
gtgcaaattgctgtattaattgttcccacaaccaaagacgagacaattgaacaatatgctacaagagtttttgacaattggcgtttaggagatgccaaacgtaatgatgggatactgatcattgttgcctggtcagatcgtactgtccgcatccaggtaggttatgggctggaagaaaaggtaaccgatgctctggctggagatatcatccgtagcaacatgatacccgcatttaaacaacaaaaatttgctcagggattagagctagctataaacgctttgaataaccaactcacttcacaacaccaatatccgactaatccttcagaaagtgaatcagcgtcttccagtgatcattattactttgctattttttgggtatttgcagtgatgttcttccctttctggttttttcatcaaggcagtaatttttgtcgcgcatgtaaaagtggagtctgtatttcagcaatctatcttttagatttattcctgttctccgataaaattttttccattgctgtattttccttcttttttactttcaccatatttatggtctttacctgtttatgtgtacttcagaaaagagcatcaggtaaaagttatcattcagacaacagcggttccggtggaggctcaagtggcggcggatttagcggcggtggcggttcttctggaggtggcggcgcatccggccgctggtaa

SEQ ID NO: 458560 - DNA, 1299 bp, Shigella boydii
atgtccaaaatcgtaaaaatcatcggtcgtgaaatcatcgactcccgtggtaacccgactgttgaagccgaagtacatctggagggtggtttcgtcggtatggcagctgctccgtcaggtgcttctactggttcccgtgaagctctggaactgcgcgatggcgacaaatcccgtttcctgggtaaaggcgtaaccaaagctgttgctgcggtaaacggcccgatcgctcaggcgctgattggcaaagatgctaaagatcaggctggcattgacaagatcatgatcgacctggacggcaccgaaaacaaatccaaattcggcgcgaacgcaatcctggctgtatctctggctaacgccaaagctgctgcagctgctaaaggtatgccgctgtacgagcacatcgctgaactgaacggtactccgggcaaatactctatgccggttccgatgatgaacatcatcaacggtggtgagcacgctgacaacaacgttgatatccaggaattcatgattcagccggttggcgcgaaaactgtgaaagaagccatccgcatgggttctgaagttttccatcacctggcaaaagttctgaaagcgaaaggcatgaacactgctgttggtgacgaaggtggctatgcgccgaacctgggttccaacgctgaagctctggctgttatcgctgaagctgttaaagctgctggttatgaactgggcaaagacatcactctggcgatggactgcgcagcttctgaattctacaaagatggtaaatacgttctggctggcgaaggcaacaaagcgttcacctctgaagaattcactcacttcctggaagaactgaccaaacagtacccgatcgtttctatcgaagacggtctggacgaatctgactgggacggtttcgcataccagaccaaagttctgggcgacaaaatccagctggttggtgacgacctgttcgtaaccaacaccaagatcctgaaagaaggtatcgaaaaaggtatcgctaactccatcctgatcaaattcaaccagatcggttctctgaccgaaactctggctgcaatcaagatggcgaaagatgctggctacactgcagttatctctcaccgttctggcgaaactgaagacgctaccatcgctgacctggctgttggtactgctgcaggccagatcaaaactggttctatgagccgttctgaccgtgttgctaaatacaaccagctgattcgtatcgaagaagctctgggcgaaaaagcaccgtacaacggtcgtaaagagatcaaaggccaggcataa

SEQ ID NO: 458561 - DNA, 1638 bp, Shigella boydii
atgacaacgaactatatttttgtgaccggcggggtcgtatcctctctgggtaaaggcattgccgcagcctccctcgcagccattcttgaagcccgtggcctcaatgtgaccatcatgaaactggatccgtacatcaacgtcgatccaggtactatgagcccaatccaacacggggaagtgttcgttactgaagacggcgctgaaaccgacctggacctggggcactacgagcgtttcattcgtaccaaaatgagccgccgcaacaacttcaccacgggtcgtatctactctgacgttctgcgtaaagaacgccgcggtgactacctcggcgcaaccgtgcaggttattccgcacatcactaacgcaatcaaagagcgcgtgctggaaggtggcgaaggtcatgacgtagtactggtagaaatcggcggtacagtaggtgatatcgaatccttgccgttcctcgaagcgattcgccagatggctgttgaaattggccgtgagcacactctgtttatgcacctgacgctggtgccgtacatggcagcgtctggtgaagtcaaaaccaaaccgactcagcactctgtaaaagagctgctctccatcggtatccagcctgacatcctgatttgtcgttcagatcgcgctgttccggcgaacgaacgtgcgaagattgcattgttctgtaatgttccggaaaaagcggttatttctctgaaagacgtcgattccatctataaaattccgggcctgttgaaatctcaggggctggacgattatatttgtaaacgattcagcttaaactgcccggaagcgaatctgtccgaatgggaacaggttatcttcgaagaagcgaacccggtaagtgaagtcaccatcggtatggtcggcaagtacattgaactgccggatgcttataaatcagtgatcgaagcactgaaacacggtgggctgaagaatcgtgtcagcgtcaacatcaaactgatcgattcacaagatgttgaaacgcgcggcgttgaaatccttaaaggtctggacgcaatcctcgtacctggcggtttcggctatcgtggcgtagaaggcatgattacgaccgcgcgttttgcgcgtgagaacaatattccttatctgggcatttgcctgggtatgcaggtggcgttaattgattacgctcgccatgttgccaacatggagaacgccaactctacggaatttgtgccagactgtaagtacccggttgtggcgctgattaccgagtggcgcgatgaaaacggcaacgttgaagttcgtagcgagaagagcgatctcggcggtaccatgcgtctcggcgcacagcagtgccagttggttgacgatagcctggttcgccagctgtacaatgcgccgacaattgttgagcgtcatcgtcaccgttacgaagtcaacaacatgctgttgaaacagattgaagatgcaggtctgcgcgttgcgggccgttccggggatgatcagttggtcgagatcatcgaagttccgaatcacccgtggttcgtggcttgccagttccatccggagtttacttctactccacgtgatggtcacccgctgtttgcaggctttgtgaaagccgccagcgagttccagaaacgtcaggcgaagtaa

SEQ ID NO: 458562 - DNA, 792 bp, Shigella boydii
atgaatcaaatcgatcgtttgctcactattatgcagcgcctgcgcgatccggaaaacggctgcccgtgggataaagagcagacatttgccaccattgcgccttacacccttgaagaaacctacgaagtgctggacgccatcgcccgtgaagattttgacgatcttcgcggtgaactgggcgatctgctattccaggtggtgttttacgcgcaaatggctcaggaagaagggcgctttgactttaatgatatttgcgctgctattagcgataaattagagcgtcgccatccgcatgtttttgctgatagttctgccgaaaacagtagtgaagtgcttgcccgttgggagcaaatcaaaaccgaagagcgcgcgcagaaagcgcagcattcggcgctggacgatattcctcgtagtttaccggctttaatgcgggcgcaaaaaatccagaaacgttgcgccaacgttggcttcgactggacgacgcttggcccggtggttgataaagtctacgaagagatcgacgaggtgatgtacgaggcgcggcaggctgttgtcgaccaggctaaactggaggaggaaatgggggacctgctgtttgccacggttaatctggctcgccatttagggacgaaagcagaaatcgcattgcaaaaagcgaacgaaaaattcgagcgtcgttttcgcgaagtggagcgtattgttgccgcgcgtggactggaaatgacaggtgttgacctcgaaacaatggaagaagtctggcaacaggtaaaacggcaggaaattgatctctaa

SEQ ID NO: 458563 - DNA, 336 bp, Shigella boydii
atggtaagccgatacgtacccgatatgggcgatctgatttgggttgattttgacccgacaaaaggtagcgagcaagctggacatcgtccagctgttgtcctgagtcctttcatgtacaacaacaaaacaggtatgtgtctgtgtgttccttgtacaacgcaatcaaaaggatatccgttcgaagttgttttatccggtcaggaacgtgatggcgtagcgttagctgatcaggtaaaaagaatcgcctggcgggcaagaggagcaacgaagaaaggaacagttgccccagaggaattacaactcattaaagccaaaattaacgtactgattgggtag

SEQ ID NO: 458564 - DNA, 249 bp, Shigella boydii; identical to SEQ ID NO: 261413

SEQ ID NO: 458565 - DNA, 2235 bp, Shigella boydii
atggttgcggtaagaagtgcacatatcaataaggctggtggatttgatccggaaaaatggatcgcaagtctgggtattaccagccagaagtcgtgtgagtgcttagccgaaacctgggcgtattgtctgcagcagacgcaggggcatccggatgccagtctgttattgtggcgtggtgttgagatggtggagatcctctcgacattaagtatggacattgacacgctgcgggcggcgctgctgttccctctggccgatgccaacgtagtcagcgaagatgtgctgcgtgagagcgtcggtaagtctgtcgttaaccttattcacggcgtgcgtgatatggcggcgatccgccagctgaaagcgacgcacactgattctgtttcctccgaacaggtcgataacgttcgccggatgttattggcgatggtcgatgattttcgctgcgtggtcatcaaactggcggagcgtattgctcatctgcgcgaagtaaaagatgcgccggaagatgaacgcgtactggcggcaaaagagtgcaccaatatctacgcgccgttggcgaaccgtcttgggattgggcaactgaaatgggagctggaagattactgcttccgttatctgcacccgaccgaatacaaacgcatcgcaaaactgctgcatgaacgccgtctcgaccgcgaacactatatcgaagagtttgtcggtcatctgcgcgctgagatgaaagctgaaggcgttaaagctgaagtgtatggccgtccgaaacacatctacagcatctggcgcaaaatgcagaaaaagaacctcgccttcgatgagctgtttgatgtgcgtgcggtacgtattgtcgccgagcgtttacaggattgttatgccgcactggggatagtgcacactcactatcgccacctgccggatgagtttgacgattatgtcgctaacccgaaaccaaacggttatcagtctattcataccgtggttctggggccaggtggcaaaaccgttgagatccaaatccgcaccaaacagatgcatgaagatgcagagttgggtgttgctgcgcactggaaatataaagagggcgcggcagctggcggcgcacgttcgggacatgaagaccggattgcctggctgcgtaaactgattgcgtggcaggaagagatggctgattccggcgaaatgctcgacgaagtacgcagccaggtctttgacgaccgggtgtatgtctttacgccgaaaggtgatgtcgttgatttgcctgcgggatcaacgccgctggacttcgcttaccacatccacagtgatgtcggacaccgctgcatcggggcaaaaattggcgggcgcattgtgccgttcacctaccagctgcagatgggcgaccagattgaaattatcacccagaaacagccgaaccccagccgtgactggttaaacccaaacctcggttacgtcacaaccagccgtgggcgttcgaaaattcacgcctggttccgtaaacaggaccgtgacaaaaacattctggctgggcggcaaatccttgacgacgagctggaacatctggggatcagcctgaaagaagcagaaaaacatctgctgccgcgttacaactttaatgatgtcgacgagttgctggcggcgattggtggcggggatatccgtctcaatcagatggtgaacttcctgcaatcgcaatttaataagccgagtgccgaagagcaggacgccgccgcgctgaagcaacttcagcaaaaaagctacacgccgcaaaaccgcagtaaagataacggtcgcgtggtagtcgaaggtgttggcaacctgatgcaccacatcgcgcgctgctgccagccgattcctggagatgagattgtcggcttcattacccaggggcgcggtatttcagtacaccgcgccgattgcgaacaactggcggaactgcgctctcatgcgccagaacgcattgttgacgcggtatggggtgagagctactccgccggatattcgctggtggtccgcgtggtggctaatgatcgtagtgggttgttacgtgatatcacgaccattctcgccaacgagaaggtgaacgtacttggcgttgccagccgtagcgacaccaaacagcaactggcgaccatcgacatgaccattgagatttacaacctgcaggtgctgggccgcgtgctgggtaaactcaaccaggtgccggatgttatcgacgcgcgtcggttgcacgggagttag

SEQ ID NO: 458566 - DNA, 1302 bp, Shigella boydii
atggcgcaattctactctgcaaaacgacgcacgacgacgcgtcagatcataaccgtttcagtcaacgacctcgactcttttggtcagggcgtggcgcgacataacggcaaaacgctatttatccccggattattgccgcaggaaaacgcggaagttactgttactgaagataaaaaacagtatgcccgcgctaaagtcgtacgccggttaagcgatagcccggaacgcgaaacgccacgctgtcctcattttggagtatgcggcggctgtcagcaacaacacgccagcgtggatttacagcagcgaagcaaaagtgcggcactcgcccgattaatgaaacacgaagtctctgaagtgatcgccgatgttccctggggctatcgccgtcgcgcgcgtttaagtctgaactacttaccgaaaacacagcaacttcagatggggcttcgcaaagcgggctccagtgacattgtcgacgttaaacaatgtcccattttagtgccccaacttgaagcattgctgcccaaagtcagggcatgcctgggcagcttacaagcaatgcgccatcttggtcatgttgaactggtacaggcaaccagcagcacgctgatgattttgcgccataccgcaccgctaagttcggcagatcgcgaaaaactggaacgcttttcgcattctgaaggcctggatctgtatctcgcccccgatagtgagatactcgaaaccgtctctggtgagatgccctggtatgactctaacgggttgcgcttaacttttagcccgcgcgattttattcaggtcaatgcgggtgtgaaccaaaaaatggtagcgagtgcgttggaatggctggatgtgcaacctgaagatcgcgtactggatctgttctgcggtatgggcaactttacactgccattggcgacacaagctgccagtgtggtcggtgtagaaggtgttccggcgctggtggaaaaaggccagcagaatgcgcgtcttaatggcttacagaatgtgacgttttatcacgaaaatcttgaagaagatgtcacaaagcagccgtgggcgaaaaacggcttcgataaagtgttgctggacccggcgcgagcaggtgccgcaggtgttatgcagcaaattataaaactggaacctattcgtatagtttatgtatcctgtaaccctgcaacgctggctcgggatagcgaagcgttattaaaagcaggatataccattgcgcgactggcgatgctggatatgttcccacacacgggacatctggaatcgatggtacttttctcgcgcgttaaatag

SEQ ID NO: 458567 - DNA, 2757 bp, Shigella boydii
atgaccaactacagcctgcgcgcacgcatgatgattctgatcctggcaccgaccgtccttattggtttattgctgagtatctttttcgtcgtgcatcgctataacgacttgcagcgtcaactggaagatgccggtgccagcattattgagccgcttgcagtttctactgaatatggcatgagcctgcaaaatcgcgaatctatcggtcagttaataagcgtactgcatcgtcgccattccgatattgttcgcgcgatttcggtttatgatgaaaataaccgactctttgtcacctccaattttcatcttgatccctcatcaatgcagctcggcagcaacgtgccgtttcctcgccagctcactgtcactcgtgacggcgatattatgatcctccgcacgccgattatttctgagagttactcccccgacgaatcgcccagtagcgatgccaaaaatagtcaaaatatgttgggatatattgcgcttgagctggatcttaaatcggttcgcttgcagcaatataaagagatctttatttccagcgtgatgatgctgttttgtatcggtattgcgcttatttttggctggcgcttaatgcgcgatgtaaccggtccgattcgcaacatggtgaataccgtcgaccgcatccgtcgcgggcaactcgacagccgggtggaaggatttatgctcggcgagctggatatgctgaaaaacggtatcaactcgatggcaatgtcgctggctgcttatcacgaagagatgcagcacaatatcgaccaggcgacgtccgatctgcgtgaaacgctggagcagatggaaattcagaacgttgagttggatctggcgaaaaagcgcgcccaggaagcggcgcgtattaaatccgagtttctggcaaatatgtcacacgagctgcgtacaccactgaatggtgttattggctttacccgcctgacgctgaaaacagaattaacaccaacgcagcgcgatcacctgaatacgattgaacgttcggcaaataatttgctggcaattattaatgatgttctcgacttctcgaaactggaagcaggtaagctgattctggaaagtattccattcccactacgcagcacgctggatgaagtcgttactctgctggcacattcttctcacgataaagggttggaactgacgctcaatattaaaagcgacgtgcctgataacgtgatcggcgacccactgcgattacagcaaatcatcactaacctggtggggaatgcaattaaattcaccgagaatggcaacattgatattctggtagaaaaacgtgcgctgagtaataccaaagtgcagattgaagtgcagattcgggataccggcattggtattcctgaacgcgatcaatcgcgcttattccaggccttccgacaggctgatgccagtatttcccgccgtcatggtggcaccgggctggggctggtgattacacaaaaactggttaatgaaatgggcggcgatatttcgttccatagccagccgaatcgcggttcaactttctggttccacattaatctcgatctgaacccgaacattattatcgaagggccatccacccagtgcctcgcaggtaagcgcctggcctatgtcgaaccaaactccgcagcagcgcaatgcacgctggatattttaagtgaaacgccgctggaagtggtttatagcccaacgttctccgcgctgcctcccgcgcattacgacatgatgttgttaggcatcgcggtgaccttccgcgagccgctaacaatgcaacatgagcgattagcgaaagcggtatcgatgaccgatttcctgatgctggcacttccttgccatgcacaagtcaatgctgaaaaactcaagcaagatggtatcggcgcgtgtctgctgaaaccattaacacctacacgcctgttgcctgccctgacggaattttgtcatcacaaacaaaacacgcttttgcctgtaaccgatgaaagtaagctggcaatgacagtcatggcggttgatgacaaccccgctaacctgaaacttatcggcgcattgctggaagatatggtgcaacatgtggaactttgcgatagcgggcatcaggcggttgaacgggcgaaacagatgccgttcgatttgatcttaatggatattcaaatgccggacatggatggcattcgggcctgcgaactcatccaccagctcccccatcagcaacaaacgccggttatcgcggtaacggcgcatgcaatggccgggcaaaaagagaagctgcttggcgcagggatgagcgattatctggcgaaaccgattgaagaagagcgattgcataatttgttgttgcgctacaagcctggcagcggtatttcctctcgcgtcgtgacgcccgaagtcaacgaaattgtggtgaacccgaatgcgaccctcgactggcaactggcactacggcaggcagcaggaaaaaccgatttagcgcgcgatatgctgcaaatgttactcgatttcctgcctgaagttcgcaacaaagttgaggaacagctggttggagaaaacccggaaggcctggttgatttgattcataaactgcatggcagttgcggctatagcggtgtgccgcgtatgaagaatctctgccaactgatcgaacaacagctacgtagcggtactaaagaagaagatttggagccggagctgctggaactgttggacgagatggataatgtcgcgcgcgaagccagcaaaattctcgggtaa

SEQ ID NO: 458568 - DNA, 1341 bp, Shigella boydii
atgagttctcaatttacgacgcctgttgttactgaaatgcaggtcatcccggtggcgggtcatgacagtatgctgatgaatctgagtggtgcacacgcaccgttctttacgcgtaatattatgattatcaaagataattctggtcacactggcgtaggggaaattcccggcggcgagaaaatccgtaaaacgctggaagatgcgattccgctggtggtaggtaaaacgctgggtgaatacaaaaacgttctgacgctggtgcgtaatacttttgccgatcgtgatgctggtgggcgcggtttgcagacatttgatttgcgtaccactattcatgtagttaccgggatagaagcggcaatgctggatctgctggggcagcatctgggggtaaacgtggcatccctgctgggcgatggtcaacagcgtagcgaagtcgaaatgctcggttatctgttcttcgtcggtgatcgcaaagccacaccgctgccgtatcaaagccagccggatgactcatgcgactggtatcgcctgcgtcatgaagaagcgatgacgccggatgcggtggtgcgcctggcggaagcggcgtatgaaaaatatggcttcaacgatttcaaactgaaaggcggtgtactggccggggaagaagaggccgagtctattgtggcactggcgcaacgcttcccgcaggcgcgtattacgctcgatcctaacggtgcctggtcgctgaacgaagcgattaaaattggtaaatacctgaaagggtcgctggcttatgcagaagatccgtgtggtgcggagcaaggtttctccgggcgtgaagtgatggcagagttccgtcgcgcaactggcctgccgaccgcaaccaatatgatcgccaccgactggcggcagatgggccatacgctctccctgcaatccgttgatatcccgctggcggatccgcatttctggacgatgcaaggttcggtacgtgtggcgcaaatgtgccatgaatttggcctgacctggggttcacactcaaacaaccacttcgatatttccctggcgatgtttacccatgttgccgccgctgcaccgggtaaaatcaccgcgattgatacgcactggatttggcaggaaggcaatcagcgcttgaccaaagaaccgtttgagatcaaaggcggtctggttcaggtgccggaaaaaccggggctgggtgtagaaatcgatatggatcaagtgatgaaagcccatgagctgtatcagaaacacgggctttgcgcgcgtgacgatgcgatgggaatgcagtatctgattcctggctggacgttcgataacaagcgcccgtgcatggtgcgttaa

SEQ ID NO: 458569 - DNA, 1008 bp, Shigella boydii
gtggcggcgctggaagccgccttgcttgacctgctaggtaaggcgctgaatgttccggtctgcgaactgttggggccaggcaagcaacgcgagactattaccgtcctcggttatctgttttatatcggtgatcggaccaaaaccgatcttccttatctggaaaatacgccgggcaaccatgagtggtatcagttgcgccatcagaaagcgatgaacagcgaagccgttgtgcgtctggcggaagcctcacaggatcgctatggctttaaagatttcaaacttaagggcggggtgttacctggcgagcaagaaatcaacactgttcgtgcattgaagaaacgcttccctgatgcgcggattaccgttgatcccaacggtgcctggctacttgatgaagccatttctctatgcaaagggctgaatgatgttcttacctatgccgaagatccatgcggcgcagaacagggtttctccggtcgtgaagttatggcggagtttcggcgggcgaccggcttgcccgtcgcgactaacatgatcgccaccaactggcgcgaaatgggtcatgcggtgatgctcaatgcggtagatattccacttgccgatccgcacttctggacgctttccggtgcagtccgtgtggcgcagctttgcgacgactgggggctgacctggggctgccattctaataaccatttcgatatctctctggcgatgtttacccatgtgggcgcggcggcaccgggtaatcctaccgctatcgatacccactggatttggcaggagggcgattgtcgcctgaccaaaaatccgctggagattaaaaacggaaaaattgccgttcctgatgcgcccggtctgggcgtggaactggactggaaacaggtacaaaaggcacatgaggcctataaacgtctgcctggcggtgcgcgtaacgacgcaggtccgatgcagtacctgatccccggctggacctttgaccgtaaacgtcccgttttcggccgtcattga

SEQ ID NO: 458570 - DNA, 276 bp, Shigella boydii
atgaaagtcattccggtcgccgggcacgatagcatgttgcttaatattggtggggcacataacgcatatttcacccgcaatattgtggtactcaccgataacgccgggcataccggcattggtgaagcgccgggcggagaggtgatttatcaaacactggtcgatgctattccgatggttctgggccaggaagttgcgcgcctgaataaagtggttcagcaggtgcataaaggtaatcaggcagccgattttgataccttcggcaaaggtgcctag

SEQ ID NO: 458571 - DNA, 1284 bp, Shigella boydii
atgttgtttatcgtcacatccttcaactacggcgaccgcgctacgctttctattgccggttcggaaatggccaaagatatcggccttgatcccgtgggaatgggctatgtgttctctgccttctcatgggcttatgttatcgggcagatccctggtggttggttgctggatcgttttggttcaaaacgcgtctacttctggtcgatctttatctggtcgatgtttaccttgctgcaaggcttcgtcgatatctttagtggattcggcattatcgttgccctgtttactctgcgcttcctggtcgggcttgctgaagcgccatctttccccggcaacagtcgcattgttgcggcctggtttccggcgcaggaaaggggaacggcggtgtcgatttttaactccgctcaatacttcgcaacggtgatcttcgcgccgattatgggctggctgacgcatgaagtgggctggtcacacgtcttcttctttatgggcggtctggggattgtcatcagctttatctggttgaaagtcatccacgagccaaatcaacatccgggggtaaatcagaaagagctggagtacatcgccgcgggtggcgcgctgatcaatatggatcagcaaaacaccaaagttaaagtgccgttcagcgtgaagtgggggcagatcaaacaactgctcgggtcacggatgatgatcggcgtttatatcggtcagtactgtatcaacgccctgacttactttttcattacctggtttccggtttatctggtgcaggcgcgtgggatgtcgattctgaaagcgggctttgtggcttccgttccggcggtttgcggttttatcggcggtgtgctgggtgggattatttccgactggctgatgcgccgcacgggatcgctgaacattgcgcgtaaaacaccgatcgtaatgggcatgttgctgtcgatggtgatggtgttctgcaactacgtcaacgttgagtggatgatcatcggctttatggcgctggccttcttcggtaagggcatcggggcgctgggttgggcagtaatggcagataccgcgccaaaagagatcagcggtctttccggtggcctgttcaacatgttcggtaacatttctggcatcgtcacgccaatcgcaattggttatatcgttggcacgactggctcctttaatggggcgctgatttatgttggtgttcatgccttaatcgcggtactgagctacctggtgctggtgggcgatatcaagcgtatcgagctgaaacctgtcgcggggcaataa

SEQ ID NO: 458572 - DNA, 450 bp, Shigella boydii
atggcggaaattggtatttttgtcggcaccatgtacggaaattcgctgttagtggcggaagaagcagaagcaattctgaccgcacagggccacaaagcaacggtatttgaagatcctgaattaagcgactggctgccttatcaggataagtatgttctggtggttacgtccacgaccgggcagggcgaccttcctgatagcattgtgccgctctttcagggaatcaaagatagtctgggcttccagccgaatctgcgttatggcgtgattgcgctcggcgacagcagttatgtaaatttctgcaatggcggcaaacagttcgatgccttgttgcaggaacagagcgctcagcgggttggcgaaatgctgttgattgacgccagtgagaacccggaaccggaaacggaatcaaatccgtgggtcgaacagtggggcacgctgttgtcctga

SEQ ID NO: 458573 - DNA, 783 bp, Shigella boydii
atgctggaaatactctatcaggatgaatggctggttgcggtaaataaaccctccggctggctggttcaccgtagctggctggatcgcgacgagaaagtagtggtcatgcaaaccgtgcgtgaccagataggacagcatgtttttactgctcatcgtctggaccgacccacttctggtgtgttgttgatgggattatccagcgaggccggacggctgctggcacaacagtttgaacagcaccaaatccagaaacgttaccatgcgattgtgcgcggatggttgatggaagaagcggtgctggattatccactggtggaagaactggacaaaatcgctgataaatttgcccgcgaagataaaggcccgcagccagcagtgacgcattatcgcggtctggcgaccgtagaaatgccggtagcgaccggacgttacccgaccacgcgctacggcctggtggaactggagccgaaaaccggacgcaaacatcagcttcgccgacatcttgcccatttgcgtcatccgattattggcgatagcaaacatggcgatttacgccagaatcgcagcggtgctgagcattttggcctccagcggttaatgctacatgccagtcagttgtcattgacgcatccttttactggcgagccgctgactattcacgcgggcctggacgacacctggatgcaggcgttatcacaatttggctggcgcggtctgcttcctgaaaatgaaagggttgagttcagtgcgccatcgggtcaggatggagagataagttcctaa

SEQ ID NO: 458574 - DNA, 330 bp, Shigella boydii
atgaccactcatgaccgcgttcgtctccagttgcaggcgcttgaagcgttactgcgtgaacatcagcactggcgaaacgatgaaccccagccgcatcaatttaatagtacccaaccgttctttatggacaccatggaaccactggagtggttgcagtgggtgctgatcccgcgaatgcacgatttgttaaataacaaccagccgttaccgggcgcttttgctgttgcaccctattatgaaatggcgctggcgacggaccatccgcaacacgcgcttattctggctgagttggaaaaactggatgctctttttgcggatgatgcgagctaa

SEQ ID NO: 458575 - DNA, 546 bp, Shigella boydii
gtggacgatttgaccgcacaagccctgaaagattttactgcacgctactgcgatgcgtggcatgaagagcataaaagctggccgttaagtgaggaactgtacggtgttccttcaccgtgcattatttcaactaccgaagatgccgtatactggcaaccccagccgtttaccggggaacaaaatgtaaacgcggttgaacgcgcttttgatattgtgatacaacccacaattcataccttttatacgactcagtttgccggggatatgcacgcgcagtttggcgatatcaaactgacattgctgcaaacctggagtgaagacgacttccgtcgggtgcaggaaaatctgattggtcatctggtgactcagaaaaggctaaaactgccgcccacgctatttatcgcgacgctggaagaagagttagaggtcatctcggtgtgtaatctctccggtgaagtgtgcaaagagacgctgggaacacgtaaacggacgcatttagcctcaaatcttgcggaattccttaatcaacttaagcctcttctgtaa

SEQ ID NO: 458576 - DNA, 849 bp, Shigella boydii
atgtcttcttatgcaaaccatcaggcacttgcgggcctgactcttggaaaatcaaccgattaccgggatacctatgacgccagcctcctgcaaggcgttccacgcagcctgaatcgcgacccgctgggtctgaaagcggataacctgccttttcacggtacggatatctggacgctgtatgaactttcctggctgaatgcgaaaggtttgccgcaggtcgctgtcggtcatgttgaacttgattacaccagcgtaaatctgattgagtcgaagagttttaagctctatctcaacagttttaaccagacgcgttttaataactgggatgaggtgcgccagacgctggagcgcgacttaagcacttgcgctcagggtaagattagcgtggcgttatatcgtcttgatgaactggaaggccagccgataggtcattttaatggcacttgcattgatgaccaggatatcactatcgataactatgaattcactactgactatctggagaatgccacctgtggtgaaaaagtagtggaagagacgcttgtcagccacctgctgaaatcaaactgcctgatcacccatcaaccagattggggttcgatccaaattcagtatcgtggacgccaaattgacagagaaaaactgctgcgttacctggtctcattccgtcatcacaacgagttccacgaacagtgcgtggaacgcatctttaatgacctgttacgcttctgccagccagaaaaattgagcgtttacgcacgttatacccgtcgtggcggtctggacattaacccgtggcgcagtaatagcgattttgttccatcgaccacaagactggttcggcaataa

SEQ ID NO: 458577 - DNA, 1365 bp, Shigella boydii
ttgattacacatattagcccgcttggctccatggatatgttgtcgcagctggaagtggatatgcttaaacgcaccgccagcagcgacctctatcaactgtttcgcaactgttcacttgccgtactgaactccggtagtttgaccgataacagcaaagaattgctgtctcgttttgaaaatttcgatattaacgtcttgcgccgtgaacgcggcgtaaagctggaactgattaatcccccggaagaggcttttgtcgatgggcgaattattcgcgctttgcaggccaacttgttcgcggtcctgcgtgacattctcttcgtttacgggcaaatccataacaccgttcgttttcccaacctgaatctcgacaactccgtccacatcactaacctggtcttttccatcttgcgtaacgctcgcgcgctgcatgtgggtgaagcgccaaatatggtggtctgctggggcggtcactcaattaacgaaaacgagtatttgtatgcccgtcgcgtcggaaaccagctgggcctgcgtgagctgaatatctgcaccggctgtggtccgggagcgatggaagcgccgatgaaaggtgctgcggtcggacacgcgcagcagcgttacaaagacagtcgttttattggtatgacagagccgtcgattatcgccgctgaaccgcctaacccgctggtcaacgaattgatcatcatgccagatatcgaaaaacgtctggaagcgtttgtccgtatcgctcacggtatcattatcttccctggcggtgtgggtacggcagaagagttgctgtatttgctgggaattttaatgaacccggccaacaaagatcaggttttaccattgatcctcaccggcccgaaagagagcgccgactacttccgcgtactggacgagtttgtcgtgcatacgctgggtgaaaacgcgcgccgccattaccgcatcatcattgatgacgccgctgaagtcgctcgtcagatgaaaaaatcgatgccgctggtgaaagaaaatcgccgcgacacaggcgatgcctacagctttaactggtcaatgcgcattgcgccagatttgcaaatgccgtttgagccgtctcacgagaatatggctaatctgaagctttacccggatcaacccgttgaagtgctagctgccgacctgcgccgtgtgttctccggtattgtggcgggtaacgtaaaagaagtcggtattcgcgccattgaagagtttggtccttacaaaatcaacggcgataaagagattatgcgtcgtatggacgacctgctacagggttttgttgcccagcatcgtatgaagttgccaggctcagcctacatcccttgctacgaaatctgcacgtaa

SEQ ID NO: 458578 - DNA, 1290 bp, Shigella boydii
atggaaacgactcaaaccagcacgattgcgtcgaaagactctcgtagtgcctggcgcaagacagacaccatgtggatgctgggcctttacggcacggcaatcggcgcgggcgtgctgttcctgccaatcaacgccggtgttggcggtatgatcccgctgatcatcatggctatccttgcgttcccgatgacgttttttgctcaccgcggcctgactcgcttcgtactgtctggtaaaaacccgggcgaagacatcaccgaggttgtagaagaacactttggtattggcgcaggtaaactgattaccctgctctacttcttcgctatctacccgatcctgctggtttatagcgtggcaatcaccaatacagttgaaagcttcatgtctcaccagctgggtatgacgccaccgccgcgtgcgattctgtcgctgatcctgatcgtgggtatgatgaccatcgttcgcttcggtgagcagatgatcgttaaagcgatgagtattctggtgttcccgtttgttggcgtattgatgctgctggctctgtacctgatcccgcagtggaacggcgcagcactggaaacgctgtctctggacactgcatctgcaaccggaaacggtctgtggatgaccctgtggctggcaattccggtaatggtgttctcgttcaaccactctccgatcatctcttctttcgccgttgcgaagcgtgaagagtacggcgatatggcagaacagaaatgctcgaagatcctggcattcgcacacatcatgatggtgctgaccgtaatgttcttcgtcttcagctgtgtactgagcctgactccggcagacctggctgcggctaaagagcagaacatctcgattctgtcttacctggctaaccactttaacgtaccggttatcgcgtggatggctccgattatcgcgattatcgctatcaccaaatccttcctcggccactacctgggcgcacgtgaaggcttcaacggtatggtgattaaatctctgcgtggtaaaggtaagtctatcgaaatcaacaagctgaaccgtatcactgcgctgttcatgctggtaacgacctggattgttgccaccctgaacccgagcatcctgggtatgattgaaaccctgggcggtccaatcatcgcgatgatcctgttcctgatgccgatgtacgcaattcagaaagtaccggcaatgcgtaagtacagcggtcacatcagcaacgtattcgttgtcgtgatgggtctgattgcaatctccgcaatcttctactctctgttcagctaa

SEQ ID NO: 458579 - DNA, 1368 bp, Shigella boydii
atgattagcgtattcgatattttcaaaatcggcattggcccttccagttctcataccgttggaccaatgaaagcgggtaaacaatttaccgacgatctgattgcccgtaacctgcttaaagacgtgacccgcgtggtggttgacgtgtacggctcgctctctctgaccggtaaaggccaccacactgatatcgccattattatgggcctggcgggtaacctgccggataccgtggatatcgattccatccctggttttattcaggatgtgaatactcatggtcgcctgatgctggcaaacggtcagcatgaagtggagttcccggttgatcagtgcatgaacttccacgccgacaacctttctctgcatgaaaacggtatgcgcattaccgcgctggcgggcgataaagtcgtttacagccagacttactactctattggcggtggctttatcgttgatgaagagcattttggccagcaggatagcgcaccggttgaagttccttatccgtacagttcagcagccgatctgcaaaaacattgtcaggaaaccgggctgtcactctctggcctgatgatgaaaaacgagctagcgctgcacagcaaagaagagctggaacagcacctggcgaacgtatgggaagtcatgcgtggcggtattgagcgcggtatttccaccgaaggcgtgttgcctggcaaactgcgcgttccacgccgtgctgcggcactacgccggatgctggtcagccaggataaaaccaccactgacccgatggcggttgttgactggatcaacatgtttgcactggcagtgaacgaagagaacgctgctggcggacgcgtggtgactgcgccgactaacggtgcgtgcgggattatcccggcagtgctggcgtactacgacaagtttatccgcgaagtgaacgctaactcactggctcgttacctgctggtagccagtgccattggttctctttataagatgaacgcgtcaatttctggtgctgaagtcggctgccagggtgaagttggtgtggcgtgctcaatggcggcggctggtctggcagaactgttaggtgcaagcccggcgcaggtgtgcatcgcggcggaaatcgccatggagcacaacctcggtctgacgtgtgacccggtcgccggacaggtccaggtgccatgcatcgagcgtaacgccattgcggcagtaaaagcggtgaacgccgcacgtatggcgctacgccgtaccagcgagccgcgcgtctgcctcgataaagttatcgaaaccatgtacgaaacaggtaaagatatgaacgccaagtaccgcgaaacctctcgcggcggcctggcaatgaagatcgttgcctgcgattaa

SEQ ID NO: 458580 - DNA, 846 bp, Shigella boydii
ttgcgaggcctcttcccgatttctcatccagccgtagcctgttccggcatcgaatgttacccttatcgcctgatctttaagggggttatcgtggctgttcatttgcttattgtcgatgcactgaatcttattcgtcgcattcatgccgttcagggatcgccctgtgtcgaaacctgccagcatgcgctcgatcagctcattatgcacagccagccaacccacgcggtcgccgtttttgatgatgaaaaccgcagtagcggctggcgtcatcagcgtttaccagattacaaagcgggtcgaccgccaatgccggaagagttgcacgacgagatgcctgcattacgcgccgcctttgagcaacgcggcgtcccgtgctggtcaaccagcggcaacgaagccgatgacttagccgccacgctggcggtcaaagtgacacaggccgggcatcaggcaacgattgtttcgacagataaaggctactgtcagttactttcaccgacattacgtattcgtgattacttccagaaacgttggctggatgcgccatttatcgataaagaatttggcgttcaaccgcagcagttgcccgattactggggacttgcggggatcagcagttcaaaggtaccgggtgttgcgggaatcggaccaaaaagcgccacgcagctgctggtcgagtttcagagtctggaagggatatatgagaatctggatgcggttgccgaaaagtggcgcaaaaaattagaaacccataaagagatggcgtttctgtgccgcgatattgcccgcttacaaaccgatttgcatatcgacggcaatttacagcaattgcggttggtacggtaa

SEQ ID NO: 458581 - DNA, 948 bp, Shigella boydii
atggctaacagaatgattctgaacgaaacggcatggtttggtcggggtgctgttggggctttaaccgatgaggtgaaacgccgtggttatcagaaggcgctgatcgtcaccgataaaacgctggtgcaatgcggcgtggtggcgaaagtgaccgataagatggatgctgcagggctggcatgggcgatttacgacggcgtagtgcccaacccaacaattactgtcgtcaaagaagggctcggtgtattccagaatagcggcgcggattacctgatcgctattggtggtggttctccacaggatacttgtaaagcgattggcattatcagcaacaacccggagtttgccgatgtgcgtagcctggaagggctttccccgaccaataaacccagtgtaccgattctggcaattcctaccacagcaggtactgcggcagaagtgaccattaactacgtgatcactgacgaagagaaacggcgcaagtttgtttgcgttgatccgcatgatatcccgcaggtggcgtttattgacgctgacatgatggatggtatgcctccagcgctgaaagctgcgacgggtgtcgatgcgctcactcatgctattgaggggtatattacccgtggcgcgtgggcgctaaccgatgcactgcacattaaagcgattgaaatcattgctggggcgctgcgaggatcggttgctggtgataaggatgccggagaagaaatggcgctcgggcagtatgttgcgggtatgggcttctcgaatgttgggttagggttggtgcatggtatggcgcatccactgggcgcgttttacaacactccacacggtgttgcgaacgccatcctgttaccgcatgtcatgagctataacgctgactttaccggtgagaagtaccgcgatatcgcgcgcgttatgggcgtgaaagtggctggaagaggcgcgtaa

SEQ ID NO: 458582 - DNA, 417 bp, Shigella boydii
atggcggcctatcaaagcagaccggatgccaacgcggttgttcacaatcatgccgttcattgcacagcagtttccattcttaaccgaccgatccccgctattcactacatgattgcggcggcaggtggtaattctattccttgcgcgccttatgcgacctttggaacacgcgaactttctgaacatgttgcgctggctctcaaaaatcgtaaggcaactttgttacaacatcatgggcttatcgcttgtgaggtgaatctggaaaaagcgttatggctggcgcatgaagttgaagtgctggcgcaactttacctgacgaccctggcgattacggacccggtgccagtgctgagcgatgaagagattgccgtagtgctggagaaattcaaaacctatgggttacggattgaagagtaa

SEQ ID NO: 458583 - DNA, 1659 bp, Shigella boydii
atgattcttgagcgcgttgaaattgtgggttttcgcggtatcaaccgtttgtcgttgatgctggaacaaaacaacgtcctgattggggagaacgcgtggggtaaatccagcttgctggacgccttaaccctgctgctatcgccagaatcagatctctaccattttgagcgcgacgatttctggttcccgccgggagatatcaacgggcgagaacatcatctgcatattattttgaccttccgcgaatcgctgccaggccgacatcgggttcgccgttatcggccgctggaagcgtgctggacgccatgcaccgatggctatcaccgtattttttatcgtctggaaggggagagtgcggaagacggcagcgtgatgacactgcgcagttttctcgataaagacggacatccgattgatgtcgaggatattaacgatcaggcacgccatctggtgcgtttaatgccggtgctgcgcttgcgtgatgcccgttttatgcgccgtattcgtaacggcacggtgccaaatgtccctaatgtggaagtcaccgcgcgccagctcgatttcctcgcccgtgagttatcctcacatccgcaaaatctctctgatgggcagattcgtcagggactttccgcaatggtacagctgcttgagcattatttctctgagcagggggccggacaggcgcgatatcgtttaatgcggcggcgggccagcaatgagcaacgaagctggcgctatctggacatcatcaaccggatgattgaccgacctggagggcgctcgtatcgggttattttgctcggcctgtttgctactttattgcaggcaaaaggcacattgagactggataaagacgcgcgtccattgttgctgatcgaagatccagaaacccgtttacaccccattatgctttcagttgcctggcatctgttgaatcttctgccattgcagcgcattgccaccaccaactcgggtgagttgctttcgttaacgccggtagagcatgtttgccgactggtacgtgagtcctcgcgcgttgccgcctggcgtctggggccgagtggcttgagtaccgaagatagccgacgcatatcctttcacattcgttttaaccgtccgtcatcgctgtttgcacgctgctggttgctggtggaaggggaaacggaaacctgggttatcaatgaactggcgcgtcagtgcggacatcattttgatgccgaagggatcaaggtcattgagtttgcccagtccgggctaaagccactggttaaatttgcccgccgaatggggattgaatggcatgtactggtcgatggcgatgaagcagggaagaaatatgccgctacggtacgcagcctgttgaataacgatcgggaagccgaacgagaacatttaacggcgttaccggcgctggatatggaacattttatgtatcgccagggattttccgatgtgttccaccgcgtggcgcaaatcccggaaaatgtaccgatgaatctacgcaaaattatctcgaaagcgatccatcgctcttccaaacccgatcttgccattgaagtggcaatagaggcaggacgtcgtggtgtggactccgtaccgacgctgctgaaaaaaatgttctcacgcgtgctgtggctggcgcgcggtcgcgcggattaa

SEQ ID NO: 458584 - DNA, 993 bp, Shigella boydii
atggtgaaatcgacgtcatgtataaccattgatttcatgaatatgtcgcagctaactgaacggacctttacgccatctgaatctctcagcagcctgtcactttttcttagtctggcacgtggacagtgtcggccgggtaaattctggcatcgccgtagttttcgccagaaatttttgctgcgctcgttgattatgccgcgtttaagcgttgagtggatgaacgaactttcccactggcctaatctcaatgtgttgttaacgcgccagccgcgactgcctgtgcgtctgcatcgcccttaccttgcggcgaatcttagccgtaagcaattgctggaggcgttacgttaccattatgcgttactccgcggatgtatgtcggcggaagaattcagcttatatttgaatacccccgggctgcaactggcgaagctggaaggcaaaaacggcgagcagttcacgcttgagctgaccatgatgatctcaatggataaagaaggtgacagcacaatcctgtttcgcaacagcgaaggtattcctctggcagagatcacgtttaccctgtgtgaatatcaggggaaaagaacgatgtttattggcggactgcaaggcgcaaaatgggaaattccacatcaggaaatccagaatgcgacgaaagcctgccacgggctatttcccaaacgcctcgtgatggaagcggcctgtctgtttgcccaacgtttgcaggtagagcagattattgccgtcagcaatgaaacgcatatttaccgcagcctgcgttatcgcgataaagaaggcaagatccacgctgattacaacgctttctgggaatcggttggcggcgtatgtgatgctgaacgccattaccgccttccagcacagatagcacgaaaagagattgccgaaatcgccagtaaaaaacgggctgaataccgtcggcgctatgagatgctcgacgctattcagccacaaatggccacgatgtttcgcggttaa

SEQ ID NO: 458585 - DNA, 1116 bp, Shigella boydii
atgaaaaagcggaaaaccgtgaagaagcgttacgttattgcgctggtgatagtcatcgccggactgattacgttatggagaattcttaacgcacccgtgccgacttatcagacactgattgtgcgccccggtgatttacagcaaagcgtgctggcgaccggaaagctggacgcgctgcgtaaggttgatgtgggcgcgcaggtcagcggtcagttgaaaactctgtcggtggcgattggcgataaagtaaaaaaagaccagcttttaggggttattgatcctgaacaggctgaaaaccagattaaggaggtcgaagcaacgctgatggagctacgtgcgcagcggcagcaggcggaagcggagctgaaactggcgcgggtgacgtattcccgtcagcaacgtctggcacaaacgcaggcggtttcacagcaggatctcgacaccgccgcgacggagatggctgtgaaacaggcgcaaattggcaccattgacgcgcaaatcaagcgcaatcaggcttctctcgatacggctaaaaccaatctcgattacactcgcatcgttgccccgatggccggggaagtcacgcaaatcaccactctgcaaggccagacggtgattgccgcacaacaagcaccgaacattctgacgctggcagatatgagcaccatgctggtaaaagcgcaggtttctgaagcggatgtaatccacctgaagccggggcaaaaagcttggtttacggtgcttggcgatccactgacgcgctacgaggggcaaatcaaggatgtactaccgacgccggaaaaggttaacgacgctattttctattacgcccgttttgaagtccccaaccccaatggtttgctgcggctggatatgactgcgcaagtgcatattcagctcaccgatgtgaaaaatgtgctgacgatccctctgtcggcgttaggcgatccggttggcgataatcgttataaagtcaaattgttgcgtaatggtgaaacacgcgagcgtgaagtgacgattggcgcacgtaacgataccgatgttgagattgtcaaagggctggaagcgggcgatgaagtggtgattggtgaggccaaaccaggagctgcacaatga

SEQ ID NO: 458586 - DNA, 1947 bp, Shigella boydii
atgacgcctttgctcgaattaaaggatattcgtcgcagctatcctgccggtgatgagcaggttgaggtgctgaagggcatcaccctcgatatttatgccggtgagatggtagcgattgttggcgcttcaggttccggtaaatcgaccctgatgaatattctcggctgtctggataaggccaccagcggcacctatcgcgtcgccggtcaggatgttgccacactggacgccgatgcgctggcgcaactgcgccgcgagtatttcggctttattttccagcgttaccatttactttcgcatttaaccgccgagcagaacgttgaagtacccgccgtctatgccggtcttgagcggaaacagaggctgcttcgcgcccaggagttactgcaacgactggggctggaagaccgtacagagtattatccggcacagctttcgggtggtcagcaacagcgcgtcagcatcgcgcgggcattgatgaacggcggtcaggtaattcttgccgatgaaccaaccggcgcactggacagccattctggcgaagaggtgatggcgatcctgcatcagctgcgcgatcgcgggcatacggtgattatcgtcacccacgatccgcaggtcgctgctcaggccgagcgggtgatcgaaattcgcgacggcgaaattgtgcgcaatcctcccgccattgaaaaagtgaatgttgctggcgggacggagcctgttgtcaacacggtgtctggctggcggcagtttgtcagcggttttaacgaggcgctgacgatggcatggcgggcgctggcagcgaataaaatgcgtactttactgaccatgctggggattattatcggtattgcgtcggtggtttccattgtcgtggtgggtgacgccgccaaacaaatggtgctggcggatattcgttctattggtacgaatactattgatgtctatcccgggaaagattttggcgatgacgatccgcaatatcagcaggcgctgaagtacgacgacttaatcgccatccaaaaacaaccgtgggtcgcctcagccacacctgccgtctcgcaaaacctgcgcctgcgttataacaatgttgatgttgctgccagtgccaatggcgtgagcggcgattattttaatgtctatggcatgaccttcagtgaaggaaacacctttaatcaggagcagctgaacggtcgtgcgcaggtcgtggttctcgacagtaatactcgccgccagcttttcccccataaagcagatgtggttggcgaggtgattctggtcggcaatatgcccgccagagtcattggtgtggcggaagaaaaacagtcgatgtttggtagcagtaaagtgctgcgtgtctggctaccttacagcacgatgtccgggcgagttatgggccagtcgtggctgaactccattactgtcagggtaaaagaaggatttgacagcgccgaggcggaacagcaactcacgcgtttactttcactgcgccacggaaagaaggatttctttacctggaacatggacggcgtcttgaaaactgttgaaaagaccacacgtactttacaactgtttctgacgctggtggcggtgatttcgctggtggtgggcggtattggtgtaatgaatattatgctggtgtcagtgaccgagcggacgcgggaaattggcattcgcatggctgtaggtgcgcgagcaagcgatgttttgcaacagttcctgatcgaagccgtactggtttgcctggtcggtggcgcgttgggaataacgctgtcactgttaattgctttcaccttgcagcttttcttacccggctgggagattggtttttcaccgttggcactgctgctggcgtttctctgctcgacggccaccgggattttatttggatggttacccgcacgaaatgcggcacgactggatccagtagatgctctggcacgagagtaa

SEQ ID NO: 458587 - DNA, 225 bp, Shigella boydii; identical to SEQ ID NO: 839

SEQ ID NO: 458588 - DNA, 321 bp, Shigella boydii
atgggtaaaacgaacgactggctggactttgatcaactggcggaagaaaaagttcgcgacgcgctaaaaccgccatctatgtataaagtgatattagtcaatgatgattacactccgatggagtttgttattgacgtgttacaaaaattcttttcttatgatgtagaacgtgcaacgcaattgatgctcgctgttcactaccaggggaaggccatttgcggagtctttaccgccgaggttgcagaaaccaaagtggcgatggtgaacaagtacgcgagggagaatgagcatccattgctgtgtacgctagaaaaagcctga

SEQ ID NO: 458589 - DNA, 2277 bp, Shigella boydii
atgctcaatcaagaactggaactcagtttaaatatggctttcgccagagcgcgcgagcaccgtcatgagtttatgaccgtcgagcacttgttactggcgctgctcagtaacccatctgcccgggaggcgctggaagcgtgttctgtggatttggttgcgctctgtcaggaactggaagcctttattgaacaaaccacacccgttctgcctgccagtgaagaggagcgcgacacacagccgacgctgagttttcagcgtgtactgcaacgtgcggtcttccatgtccagtcctccggtcgcaatgaggtaaccggtgcaaacgttctggtcgctatctttagcgaacaggagtcgcaggcggcatatctgttgcgtaaacatgaagtcagccgtctcgatgtggtgaactttatctctcatggcacgcgtaaagacgagccgacacagtcttctgatcctggcagccagccaaacagcgaagaacaagctggtggggaggaacgtatggagaatttcacgacgaacctgaatcagcttgcgcgcgtgggcggaatcgacccactgattggtcgtgagaaggagctggagcgtgctattcaggttctctgccgtcgccgtaaaaacaacccgctgctggtgggggaatctggtgtcggtaaaaccgcgattgcggaaggtcttgcctggcgaattgttcagggcgatgtgccggaagtgatggctgactgtacgatttactctctcgatatcggttctctgttagcgggcactaaatatcgcggcgactttgaaaaacgttttaaagcgttgctcaagcagctggagcaggacactaacagcatcctgtttattgatgagatccacaccattatcggtgcgggtgcagcgtctggtggccaggtcgatgcggctaacctgatcaaaccgttgctctccagcggtaaaattcgcgtaattggttcgacaacctatcaggagttcagcaacattttcgagaaagaccgtgctctggcgcgtcgcttccagaaaattgatattactgaaccgtcgatcgaagaaactgttcaaatcatcaatggcctgaaaccgaagtatgaagcgcaccacgacgtgcgttatactgcaaaagcggtgcgtgcagcggtagagctggcggtgaaatacattaacgatcgtcatctgccggataaagccattgacgttatcgacgaagcgggcgctcgcgcacgcctgatgccggtaagcaaacgcaagaaaaccgttaatgtggcggatattgagtccgtggtggcccgtattgcgcgcattccagagaagagtgtttctcagagtgaccgcgataccctgaaaaacctcggcgatcgcctgaaaatgctggtcttcggtcaggataaagccattgaggcgctgactgaagccattaagatggcgcgtgcaggtttaggtcacgaacataaaccggttggttcgttcctgtttgccggccctaccggggtcgggaaaacagaggtgacggtacagctttcgaaagcgttgggcattgagctgctgcgctttgatatgtccgagtatatggaacgccataccgtcagccgtctgattggtgcgcctccgggatacgttggttttgatcagggaggtttgctgactgatgcggtcatcaagcatccacatgcggtgctgttgctggacgaaatcgagaaagcgcatccggacgtgttcaatattctgttgcaggtgatggacaacggtacgctgaccgataacaacggacgcaaagcggacttccgtaacgtggtgctggtgatgaccaccaacgccggggtacgtgaaactgagcgtaaatccattggtcttatccaccaggataacagcaccgatgcgatggaagagatcaagaagatctttacaccggaattccgtaaccgtctcgacaacattatctggttcgatcatctgtcaactgacgtgatccatcaggtggtggataaattcatcgtcgagttgcaggttcagctggatcagaaaggtgtttctctggaagtgagccaggaagcgcgtaactggctggccgagaaaggttacgaccgggcaatgggcgcacgtccgatggcgcgtgtcatccaggacaacctgaaaaaaccgctcgccaacgaactgctgtttggttcgctggtggacggcggtcaggtcaccgtcgagctggataaagagaaaaatgagctgacttacggattccagagtgcacaaaagcacaaggcggaagcagcgcattaa

SEQ ID NO: 458590 - DNA, 219 bp, Shigella boydii; identical to SEQ ID NO: 848

SEQ ID NO: 458591 - DNA, 705 bp, Shigella boydii
atgcgcctggttcagctttctcgccattcaatagccttcccttccccggaaggcgcattacgtgagcctaacggcctgctggcacttgggggcgatcttagccctgcgcgcctgttaatggcttaccagcgtggtatttttccgtggttttctccaggcgaccccatcctctggtggtcgcccgatccccgcgcggtgctatggccagaatcactgcatatcagccgtagtatgaagcgatttcataaacgctcgccctatcgtgtcacgatgaattacgcttttggtcaggtcattgaaggctgtgccagcgatcgcgaagaaggaacctggatcacgcgtggcgtggtcgaagcctaccatcgccttcacgaactcggccatgcccactccattgaagtctggcgtgaagatgagcttgtcggcggtatgtacggcgtggcccagggaacgctattttgtggcgagtccatgttcagccggatggaaaatgcgtctaaaacggcgcttctggtattctgtgaggaatttatcggtcatggcggtaagcttatcgactgccaggtccttaacgatcacacagcatcgcttggtgcctgcgaaattccccgccgggattaccttaattatctcaatcaaatgcgcctcggacgattgccgaataatttctgggtaccacgatgcttgttttcaccacaagaatga

SEQ ID NO: 458592 - DNA, 1722 bp, Shigella boydii
atgcgcgctttgctaccctatctagcactgtataaacgtcataaatggatgttaagtcttggtattgtgctggcaattgtgacgctgctcgccagtatcggactgttgacactttccggctggttcctctcggcctcagcggttgcgggggttgccggactgtacagcttcaactatatgctacccgctgcgggcgtgcgtggtgccgcaatcacccgtactgccgggcgttattttgaacgtctggtaagtcacgacgcgactttccgcgtgttgcagcatctgcgcatttacaccttcagcaaattgttgcccctctcccctgccggactggcgcgctatcgtcagggcgaattgctcaatcgcgtggtggcggatgttgatacgctcgatcatctttacctgcgcgttatctcgccgctggtgggcgcttttgtggtgattatgatggtgacaatcgggttaagtttccttgatttcaccctcgcctttacgctgggcggcattatgttactgacgcttttcctgatgccaccgctgttttatcgtgcgggaaaaagcaccgggcaaaatctgactcatcttcgcggacagtatcgccaacaactgacggcctggctgcaagggcaagctgagctgaccatttttggtgccagcgatcgttatcgcacgcaactagagaatacagaaattcaatggctggaagcgcaacgccgtcaatctgaactgaccgcattgtcgcaagtgataatgctgctcattggcgcgttagcggtgatcctgatgctgtggatggcgtctggcggcgttggcggcaatgctcaacccggcgcgttaattgccctgtttgtcttctgcgcgttagccgcgtttgaagcactggcaccagtaacgggtgcatttcagcatctggggcaagtcattgcctctgccgttcggatcactgatttaacggatcaaaaaccggaagtcaccttccctgatacccaaactcgtgttgccgatcgcgtttcgctgacattacgggatgttcagttcacttatccggagcaatcccaacaggcacttaaagggatttctcttcaggtaaacgccggggaacatattgcgattctcgggcgaaccggatgcggcaaatcaacactgttacaactgctgacccgcgcttgggacccgcaacagggcgagattttgcttaacgatagccccatagccagcctgaatgaagcggctctacgacagaccatcagcgttgttcctcagcgagtgcatctgtttagcgccacgctgcgtgataatctgttactcgcctcgcctggcagtagtgatgaggctctggcggagagcttgcgtcgcgttggtctggagaagctgctcgaggatgcaggtctcaacagttggttaggtgaaggcggacgccagctctccggtggtgaactgcgccgtctggctatcgcccgtgcgctgttacatgatgcgccactggtgttgctggatgaacctaccgaaggcttagatgccacaaccgaaagccagatccttgaattgcttgcagaaatgatgcgtgagaaaacggtgttaatggtcacccatcgacttcgcggactctctcgtttccaacaaataatagtgatggacaacgggcaaattattgagcaaggtactcacgcagagctgcttgccagacaggggcgttattaccagttcaagcagggtttgtaa

SEQ ID NO: 458593 - DNA, 1767 bp, Shigella boydii
atgaataaatctcgtcaaaaagagttaacccgctggttaaaacagcaaagcgtcatctcccaacgttggctgaatatttctcgtctgctgggctttgtgagtggcatattgatcattgcccaggcctggttcatggcgcgaattctgcaacatatgattatggagaatattccccgtgaagccctgctgcttccctttacgttactggttctgacctttgtactgcgcgcatgggtggtctggttacgcgaacgggtgggttatcacgccgggcagcatatccgctttgccatccgccggcaggttctcgaccgtctgcaacaagcagggccagcgtggattcagggtaaacctgcggggagctgggcgacgctggtactcgagcaaattgacgatatgcatgattactatgcacgctacctgccgcaaatggcgctggcagtgtcggtgccgttgctgattgtggtggcaatcttcccctcaaactgggctgcggcgctcattctgctgggcactgcaccgttaattccgttgtttatggcgctggttggaatgggggctgccgatgctaaccgacgtaactttctcgctcttgctcgcttaagtgggcatttcctcgatcgcctgcgcggcatggaaacattgcgtatttttggtcgtggtgaagctgaaattgaaagtattcgttctgcttcggaagatttccgccaacggacaatggaagtgctacggctggcatttttatcctccggcattctcgaattttttacctcgctgtcaattgctctggtggcggtctactttggtttttcctatctcggcgagctggattttggtcactacgatactggcgtgacgctggctgcgggttttctggccctgatccttgcgccagagtttttccagccattacgcgatctcggtacgttttatcatgctaaagcccaggctgttggtgcagctgacagtctgaaaacatttatggaaaccccgctcgcccatccgcagcgtggcgaggtggaattagcatcgaccgatccggtgaccattgaggccgaggatctgtttatcacgtcgccggaaggtaaaacgctggccggaccgctgaactttactttgccagcaggccaacgtgccgtgttggttggtcgcagcggttcaggtaaaagttcactgttgaacgcgctttctggttttctctcatatcagggatcgctacgaatcaacgggatagaattacgcgatttatcaccagaatcatggcgtaaacatctctcctgggttgggcaaaatccacaattaccggcagcaacattacgggataacgtactactggcgcgacctgatgccagcgaacatgaattacaagcagcgctggataacgcctgggtcagcgagtttctaccgctcctgccacaaggcgttgatacgcctgttggcgaccaggctgcccgcctttccgtggggcaggcgcagcgcgtggcggtggcccgtgtgttactaaatccctgttcgctattactgttggatgaacccgctgccagccttgatgctcacagtgaacagcgcgtaatggaggcgctgaatgccgcctctctgcgccagacaacgttaatggtcacccaccagttagaagatcttgctgactgggatgtcatttgggttatgcaggatggccggattattgagcaaggacgttacgcggaattaagtgtggctggtggcccattcgccacattactggcccatcgtcaggaggagatttaa

SEQ ID NO: 458594 - DNA, 966 bp, Shigella boydii
atgggcacgaccaaacacagtaaactgcttatcctgggttcaggcccggcgggatacaccgctgctgtctatgcggcgcgcgccaacctgcaacctgtgctgattaccggcatggaaaaaggcggccaactgaccaccaccacagaagtggaaaactggcctggcgatccaaacgatctgaccggtccgttattaatggagcgcatgcacgaacatgccaccaaatttgaaactgaaatcatttttgatcatatcaacaaggtggatctgcaaaaccgtccgttccgtctgaatggcgataacggcgaatacacttgcgacgcgctgattattgccaccggagcttctgcacgctatctcggcctgccctctgaagaagcctttaaaggccgtggggtttctgcttgtgcaacctgcgacggtttcttctatcgcaaccagaaagttgcggtcatcggcggcggcaataccgcggttgaagaggcgttgtatctgtctaacatcgcttcggaagtacatctgattcaccgccgtgacggtttccgcgcggaaaaaatcctcattaagcgtctgatggataaagtggagaacggcaacatcattctgcacaccaaccggatgctggaagaagtgaccggcgatcaaatgggtgtcactggcgttcgtctgcgcgatacgcaaaacagcgataacatcgaatcactcgacgttgccggtctgtttgttgctatcggtcacagcccgaatactgccattttcgaagggcagctggaactggaaaacggctacatcaaagtacagtcgggtattcatggtaatgccacccagaccagcattcctggcgtctttgccgcgggtgacgtgatggatcatatttatcgtcaggccattacttcggccggtacaggctgcatggcagcacttgatgcggaacgctacctcgatggtttagctgacgcaaaataa

SEQ ID NO: 458595 - DNA, 495 bp, Shigella boydii
atggtagatagcaagaagcgccctggcaaagatctcgaccgtatcgatcgtaacattcttaatgagttgcaaaaggatgggcgtatttctaacgtcgagctttctaaacgtgtgggactttccccaacgccgtgccttgagcgtgtgcgtcggctggaaagacaagggtttattcagggctatacggcgctgcttaacccccattatctggatgcatcacttctggtattcgttgagattactctgaatcgtggcgcaccggatgtgtttgaacaattcaataccgctgtacaaaaacttgaagaaattcaggagtgtcatttagtatctggtgatttcgactacctgttgaaaacacgcgtgccggatatgtcagcttaccgtaagttgctgggggaaaccctgctgcgtctgcctggcgtcaatgacacacggacatacgttgttatggaagaagtcaagcagagtaatcgtctggttattaagacgcgctaa

SEQ ID NO: 458596 - DNA, 3972 bp, Shigella boydii
ttgagccaggaatacactgaagacaaagaagtcacattgacaaagttaagtagcggccgtcgccttctggaagcgttgctgatccttattgtcctgtttgccgtctggttgatggctgccttactaagctttaacccttcggaccccagctggtcgcaaacggcctggcatgaacctatccataatttaggtgggatgcccggtgcgtggctggcagatacgctgttctttatttttggcgtgatggcttacaccattcccgtcattattgtcggcggttgttggtttgcctggtgtcatcagtccagtgacgaatacattgattattttgccgtttcgttacgcatcattggcgttttggcgctcatccttacctcctgtggtctggcggcaatcaacgctgacgatatctggtattttgcctccggtggcgtcattggcagcttactaagcactacgttacaaccactgctacacagtagcgggggaactattgcgctgctctgcgtttgggctgcgggcctgacgctgttcaccggttggtcatgggtgaccattgctgaaaaactcggcggctggattttaaacattctcaccttcgccagtaatcgtacccgtcgcgatgatacctgggtcgatgaagatgaatatgaagatgacgaagagtatgaagatgaaaaccacggcaaacagcatgaatcacgccgtgcccgtattcttcgcggcgcgctagcgcgtcgtaaacggttggcggaaaaattcattaatccgatggggcggcaaacagacgctgcgttgttctccggtaagcggatggatgatgaagaagagattatctacactgcacgcggtgtggctgccgacccggacgacgtcctattttcgggcaatcgtgcaacgcagccagaatatgacgaatacgatccattattaaacggtgcgccaattaccgaacctgttgctgtagcagctgctgctaccacggcgacacaaagctgggctgcgccggttgaacctgtgacccagacgccgcctgttacttctgttgatgttccaccttcgcaacctacagtagcctggcagcctgtaccgggtccacaaacgggagagccggttattgctcctgcaccggaaggttacccacagcagccacaatatgcgcagcctgcagtgcaatataatgagccgctgcaacaaccttactacgctcctgcggcggaacaacctgttcagcaaccgtattacgcaactgcgccggaacagcctgcgcaacagccgtattatgcccctgcgccagaacaaccggtggcaggtaacgcctggcaagccgaagagcagcaatccacttttgctccacagtctacataccagactgagcaaacttatcagcagccagccgctcaggagccgttgtaccaacagccgcaacccgttgaacagcagcctgttgtggagcctgaacccgttgtagaagagacaaaacccgcgcgtccgccgctttactattttgaagaagtggaagagaagcgagcccgtgaacgtgaacaacttgcggcctggtatcaaccgattccagaaccggttaaagaaccagaaccgatcaaatcttcgttgaaagcgccttctgttgcagcagtacctccagtagaagccgctgccgctgtttctccgctggcatctggcgtgaaaaaagcgacactggcgacgggggctgccgcaaccgttgccgcgccagtcttcagtctggcaaatagcggtggaccgcgtccgcaagtcaaagagggaattggcccgcagttgccacgaccgaaacgtatccgcgtgccaactcgtcgtgaactggcgtcttacggtattaagctgccctcacagcgtgcggcggaagagaaagcccgtgaagcccggcgcaatcagtatgattctggcgatcagtataacgatgatgaaatcgatgcgatgcagcaggatgaactggcacgtcagttcgcccagacacagcagcaacgctatggcgaacagtatcaacatgatgtgcccgtaaacgcagaagatgcagatgctgcggcagaggctgaactggctcgtcagtttgcgcaaactcaacaacaacgttattccggcgaacaaccggctggggcgaatccgttctcgctggatgattttgaattttcgccaatgaaagcgttgctggatgatggtccacacgaaccgttgtttacgccaattgttgaacctgtacagcagccgcaacaactggttgcaccgcagcagcagtatcagcagccacaacagccggttgcgccacagcagcaatatcagcagccgcaacagccggttgcgccgcagcagcagtatcagcagccacaacagcaggttgcgccgcagccacaatatcagcagccgcaacaaccggttgcaccgcagcagcaggataccctgcttcatccgctgttgatgcgtaatggcgacagccgtccgttgcataaaccgacgacgccgctgccttctctggatttgctgacaccgccgccgagcgaagtggagccggtagatacctttgcgcttgaacaaatggctcgcctggtggaagcgcgtctggctgatttccgtattaaagccgatgtcgtcaattactctccggggccggttatcactcgctttgaacttaacctggctcctggcgtaaaagcggcgcgcatttctaacttgtcacgggaccttgcccgttcactttcgacggtggcggtgcgtgtcgttgaagttattcctggcaaaccctatgtaggtctggagttaccaaataaaaaacgacaaaccgtttatctgcgcgaagttttggataacgctaaattccgcgataatccgtcgccattaaccgtggtgctgggtaaagatatcgccggtgagccggtggttgccgatctggcgaaaatgccgcacttgttggttgcggggactaccggttccggtaaatctgtcggtgtgaacgcgatgatcctgagcatgctttataaagcacagccagaagatgtgcgtttcatcatgatcgacccgaaaatgctggagctttcggtttatgaaggcattccgcatctgttaacggaagtcgttactgatatgaaagatgccgccaacgcgctgcgctggtgtgttaacgagatggagcgtcgttataaactgatgtctgcgctgggtgtgcgtaatctggcgggttataacgaaaaaattgctgaagccgatcgcatgatgcgtccgattccagacccgtactggaagccgggtgacagtatggatgcccagcatccggtgctgaaaaaagaaccatacattgtggtgttggttgacgaatttgccgacctgatgatgacggtaggtaaaaaagtggaagagctgatagcacgtctggcgcaaaaagcccgtgccgcgggtatccacctcgtactggcaactcagcgtccatcggttgatgttattactggtctgattaaagcgaatattccgacccgtatcgcctttaccgtatccagtaagattgactcacgtaccattcttgatcaggctggcgcggaatcactgctggggatgggggatatgctctactctgggccgaactccacgttgccggtacgtgtccatggtgcttttgttcgcgatcaggaagttcatgccgtggtgcaggactggaaagcgcgtggtcgcccacagtatgttgatggcatcacttccgacagtgaaagcgaaggtggcgcgggcggtttcgatggcgctgaagaactggatccgttgttcgatcaggcggtgcagtttgtcactgaaaaacgcaaagcgtcaatttctggcgtacagcgtcagttccgcattggttataaccgtgcagcgcgtattatcgaacagatggaagcgcaggggattgtcagcgaacaggggcacaacggtaatcgtgaagtgctggccccaccgccgtttgactaa

SEQ ID NO: 458597 - DNA, 612 bp, Shigella boydii
atgaaaaaaattgccatcacctgtgcattactctcaagcttagtagcaagcagcgtttgggctgatgccgcaagcgatctgaaaagccgcctggataaagtcagcagcttccacgccagcttcacacaaaaagtgactgacggtagcggcgcggcggtgcaggaaggtcagggcgatctgtgggtgaaacgtccaaacttattcaactggcatatgacacaacctgatgaaagcattctggtttctgacggtaaaacactgtggttctataacccgttcgttgagcaagctacggcaacttggctgaaagatgccaccggtaatacgccgtttatgctgattgcccgcaaccagtccagcgactggcagcagtacaatatcaaacagaatggcgatgactttgtcctgacgccgaaagccagcaatggcaatctgaagcagttcaccattaacgtgggacgtgatggcacaatccatcagtttagcgcggtggagcaggacgatcagcgcagcagttatcaactgaaatcccagcaaaatggggctgtggatgcagcgaaatttaccttcaccccgccgcaaggcgtcacggtagatgatcaacgtaagtag

SEQ ID NO: 458598 - DNA, 1344 bp, Shigella boydii
gtgagcaatctgtcgctcgatttttcggataatacttttcaacctctggccgcgcgtatgcggccagaaaatttagcacagtatatcggccagcaacatttgctggctgcggggaagccgttgccgcgcgctatcgaagccgggcatctgcattctatgatcctctgggggccaccgggtaccggcaaaacaactctcgctgaagtgattgcccgctatgcgaacgctgatgtggaacgtatttctgccgtcacctctggcgtgaaagagattcgcgaggcgatcgagcgcgcccggcaaaaccgcaatgcaggtcgccgcactattctttttgttgacgaagttcaccgtttcaacaaaagccagcaggatgcatttctgccacatattgaagacggcaccatcacttttattggcgcaaccactgaaaacccgtcgtttgagcttaattcggcactgctttcccgtgcccgtgtctatctgttgaaatccctgagtacagaggatattgagcaagtactaactcaggcgatggaagacaaaacccgtggctatggtggtcaggatattgttctgccagatgaaacacgacgcgccattgctgaactggtgaatggcgacgcgcgccgggcgttaaatacgctggaaatgatggcggatatggccgaagtcgatgatagcggtaagcgggtcctgaagcctgaattactgaccgaaatcgcaggtgaacgtagtgcccgctttgataacaaaggtgatcgcttttacgatctcatttccgcactgcataaatcggtacgtggtagcgcacccgatgcggcgctgtactggtatgcgcgaattattactgccggtggcgatccgttatatgttgcgcgtcgctgtctggcgattgcgtctgaagatgtgggtaatgctgatccacgagcgatgcaggtggcaattgcagcctgggattgctttactcgcgttggcccggcggaaggtgaacgcgccattgctcaggcgattgtttacctggcctgcgcgccaaaaagcaacgctgtctacactgcgtttaaagctgcgctggcggatgttcgcgaacgtccggattatgacgtgccggttcatttgcgtaatgcgccgacgaaattaatgaaggaaatgggctacgggcaggaatatcgttacgctcatgatgaagcaaacgcttatgctgccggtgaggtttacttcccgcgggaaatagcacaaacacgctattatttcccgacaaacaggggccttgaaggcaagattggcgaaaagctcgcctggctggctgaacaggatcaaaatagccccataaaacgctaccgttaa

SEQ ID NO: 458599 - DNA, 1293 bp, Shigella boydii
atgctcgatcccaatctgctgcgtaatgagccagacgcagtcgctgaaaaactggcacgccggggctttaagctggatgtagataagctgggcgctctcgaagagcgtcgtaaagtattgcaggtcaaaacggaaaacctgcaagcggagcgtaactcccgatcgaaatccattggccaggcgaaagcgcgcggggaagatatcgagtctttacgtctggaagtgaacaaactgggcgaagagctggatgcagcaaaagccgagctggatgctttacaggctgaaattcgcgatatcgcgctgaccatccctaacctgcctgcagatgaagtgccggtaggtaaagacgaaaatgacaacgttgaagtcagccgctggggtaccccgcgtgagtttgactttgaagttcgtgaccacgtgacgctgggtgaaatgcactctggcctcgactttgcagctgcagttaagctgactggttcccgctttgtggtaatgaaagggcagattgctcgcatgcaccgcgcactgtcgcagtttatgctggatctgcataccgaacagcatggctacagtgagaactatgttccgtacctggttaaccaggacacgctgtacggtacgggtcagctgccgaaatttgctggcgatctgttccatactcgtccgctggaagaagaagcagacaccagtaactatgcgctgatcccaacggcagaagttccgctgactaacctggtgcgcggtgaaatcatcgatgaagatgatctgccaattaagatgaccgcccacaccccatgcttccgttctgaagccggttcatatggtcgtgacacccgtggtctgatccgtatgcaccagttcgacaaagttgaaatggtgcagatcgtgcgcccggaagactcaatggcggcgctggaagagatgactggtcatgcagaaaaagtcctgcagctgctgggcctgccgtaccgtaaaatcatcctttgtaccggcgacatgggctttggcgcttgcaaaacctatgacctggaagtatggatcccggcacagaacacctaccgtgagatctcttcctgctccaacgtttgggatttccaggcacgtcgtatgcaggcacgttgccgcagcaagtcggacaagaaaacccgtctggttcataccctgaacggttctggtctggctgttggtcgtacgctggttgcagtaatggaaaactatcagcaggctgatggtcgtattgaagtaccagaagttctgcgtccgtatatgaacggactggaatatattggctaa

SEQ ID NO: 458600 - DNA, 300 bp, Shigella boydii
atgaaaacgaaaatccctgatgcggtattggctgctgaggtgagtcgccgtggtttggtaaaaacgacagcgatcggcggcctggcaatggccagcagcgcattaacattaccttttagtcggattgcgcatgctgtcgatagcgccattccaacaaaatcagacgaaaaggttatctggagcgcctgtacagttaactgtggtagtcgctgcccgctacgtatgcacgtcgtggacggtgaaatcaaatatgtcgaaacggacaataccggcgatgacaattacgacggcctgcactag

SEQ ID NO: 458601 - DNA, 2118 bp, Shigella boydii
atgcgtcgccgtgtctacaatccggaccgcctgaaatatccgatgaaacgagtcggggcgcgcggtgaaggcaaattcgagcgcattagctgggaagaagcctacgacatcatcgcgaccaatatgcagcgcctgatcaaagagtacggcaacgagtctatctatctgaactatggcaccggtacgctgggcggcaccatgacccgctcctggccgccgggaaataccctggtcgcgcggctgatgaactgctgcggcggctatctgaaccattacggcgactactcctccgcgcaaattgcggaaggtttgaactatacctacggcggctgggcagatggcaacagcccgtcggatatcgaaaacagtaagctggtagtgctgtttggtaataaccctggcgaaacgcgaatgagtggcagtggggtgacttactatcttgaacaggcacgccagaaatctaatgcccgcatgatcatcatcgatccgcgctataccgacaccggtgccgggcgcgaagatgagtggatccctattcgtccgggaacagatgccgcactggttaacggtctggcgtacgtcatgatcactgaaaacctggtggatcaggcattcctcgataaatattgcgttggctacgatgagaaaaccctgccagccagtgcgccgaaaaatggccactataaagcttatattctgggtgaagggccagatggcgtggctaaaacaccggaatgggcctcacaaatcaccggtgttccggcagacaaaatcatcaaactggctcgtgaaatcggcagtaccaaaccggcgtttatcagccagggatggggcccgcagcgtcacgctaacggtgaaatcgcaacccgtgctatctcgatgctggcgattctgaccggtaacgttggtattaacggaggcaacagcggcgcgcgtgaaggttcatacagcttaccgtttgtccgtatgccgaccttggaaaacccgatccagaccagcatttcgatgtttatgtggaccgatgccattgaacgtggcccggaaatgacggcgctgcgtgatggtgtacgcgggaaagataagctggatgtgccgatcaaaatgatctggaactatgccggtaactgcctgattaaccagcattctgaaatcaaccgtacccatgaaatccttcaggatgataagaagtgcgagctgattgtggttatcgactgccacatgacctcatcggcgaaatatgctgacatcctgctgcctgactgcaccgcttccgaacagatggactttgcgctggatgcatcctgcgggaatatgtcttacgtgattttcaacgatcaggtgattaaaccgcgctttgaatgtaagaccatctatgaaatgaccagcgaactggcaaaacgtcttggcgttgagcaacagtttactgaaggccgtacacaggaagagtggatgcggcatctgtatgcccagtcgcgggaagcgattcctgaactgccaacgtttgaagagttccgcaagcaggggatctttaaaaagcgcgacccacaagggcaccacgttgcttataaagctttccgtgaagatcctcaggcaaatccactgaccacgccatcgggcaaaattgagatttattcgcaggcgctggctgacattgccgctacctgggaattgccagaaggcgatgtgatcgatccactgccgatctacacgccgggctttgaaagttatcaggatccgttgaacaaacagtatccgctgcagcttacgggtttccactataaatctcgcgttcactcaacttacggcgacgttgatgtgctgaaagcagcttgccgtcaggaaatgtggatcaacccgcttgatgcgcaaaaacgcggtatcaacaacggcgataaagtcaggatctttaacgatcgtggtgaggttcatattgaggcgaaagtgacgccacgaatgatgccgggtgtggtcgcactgggtgaaggtgcctggtatgacccggatacaaaacgtgtcgataagggcggttgtatcaacgtactgaccactcaacgtccgtctcctctcgctaaggggaatccgtcacatacaaaccttgttcaggttgaaaaggtgtaa

SEQ ID NO: 458602 - DNA, 618 bp, Shigella boydii
atgacaacccagtatggattttttattgattccagccgttgcaccggttgcaaaacctgcgagctggcctgtaaagactacaaagatttgacgccagaagtcagcttccgccgcatttatgaatatgctggcggcgactggcaggaagataacggtgtctggcaccagaacgtgtttgcctactatctgtcgatttcatgtaaccactgcgaagatccggcttgtactaaagtctgcccgagcggtgcgatgcataaacgtgaagatggttttgttgtggtcgatgaagatgtgtgcattggctgccgctactgccatatggcttgcccgtatggcgcaccgcaatataacgaaacgaaaggccatatgaccaaatgcgatggttgttatgaccgtgttgcggagggtaaaaagccgatctgtgttgaatcttgtccgctgcgggcgctggatttcggccctatcgacgagctgcgtaaaaaacatggcgatctggcggccgttgcgccgttgccgcgagctcactttaccaaaccgaatattgtgatcaaacccaatgccaatagccgcccgaccggggataccactggctatctggcaaacccgaaggaggtgtga

SEQ ID NO: 458603 - DNA, 864 bp, Shigella boydii
atgggaagtggatggcatgaatggccgctgatgatcttcacggtcttcgggcaatgtgtagcaggtggttttatcgttctggctttggcgctgctcaaaggcgacctgcgagcagaagcccagcagcgtgttatcgcctgcatgtttggtttatgggtgctgatgggcattggctttatcgcctctatgctccatcttggttcaccaatgcgcgcttttaactcgctcaaccgggtaggggcttcagcactcagtaacgaaatcgccagcggttcgatcttttttgccgtaggcggcatcggctggttgctggcaatgctgaaaaagctgtcaccggcattgcgtacgctgtggctgatagtgacgatggttcttggcgtcatctttgtctggatgatggtgcgtgtgtataacagcattgataccgttccgacctggtacagcatctggacgccgatgggcttcttcctgacgatgtttatgggcggcccgttactgggttacctgttgttgagtctggctggcgtcgatggctgggcgatgcgtctgctgccagcaatttctgtactggcactggtagtgagtggcgtggtgtcagtgatgcagggcgcagagctggcgactattcatagttctgtgcagcaggccgcagcgctggtgccggactatggtgcgctgatgtcctggcggatcgtgcttttggccgttgccctgtgcttgtggattgcaccacagctaaaaggttatcagcctgcggttccgctactttctgtatcattcattctgcttctggcaggggaattaatcggtcgcggcgtattctatggtttgcatatgaccgtggggatggccgtcgcaagctaa

SEQ ID NO: 458604 - DNA, 486 bp, Shigella boydii
ttgtctggagattcagggggccagtctactgccgttttgcttgttgatcaccaggctggtttactttcccttgtacgggatatcgaacccgataagtttaaaaataacgtgctggcgctgggtgaccaggctaagtatttcaacttaccaactattcttaccaccagttttgaaaccggtcctaacggcccattagttccagaactgaaagcacaattccccgatgcaccttacattgctcgcccgggaaatattaacgcctgggataacgaagattttgtaaaagctgtcaaagcgacaggtaaaaaacagttaattattgccggtgtggtaaccgaagtttgcgtggcattcccggcgctttcagccattgaagaagggtttgacgtctttgtcgtgactgacgcgtcagggacctttaatgaaattacccggcattcggcatgggatcgcatgtcgcaagctggtgcgcaattgatgacatga

SEQ ID NO: 458605 - DNA, 570 bp, Shigella boydii
atgtatcggatagttctggggaaagtttcgaccttaagcgcagctccactgccaccgggtttacgcgagcaagcaccgcaaggtccacgacgcgaacgctggctggcggggcgtgcattgctttcgcacacgctttccccgctaccggagatcatctatggcgaacaaggcaaacctgcattcgcgccggaaacgccgctatggttcaacttaagccatagcggtgacgatatcgctctgctgttgagcgatgaaggcgaagtcggctgcgatatcgaagtgattcgcccgcgcgccaactggcgctggctggcgaacgccgtgttcagcctcggggaacacgctgaaatggacgccgtgcatcctgatcagcaactggaaatgttctggcgcatctggacgcgcaaagaagccatcgttaaacagcgtggcggcagcgcctggcaaatcgtcagcgtagatagcacctatcactcctcgctgtcagtcagccattgtcagctagaaaatttaagccttgcgatctgcacccccgttactttattcgtaccccttataatggggtgttag

SEQ ID NO: 458606 - DNA, 1050 bp, Shigella boydii
atggaaacccctcaacccgataaaacgggcatgcacattctgctcaagttggcctcgctggtagtgatcctcgcgggcattcacgcagcggcagatatcattgtgcagctgttactggcgctgttttttgccatcgtcctcaacccgctcgttacctggtttattcgtcggggagtacaacgccccgttgccattacgattgtagtggtggtgatgctgatcgcactaaccgcgctggtcggcgtactggcggcatcgtttaacgaatttatctctatgctgccgaagtttaataaggagctgacgcgcaaactttttaaattgcaggagatgttgccttttcttaatttgcatatgtcgccggagcgaatgctgcagcggatggactcggaaaaagtggttaccttcaccacagcgctaatgaccgggctttccggggcaatggcgagcgtgcttttgctggtgatgaccgtagtttttatgctgtttgaagtgcgccacgtcccttacaaaatgcgttttgcgctgaataacccacagattcacatcgcaggattacaccgcgcacttaaaggcgtttcgcattatctggcgttaaagacgctactcagtttatggacaggtgtcatcgtctggctggggctggcgctaatgggcgtacagtttgcgctgatgtgggcagtactggcgtttttgctcaactacgtgcccaatatcggcgcggtaatttccgccgtaccgccaatgattcaggtgctgctgtttaatggtgtttacgaatgtattctggtcggcgcattgtttttagtggtccatatggtcatcggcaatattttagaaccacggatgatgggccatcgcctggggatgtccaccatggtggtatttctttcattgttaatttggggatggctgctcggcccggtagggatgctactttcggtgccattaaccagcgtgtgtaaaatctggatggaaaccaccaaaggcggtagcaaactggcgattttactggggccaggcagaccgaaaagtcggttaccgggatga

SEQ ID NO: 458607 - DNA, 1251 bp, Shigella boydii
atgaaacactgttgtaaaaatgtggtgatcctcatgcccgaacccgtagccgaacccgcgctaaacggattgcgcctgaatttgcgcattgtctccattgtcatgtttaacttcgccagctacctcaccatcgggttgccgctcgctgtattaccgggctatgtccatgatgtgatgggctttagcgctttctgggcaggattggttatcagcctgcaatatttcgccaccttgctgagccgtcctcatgccggacgttacgccgatttgctgggccccaaaaagattgtcgtcttcggtttatgcggctgctttttgagcggtctgggatatctgacggcaggattaaccgccagtctgcccgtcatcagcctgttattactttgcctgggacgcgtgatccttgggattgggcaaagttttgccggaacgggatcgaccctgtggggcgttggcgtggttggctcgctgcatatcgggcgagtgatttcgtggaacggcattgtcacttacggggcgatggcgatgggtgcgccgttaggcgtcgtgttttatcactggggcggcttgcaggcgttagcgttaatcattatgggcgtggcgctggtggccattttgttggcgatcccgcgtccgacggtaaaagccagtaaaggcaaaccgctgccgtttcgcgcggtgcttgggcgcgtctggctgtacggtatggcactggcactggcttctgccggatttggcgtcatcgccacctttatcacgctgttttatgacgctaaaagttgggacggtgcggctttcgcgctgacgctgtttagctgtgcgtttgtcggtacgcgtttgttattccctaacggcattaaccgtatcggcggcttaaacgtagcgatgatttgctttagcgttgagataatcggcctgctactggttggcgtggcgactatgccgtggatggcgaaaatcggcgtcttactggcgggggcagggttttcgctggtgttcccggcattaggtgtagtggcggtaaaagcggttccgcagcaaaatcagggggcggcgctggcaacttacaccgtatttatggatttatcgcttggcgtgaccggaccactggctgggctggtgatgagctgggcgggcgtaccggtgatttatctggcggcggcgggactggtcgcaatcgcgttattactgacgtggcgattaaaaaaacggcctccggaacacgtccctgaggccgcctcatcatcttaa

SEQ ID NO: 458608 - DNA, 558 bp, Shigella boydii
atgcgcaatctggttaaatatgtcggaattggcctgctggttatggggcttgcggcctgtgatgataaagacactaacgctacggcgcagggttcggtcgcggaaagtaacgctaccgggaatcccgtcaacctgcttgatggcaagttaagtttctcgctgccagcggatatgaccgaccagagcggtaagctgggaacgcaggccaataacatgcatgtctggtccgacgccaccgggcagaaagcagtcatcgtcatcatgggcgatgatccgaaagaagatctggcggtgctggcgaagcgtctggaagatcagcaacgtagccgcgatccgcagctgcaagtggtaaccaataaagccattgagctgaaaggtcacaaaatgcagcagttagacagtattatctccgcgaaaggccagacggcgtactcttccgttattctgggtaacgtgggtaatcaactgctgaccatgcaaattacgctgcccgctgacgatcagcaaaaagcgcagaccaccgcagaaaacatcattaatacgctggttattcagtaa

SEQ ID NO: 458609 - DNA, 666 bp, Shigella boydii
atgaacgttttctcgcaaactcaacgctataaggcgttgttctggttatcgttatttcatctgctggtgatcacctccagtaactatctggttcagcttcccgtctccattttgggtttccataccacctggggcgcgtttagcttcccgtttattttccttgctaccgacctgaccgtgcgtatttttggcgcaccgctggcccgtcgtatcatctttgcggtgatgatcccggcgttgctgatctcctacgtcatctcgtcgctattctatatgggttcctggcagggattcggcgcactcgcccacttcaacctgtttgtcgcccgtatcgccaccgccagtttcatggcctacgcgctgggacagatcctcgacgtgcacgtttttaaccgcctgcgtcagagtcgccgctggtggctggcaccgacagcgtccacactgttcggtaacgtcagcgacacgctggcctttttcttcattgccttctggcgtagcccggatgcctttatggctgaacactggatggaaatcgcgctggtcgattactgtttcaaagtgttaatcagtatcgttttcttcctgccaatgtatggcgtattactcaatatgctgttgaaaagactggcagataaatccgaaatcaacgctttgcaggcgagttaa

SEQ ID NO: 458610 - DNA, 246 bp, Shigella boydii
atgaccgatctcttttccagccctgaccacacactcgacgcacttggcctgcgctgcccggaacccgtaatgatggtgcgcaaaactgtgcgcaatatgcagcccggcgaaacgttgctgattatcgccgacgatccggccactacccgcgatattcctgggttttgtacctttatggaacacgaactggttgcgaaagagacggatggactgccttatcgttatttgattcgtaaaggcggttga

SEQ ID NO: 458611 - DNA, 2199 bp, Shigella boydii
atgtcgacacctgacaatcacggcaagaaagcccctcaatttgctgcgttcaaaccgctaaccacggtacagaacgccaacgactgttgctgcgacggcgcatgctccagctcgccaacgctctctgaaaacgtctccggcacccgctatagctggaaagtcagtggcatggactgcgccgcctgtgcgcgcaaggtagaaaatgccgtgcgccagcttgcaggtgtgaatcaggtgcaggtgttgttcgccaccgaaaaactggtggttgatgccgacaatgacattcgtgcacaagttgaatctgcggtgcaaaaagcgggctattccctgcgcgatgagcaggccgccgacgagccacaagcatcgcgcctgaaagagaatctgccgctgattacactaatcgtgatgatggcaatcagctggggtctggagcagttcaatcatccgttcgggcaactggcgtttatcgcgaccacgctggttgggctgtacccgattgctcatcaggcattacggctgatcaaatccggcagctacttcgccattgaaaccttaatgagcgtagccgctattggtgcactgtttattggcgcaacggctgaagctgcgatggtgttgctgctgtttttgattggtgaacgactggaaggctgggccgccagccgcgcgcgtcagggcgttagcgcgttaatggcgctgaaaccagaaaccgccacgcgcctgcgtaacggtgagcgggaagaggtggcgattaacagcctgcggcctggcgatgtgattgaagtcgccgcaggtgggcgtttgcctgccgacggtaaactgctctcaccgtttgccagttttgatgaaagcgccctgaccggagaatccattccggtggagcgcgcgacgggcgataaagttcctgcaggagccaccagcgtagaccgtctggtaacgctggaagtgctgtcagaaccgggtgccagcgccattgaccggattctgaaactgatcgaagaagccgaagagcgccgcgcccccattgagcggtttatcgaccgtttcagccgtatttatacgccagcgattatggccgtcgccctgctggtgacgctggtgccaccgctgctgtttgccgccagctggcaggagtggatttataaaggcctgacgctgctgctgattggctgcccgtgtgcgttagttatctccacgcccgcggcgattacctccgggctggcggcagcagcgcgtcgtggggcgttgattaaaggcggagcggcgctggaacaactaggtcgtgttactcaggtggcgtttgataaaaccggtacgctgaccgtcggtaaaccgcgcgttaccgcgattcatccggcaacgggtattagtgaatctgaactgctgacactggcggcggcggtcgagcaaagcgcgacgcatccactggcgcaggccatcgtgcgcgaagcacaggttgctgcactcgccattcccgccgccgaatcacagcgggcgctggtcgggtctggcattgaagcgcaggttaacggtgagcgcgtgttgatatgcgctgccgggaaacatcccgctgatgcatttgctggtttgattaatgaactggaaagcgccgggcaaacggttgtgctggtagtacgtaatgatgacgtgctgggtatcattgcattgcaggataccctgcgcgccgatgctgcaactgccatcagtgaactgaacgcgctgggcgtcaaaggggtgatcctcaccggcgataatccacgcgcagcggcggcaattgccggggagctggggctggagtttaaagcgggcctgttgccggaagataaagtcaaagcggtgaccgagctgaatcaacatgcgccgctggcgatggtcggtgacggtattaacgacgcgccagcgatgaaagctgccgccattgggattgcaatgggcagtggcacagacgtggcgctggaaaccgctgatgcagcattaacccataaccacctgcgcggcctggtgcaaatgattgaactggcacgcgccactcacgccaatatccgccagaacatcaccattgcgctgggactgaaagggatcttcctcgtcaccacgcttttagggatgaccggactatggctggcggtgctggcagatacgggtgcgacggtgctggtgacagcgaatgcgttaagattgttgcgcaggagataa

SEQ ID NO: 458612 - DNA, 627 bp, Shigella boydii
atgctttggtcgtttatcgctgtctgtctttccgcatggctatctgtggatgcatcgtatcgtgggccaacctggcaacgctgggtgtttaaaccgttaacccttcttctcctgctgttactggcctggcaagcgccgatgttcgacgccattagctatctggtgctggcagggctgtgcgcctcactgctgggcgatgcgctaaccctgttgccacgtcaacgtctgatgtacgccatcggcgcgtttttcctctcgcacctgctgtacaccatctatttcgccagtcagatgacgctctctttcttctggcctctgccactggtgttgctggttctgggtgcgctgttactggcgattatctggacgcggctggaagagtatcgttggcctatctgcacgtttatcggcatgacgctggtgatggtgtggctggcaggtgaactgtggttcttccgtccgaccgctccggcgctctctgcgtttgttggcgcttcgttgctgtttatcagtaactttgtctggctggggagccactatcgccgacgcttccgtgcggataacgcgattgctgcggcctgctactttgccggtcacttcctcatcgtccgctcactgtatctctga

SEQ ID NO: 458613 - DNA, 360 bp, Shigella boydii
atgagcaaaccacctcttttctttattgttatcattggcttaattgtcgtcgccgcatcgtttcgttttatgcaacagcgacgggaaaaagctgataatgatatggctccgctccagcaaaagctggtggtggtgagcaacaagcgggaaaaaccgattaacgatcgccgttcgcgccagcaggaagtgactccggcaggcgccagtatgcgctatgaggcaagcttcaaaccgcaaagcggaggaatggagcagacgtttcgcctcgacgcccagcagtaccatgccctgacagtgggcgataaaggtacgctgagctataaaggaacgcgctttgttagctttgttggcgaacaataa

SEQ ID NO: 458614 - DNA, 270 bp, Shigella boydii
atgctgattaatattggtcgtttgttaatgctctgcgtttggggatttttaatcctcaatctggtgcatcccttcccgcgcccgctgaatattttcgttaacgtggcgctgatttttaccgtgctgatgcatggtatgcagctggcgctattgaaatccactttaccgaaagatggcccgcagatgaccaccgccgaaaaggtgcggattttccttttcggcgtgtttgaactgctggtctggcagaagaaatttaaagttaaaaaataa

SEQ ID NO: 458615 - DNA, 597 bp, Shigella boydii
atgaaaaaaacgaatcattccggcagcggccaaatccgcattattggcgggcagtggcgaggccgtaaactcccggttcctgatagcccaggtctgcgccccaccaccgaccgcgtacgcgaaacgttgtttaactggctggctccggtcattgttgacgcccaatgtctggattgcttcgccgggagcggcgcgctgggactggaagcgttatcgcgctacgctgcgggggccacgttgattgagatggatcgcgcggtttctcagcagttaattaagaatctggcgacactaaaagcaggcaatgcacgcgtggtgaacagcaacgcgatgtcattcctggcgcaaaaaggtacaccgcataatatcgtgtttgtcgatccaccgttccgccgtggcttgttagaagagacgataaatttactggaagataacggctggctggctgacgaagccctgatttatgtcgaaagcgaagtcgaaaacggtctgcccactgttccggcaaactggtcattacatcgggaaaaagtggcgggtcaggtggcttatcggctgtatcaacgcgaagcacaaggagaaagtgatgctgattaa

SEQ ID NO: 458616 - DNA, 1494 bp, Shigella boydii
atggcgaaagaaaaaaaacgtggctttttttcctggctgggctttggtcaaaaagagcagaccccggaaaaagagacagaagttcagaatgaacaaccggttgtagaagaaatcgttcaggcgcaagagcctgcgaaggcttctgaacaagccgtcgaagagcaaccgcaggcgcatactgaagccgaggcggaaacttttgctgccgacgttgtggaagtcactgaacaggttgctgaaagtgaaaaagcgcagcctgaagcggaagtcgttgcacagccggaaccggtcgtagaagaaacgccggagccagtggctatcgaacgtgaagagctgccgttgccggaagacgtcaacgccgaagaggtttcgccagaagagtggcaggctgaagcggaaaccgtagagattgtcgaagcggcggaagaagaagcggctaaagaagaaatcaccgacgaagagctggaagcacaggcgctggctgccgaagcggcagaagaggcggtgatggtggttcctccggtagaagagcagccggtggaagaaatcgctcaggagcaggaaaaaccgaccaaagaaggtttcttcgcgcgcctgaaacgcagcctgttaaaaaccaaagaaaatctcggttccggatttatcagcctgttccgcggtaaaaaaatcgacgatgatctgtttgaggagctggaagaacagctgttgatcgccgatgtgggcgtggaaaccacacgtaaaattatcaccaatctgacggaaggcgcatcccgcaagcagcttcgtgatgccgaggcgctctatggcctgctgaaagaagagatgggcgagattctggcgaaagtcgatgagccgctgaatgttgaaggtaaaacgccgttcgtgatcctgatggtgggcgtcaacggtgtgggtaaaactacgacgattggtaagctggcacgtcagtttgagctgcagggtaaatcggtgatgctggcggcgggcgatactttccgtgcagcagcggttgaacagcttcaggtctggggtcagcgcaacaatattccggtgattgcccagcataccggtgcggattccgcctctgttatcttcgacgccattcaggcagctaaagcgcgtaatatcgacgtcctgattgccgataccgccggacgcctgcagaacaaatcgcacctgatggaagagttgaagaaaatcgtccgcgtgatgaagaaactcgacgttgaagcgccgcatgaagttatgctgactattgatgccagtaccgggcagaatgcggtaagccaggccaaactgttccacgaagccgttggcttaaccggcatcacgctaacgaaactggacggcacggcgaaaggcggggtaattttctcggtggctgaccagtttggtatccctatccgctacattggtgtcggcgaacgtattgaggatttgcgtccgtttaaggcggacgactttatagaggcactttttgcccgagaggattaa

SEQ ID NO: 458617 - DNA, 669 bp, Shigella boydii
atgattcgctttgaacatgtcagcaaggcttatctcggtgggagacaggcgctgcagggcgttacgttccatatgcagccgggtgagatggcgtttctgaccggtcattccggcgcagggaaaagtaccctcctgaagctgatctgtgggattgagcggcccagcgccgggaaaatctggtttagcggccatgacatcacgcgtctgaaaaaccgtgaagttccgtttctgcgccgccagattggcatgattttccaggatcaccatctactgatggaccgtactgtctacgataacgtggcgatcccgctgattatcgctggtgccagcggtgacgatattcgtcgccgggtgtcggcggcactggataaagtcgggctactggacaaagcgaagaacttccctattcagctttccggcggtgaacaacagcgtgttggcattgcccgcgcggtggtgaataagcccgcggtactgctggcggacgaaccgaccggtaacctggacgacgcgttgtcggaagggattctacgtctgtttgaagagtttaaccgcgttggggtaaccgtattgatggcaacgcacgacatcaacctgatttcacggcgttcctatcgcatgctcaccctgagcgatggtcacttgcatggaggcgtgggccatgaataa

SEQ ID NO: 458618 - DNA, 1059 bp, Shigella boydii
atgaataagcgcgatgcaatcaatcatattcggcagtttggtgggcgtctggatcgcttccgtaaatcggtcggcggctcaggcgacggcggtcgtaacgcaccgaaacgcgcgaaatcctcgccaaaaccggtaaatcgcaaaaccaacgttttcaacgaacaggtgcgctatgccttccacggcgcattgcaggatctgaaaagcaaaccgttcgccacgtttttaacggtgatggttatcgccatctccctgacgctgcccagcgtctgttatatggtgtacaaaaacgttaatcaggcggcgacgcagtattatccgtcaccgcaaatcactgtttacttgcaaaaaacgctggacgatgacgccgctgcgggcgtggtggcacagttgcaggccgagcaaggcgtggagaaagtgaactatctttctcgtgaagacgcactgggcgagttccgtaactggtctggttttggtggtgcgctggatatgctggaagaaaacccgcttccggcagtggcggtggtgatcccgaaactcgattttcaggggacggaatcactcaatacgctgcgtgatcgtatcacgcagattaacggcattgacgaagtgcggatggatgacagctggtttgcccgtctggcggcgttgaccgggctggtcgggcgcgtttcggcgatgatcggcgtgttgatggtggcggcagtgttcctcgtcatcggcaacagcgtacgtctgagcatctttgctcgccgtgactccatcaacgtgcagaaactgattggtgcgacggatggtttcatccttcgcccgttcctgtatggtggcgcactgctgggattttctggcgcattgttgtcattaattttgtcagaaattctggtgctgcgattgtcatcggcggttgcggaagtggcacaggttttcggaacgaattttgatatcaatggtttatcgttcgatgaatgcctgctattgctgctggtatgctcgatgattggctgggtggcagcgtggcttgccacggtacaacatttacgccactttacgcctgaataa

SEQ ID NO: 458619 - DNA, 855 bp, Shigella boydii
atgactgacaaaatgcaaagtttagctttagccccagttggcaacctggattcctacatccgggcagctaacgcgtggccgatgttgtcggctgacgaggagcgggcgctggctgaaaagctgcattaccatggcgatctggaagcagctaaaacgctgatcctgtctcacctgcggtttgttgttcatattgctcgtaattatgcgggctatggcctgccacaggcggatttgattcaggaaggtaacatcggcctgatgaaagcagtgcgccgtttcaacccggaagtgggtgtgcgcttggtctccttcgccgttcactggatcaaagcagagatccacgaatacgttctgcgtaactggcgtatcgtcaaagttgcgaccaccaaagcgcagcgcaaactgttcttcaacctgcgtaaaactaagcagcgtctgggctggtttaaccaggatgaagtcgaaatggtggcccgtgaactgggcgtaaccagcaaagacgttcgtgagatggaatcacgtatggcggcacaggacatgacctttgacctgtcttccgacgacgattccgacagccagccgatggcaccggtgctctatctgcaggataaatcatctaactttgccgacggcatcgaagatgataactgggaagagcaggcggcaaaccgtctgaccgacgcgatgcaaggtctggacgaacgcagccaggacatcatccgcgcgcgctggctggacgaagacaacaagtccacgttgcaggaactggctgaccgttacggtgtttccgctgaacgtgtacgccagctggaaaagaacgcgatgaaaaaactgcgcgctgctatagaagcgtaa

SEQ ID NO: 458620 - DNA, 1104 bp, Shigella boydii
atgaatataaagggtaaagcgttactggcaggatgtatcgcgctggcattcagcaatatggctctggcagaagatattaaagtcgcggtcgtgggcgcaatgtccggtccggttgcgcagtacggtgaccaggagtttaccggcgcagagcaggcggttgcggatatcaacgctaaaggcggcattaaaggcaacaaactgcaaatcgtaaaatatgacgatgcctgtgacccgaaacaggcggttgcggtggcgaacaaagtcgttaacgacggcattaaatatgtgattggtcacctctgttcttcatcaacgcagcctgcgtctgatatctacgaagacgaaggcattttaatgatcaccccagcggcaacctcgccggagctgaccgcccgtggctatcagctgatcctgcgcaccaccggcctggactccgaccaggggccgacggcggcgaaatatattcttgagaaagtgaaaccgcagcgtattgctatcgttcacgacaaacagcaatacggcgaaggtctggcgcgagcggtgcaggacggcctgaagaaaggcaatgctaacgtggtgttctttgatggtatcaccgccggggaaaaagatttctcaacgctggtggcgcgtctgaaaaaagagaatatcgacttcgtttactacggcggttatcacccggaaatggggcaaatcctgcgtcaggcacgcgcggcagggctgaaaactcagtttatggggccggaaggtgtggctaacgtttcgctgtctaacattgcgggcgaatcagcggaagggctgctggtgaccaagccgaagaactacgatcaggttccggcgaacaaacccattgttgacgccatcaaagcgaaaaaacaggacccaagcggcgcattcgtttggaccacctacgccgcgctgcaatctttgcaggcgggcctgaatcagtctgacgatccggctgagatcgccaaatacctgaaagcgaactccgtggataccgtgatgggtccgctgacgtgggatgagaaaggtgatctgaaaggctttgagttcggcgtatttgactggcacgccaacggcacggcgaccgatgcgaagtaa

SEQ ID NO: 458621 - DNA, 384 bp, Shigella boydii
atgacgctgactatcattcgattagaaaactttagcgaccaggaccggattgacctgcaaaagatctggccggagtattccccttcctctttacaggttgacgataaccaccgtatctacgccgcgcgttttaacgagcgcctgctcgctgccgtacgggtaaccttaagcggcaccgagggagcactggattccctgcgtgtgcgggaagtcacccgacgtcgcggtgtggggcaatatctgctggaagaggttttgcgtaacaatcctggcgtttcatgctggtggatggcggatgcaggcgtggaagatcgcggtgtgatgacggcgtttatgcaggcactgggatttacggcgcaacagggcggctgggagaagcgttaa

SEQ ID NO: 458622 - DNA, 1110 bp, Shigella boydii
atgaaacggaatgcgaaaactatcatcgcagggatgattgcactggcaatttcacacaccgctatggctgacgatattaaagtcgccgttgtcggcgcgatgtccggcccgattgcccagtggggcgatatggaatttaacggcgcgcgtcaggcgattaaagacattaatgccaaagggggaattaagggcgacaagctggttggcgtggaatatgacgacgcctgcgacccgaaacaagccgttgcggtcgccaacaaaatcgttaatgacggcattaaatacgttattggtcatctgtgttcttcttctacccaacctgcatcagatatctacgaagacgaaggtattctgatgatctcaccgggagcgaccaacccggagctgacccaacgcggttatcaacacattatgcgtactgccgggctggactcttcccaggggccaacggcggcaaaatacattcttgagacggtgaagccccagcgcatcgccatcattcacgacaaacaacagtatggcgaagggctggcgcgttcggtgcaggacgggctgaaagcggctaacgccaacgtcgtcttcttcgacggtattaccgccggggagaaagatttctccgcgctgatcgcccgcctgaaaaaagaaaacatcgacttcgtttactacggcggttactacccggaaatggggcagatgctgcgccaggcccgttccgttggcctgaaaactcagtttatggggccggaaggtgtgggtaacgcatcattgtcgaatattgccggtgatgctgccgaaggcatgttggtcactatgccaaaacgctatgaccaggatccggcaaaccagggcatcgttgatgcgctgaaagcagacaagaaagatccgtccgggccttatgtctggatcacctacgcggcggtgcaatctctggcgactgcccttgagcgtactggcagcgatgagccgctggcgctggtgaaagatttaaaagctaacggtgcaaacaccgtgattgggccgctgaactgggatgaaaaaggcgatcttaagggatttgattttggtgtcttccagtggcacgccgacggttcatccacggcagccaagtga

SEQ ID NO: 458623 - DNA, 927 bp, Shigella boydii
atgtctgagcagtttttgtatttcttgcagcagatgtttaacggcgtcacgctgggcagtacctacgcgctgatagccatcggctacaccatggtttacggcattatcggcatgatcaacttcgcccacggcgaggtttatatgattggcagctacgtctcatttatgatcatcgccgcgctgatgatgatgggcattgataccggctggctgctggtggcggcgggattcgtcggcgcaatcgtcattgccagcgcctacggctggagtatcgaacgggtagcctatcgcccggtgcgtaactctaagcgcctgattgcgctcatctcggcaatcggcatgtccatcttcctgcaaaactacgttagcctgactgaaggttcgcgtgacgtggcgctgcccagtctgtttaacggtcagtgggtggtggggcatagcgaaaacttctctgcctctattaccaccatgcaggcagtgatctggattgttactttcctcgccatgctggcgctgacgattttcattcgttattcccgtatggggcgcgcctgccgtgcctgcgcggaagatctgaaaatggcgagcctgcttggcatcaacaccgaccgggtgattgctttgacctttgttattggcgcggcgatggcggcagtggctggcgtactgctcggtcagttctacggcgtcattaacccctatatcggctttatggccgggatgaaagcctttaccgctgcggtgctcggtgggattggcagcattccaggggcgatgattggtgggctgatcctggggattgcggaggcgctctcttctgcctatctgagtacggaatataaggatgtggtttcatttgccctgctgattctggtgctgctggtgatgccgaccggtattctgggtcgcccggaggtagagaaagtatga

SEQ ID NO: 458624 - DNA, 1278 bp, Shigella boydii
atgaaaccgatgcatattgcaatggcgctgctctctgccgcgatgttttttgttctggcgggcgtctttatgggcgtgcaactggagctggatggcaccaaactggtggtcgacacggcttcagacatccgttggcagtgggtgtttatcggcacggcggtggtctttttcttccagcttttgcgaccggctttccagaaagggctaaaaagcgtttccggaccgaagtttattctgcccgcgattgatggctccacggtgaagcagaaactgttcctcgtggcgctgttggtgcttgcggtggcgtggccgtttatggtgtcacgtgggacggtggatatcgccactctgaccatgatctacattatcctcggtctcgggctgaatgtggttgttggtctttctggtctgctggtgctggggtacggcggtttttacgccatcggcgcttacacctttgcgctgctcaatcactattacggcttgggcttctggacttgtctgccgattgccgggttaatggcagcggcggcgggcttcctgctcggctttccggtgctgcgtctgcgcggtgattatctggcgatcgttaccctcggcttcggcgaaattgtgcgcatattgctgctcaataacaccgaaattaccggcggcccgaacggaatcagtcagatcccgaaaccgactttcttcggccttgagttcagccgtaccgcccgtgaaggcggttgggacacgttcagtaatttctttggcctgaaatacgatccctccgatcgcgtcatcttcctgtatctggtggcgttgctgctggtggtgctaagcctgtttgtcattaaccgcctgctgcggatgccgctggggcgtgcgtgggaagcgttgcgtgaagatgagatcgcctgccgttcgctgggcttaagcccgcgtcgtatcaagctgaccgcttttaccatcagtgccgcgtttgccggttttgccggaacgctgtttgctgcgcgccagggctttgtcagcccggaatccttcacctttgctgaatcggcgtttgtactggcgatagtggtgctcggcggtatgggatcgcagtttgcggtgattctggcggcaattttgctggtagtgtcgcgcgagttgatgcgtgatttcaacgaatacagcatgttaatgctcggtggtttgatggtgctgatgatgatctggcgtccgcagggcttgctgcccatgacgcgcccgcaactgaagctgaaaaatggcgcagcgaaaggagagcaggcatga

SEQ ID NO: 458625 - DNA, 768 bp, Shigella boydii
atgagtcagccattattatctgtgaacggcctgatgatgcgcttcggcggcctgctggcggtgaacaacgtcaatcttgaactgtacccgcaggagatcgtctcgttaatcggtcctaacggtgccggaaaaaccacggtctttaactgcctgaccggattctacaaacccactggaggcaccattttactgcgcgatcagcatctggaaggtttaccggggcagcaaattgcccgcatgggcgtggtgcgtaccttccagcatgtgcgtctgttccgtgaaatgacggtgattgaaaacctgctggtggcgcagcatcagcaactgaaaaccgggctgttctctggcctgttgaaaacgccatccttccgtcgcgcccagagcgaagcgctcgatcgcgccgcgacctggcttgagcgcattggtttgctggaacacgccaaccgtcaggcgagtaacctggcctatggtgaccagcgccgtcttgagattgcccgctgcatggtgacgcagccggagattttaatgctcgacgaacctgcggcaggtcttaacccgaaagagacgaaagagctggatgagctgattgccgaactgcgcaatcatcacaacaccactatcttgttgattgaacacgatatgaagctggtgatgggaatttcggaccgaatttacgtggtcaatcaggggacgccactggcaaacggtacgccggagcaaatccgtaataacccggacgtgatccgtgcctatttaggtgaggcataa

SEQ ID NO: 458626 - DNA, 714 bp, Shigella boydii
atggaaaaagtcatgttgtcctttgacaaagtcagcgcccactacggcaaaatccaggcgctgcatgaggtgagcctgcatatcaatcagggcgagattgtcacgctgattggcgcgaacggggcggggaaaaccaccttgctcggcacgttatgcggcgatccgcgcgccgccagcgggcgaattgtgtttgatgataaagacattaccgactggcagacggcgaaaatcatgcgcgaagcggtagcgattgtcccggaagggcgtcgcgtcttctcgcggatgacggtggaagagaacctggcgatgggcggcttttttgccgaacgcgaccagttccaggagcgcataaagtgggtgtatgaactgtttccacgtctgcatgagcgccgtgttcagcgggcaggcaccatgtccggcggtgagcaacaaatgctggcgattggtcgcgcgctgatgagcaacccgcgtttgctgctacttgatgagccatcgctcggtcttgcgccgattatcatccagcaaattttcgacaccatcgagcagctgcgcgagcaggggatgactatcttcctcgtcgagcagaacgccaaccaggcgctaaagctggcggatcgcggctacgtgctggaaaacggccatgtggtgctctccgataccggcgacgcgctgctggcgaacgaggcagtgagaagtgcgtatttaggcgggtaa

SEQ ID NO: 458627 - DNA, 1317 bp, Shigella boydii
atgaaaccgttacattatacagcttcagcactggcgctcggactggcgttaatggggaatgcacaggcagtgacgaccattccgttctggcattctatggaaggggaactgggtaaagaggtggattctctggcccaacgttttaacgccgaaaatccggattacaaaattgtaccgacctataaaggcaactacgaacagaatttaagcgcggggattgccgcatttcgtaccggcaacgctccggctattttgcaggtttatgaagttggcaccgccaccatgatggcatcgaaagccattaaaccggtatatgacgtgtttaaagaggcggggattcaattcgatgagtcgcagtttgtgccgacggtttccggttactactccgacagcaaaacgggccacttactctcccagccattcaacagctcgactcccgttctctattacaacaaagacgccttcaagaaagcggggttagacccggaacagccgccgaaaacctggcaggatctggcggactatgccgcgaaactgaaagcctccggcatgaagtgcggctacgccagcggctggcagggctggatccaactggaaaactttagcgcttggaacggtctgccgtttgccagcaaaaacaacggctttgacggcacagatgcggtgctggagttcaacaagccggagcaggtgaaacacatcgccatgctcgaggagatgaacaagaagggcgacttcagctacgtcggtcgtaaggatgaatccaccgagaagttctataacggtgattgcgcgatgaccaccgcctcttccggttctcttgccaacattcgcgagtacgccaaatttaactacggcgtaggcatgatgccttacgacggcgatgcgaaagatgcgccacaaaacgccattatcggcggagccagcctgtgggtgatgcagggtaaagataaagaaacgtataccggtgtggcgaagttcctcgatttcctcgcgaagccagaaaacgctgccgagtggcatcagaaaaccggttatctgccaatcaccaaagcagcgtatgacctgacccgtgagcagggcttttatgagaaaaacccaggggcggataccgcgacgcgtcagatgctgaataagccgccgttgccgttcaccaaagggctgcgtctgggcaacatgccgcagatccgcgtgattgtggatgaagagctggagagcgtgtggaccggtaagaagacaccacagcaggcactggataccgccgttgagcgtgggaaccagttactgcgccgctttgagaaatcgacgaagtcttaa

SEQ ID NO: 458628 - DNA, 888 bp, Shigella boydii
atgtcatcatcccgtccggtgttccgctcgcgctggctgccttatctgctggtcgcgccgcagctcatcatcaccgttatcttttttatctggcctgcgggcgaagcgttgtggtactcgctgcaaagcgtcgatccgtttggtttctccagccagtttgtcggtctggataacttcgtcacgctgttccatgacagctactatctagactccttctggacgacgataaaattcagcacctttgtcaccgtcagcggtttgctggtatcgctgttctttgcggcgctggtggagtacatcgtgcgcggcagccgtttctatcaaaccttgatgctgctgccgtatgccgtggctcccgccgttgccgccgtattgtggatcttcctgtttaaccccggtcgcgggctgatcacccattttctcgctgagttcggctacgactggaaccacgcgcaaaacagcggtcaggcaatgtttctggtggtgtttgcctcggtgtggaagcaaatcagctacaactttctgttcttctatgccgcgctgcactccattccccgttcgttgatcgaagccgcagccatcgacggtgcagggccgattcgccgcttctttaagattgcgctgccgcttatcgccccggtgagtttcttcctgctggtagtgaacctggtgtatgccttcttcgacaccttcccggtgatcgacgccgccacgtccggcgggccggttcaggccaccacgacgctgatttataagatctaccgcgaaggttttaccggactggatctggcttcgtctgccgcacagtcggtggtgttgatgttcctcgtcatcgtgctgacggtggtgcagttccgctatgttgaaagcaaggtgcgttaccaatga

SEQ ID NO: 458629 - DNA, 846 bp, Shigella boydii
atgattgagaaccgtccgtggctgacgatattcagccataccatgctgatcctcgggatcgcggtgatcctcttcccgctgtacgtggcgtttgtcgcggcgacgctggataaacaggccgtctatgccgcgccgatgacgctcatccccggcacacatctgctggaaaatatccacaacatctgggttaacggggtaggtacgaatagcgcgccgttctggcggatgttgcttaacagctttgtgatggcgttcagcattacgctcggcaaaattaccgtctcgatgctctcggcatttgccattgtctggtttcgttttccgctacgtaacctcttcttctggatgatttttatcaccctgatgctgccggttgaagtacgtatcttcccgacggtggaagtcatcgccaacctgaagatgctcgacagctacgccggtttaacgctgccgctgatggcctcggcgaccgccacgtttctgtttcgccagttctttatgacgctgccggatgaactggtggaagcggcgcggatcgacggcgcatcgccaatgcgcttcttttgcgacatcgtttttccgctctccaaaactaatctggcggcgctgtttgtgatcacctttatttacggctggaaccagtatttgtggccgttgttgattattaccgacgtggatctcggcaccaccgtggcagggatcaaagggatgatcgccactggcgaaggcaccacggaatggaactcagtgatggcggcgatgttgttaaccctgatcccaccagtagtgattgttttagtgatgcagcgtgccttcgtgcgcggcctggtcgatagtgagaaataa

SEQ ID NO: 458630 - DNA, 1071 bp, Shigella boydii
atggcaggactgaaattacaggcagtaaccaaaagctgggatggcaaaacccaggtcattaaaccgctgacccttgatgtggctgatggcgaatttatcgtgatggtcgggccgtctggctgcgggaaatcgacgctgctgcgtatggttgccgggctggagcgggtgaccgaaggcgatatctggatcaacgaccagcgcgtgactgaaatggagccgaaagatcgcgggattgcgatggtgttccagaactacgcgctttatccgcatatgagcgtcgaagaaaacatggcgtgggggcttaaaattcgcggcatgggcaagcagcaaattgccgagcgcgttaaagaagcggcgcgcattctggtgctggacggtctgctcaaacgtcgcccgcgtgagctatccggcggtcaacgtcagcgtgtagcgatgggccgcgcgattgtgcgcgatccggcggtgttcctgtttgatgagccgctctctaacctcgatgccaagctgcgcgtgcagatgcgtcttgaactgcaacagttgcaccgtcgcctgaaaacgacttcactctacgttactcacgatcaggttgaagcgatgacgctcgcccagcgagtaatggtgatgaacggcggcgttgccgaacagattggcacaccagttgaagtctacgaaaagcccgccagcctgtttgtagcgagttttatcggcagtccggcgatgaacctgctgacaggccgcgtgaataacgaaggcacgcatttcgaactggacggcggtattgagctgccgctaaacggtggctaccgtcagtatgccgggcgtaaaatgactctcggcattcgcccggaacatattgtgctaagctcgcaggcagaaggcggcgtaccgctggtgatggacacgctggagatcctcggcgcagataacctggcgcacggacgctggggcgagcagaagctggtggtgcgactggcgcatcaggagcgcccgacggcaggcagcacgctgtggctgcatctggcggaaaatcagctgcatctttttgatggtgaaacaggacaacgagtatga

SEQ ID NO: 458631 - DNA, 744 bp, Shigella boydii
atgagtaactggccttatccccgcatcgtcgctcatcgtggcggcggtaagctggccccggaaaacaccctggcggcaatcgacgtcggggcaaaatacggtcataagatgatcgaatttgacgcgaagttatcgaaagatggcgagatcttcctgctccatgacgacaatctcgaacgcaccagcaacggctggggcgtcgcgggtgaactgaactggcaggatttactgcgcgtggatgcgggcagttggtacagcaaagcgtttaaaggtgagccgctgccgttgctttcgcaggtggcggaacgctgtcgcgaacacgggatgatggcgaatatcgaaatcaaacccaccactggcactggaccattaacgggcaaaatggtggcgctggcggcacgccaactgtgggccggtatgacgccgccgctgctgtcatcgtttgagattgatgctttagaagctgcacagctggcggcaccggaactgccgcgtggtttattgcttgatgagtggcgcgacgactggcgcgaactgaccgcgcggctgggctgcgtctctattcatctcaatcataagttactcgataaagcgcgagtgatgcagttgaaagacgccggattacggattctggtttataccgtcaataaaccccagcgcgcggcagagttgctgcgctggggcgtggattgcatctgtaccgatgcgattgacgtgattggtccgaactttacggcccaatag

SEQ ID NO: 458632 - DNA, 441 bp, Shigella boydii
atgaaacgacttctgattcttacggcactcctgccgtttgtcggctttgcacagcccattaatactctgaacaaccctaaccagccggggtatcagatacccagccagcagcggatgcaaacccagatgcaaactcagcaaatccagcaaaaagggatgctgaatcagcaactgaaaacgcaaactcagttgcaacagcagcatttagaaaaccagataaacaataattctcagcgggtgttgcagtcacagccgggggagcgaaatcccgcccggcagcaaatgctgcccaacaccaacggcgggatgttaaacagcaaccgtaatccggatagttcgttgaatcagcagcatatgctgccggagaggagaaacggcgacatgctgaatcagcccagcacgccgcagcctgacattccgttgaaaactattgggccgtaa

SEQ ID NO: 458633 - DNA, 1734 bp, Shigella boydii
atgataaaaccgacgtttttacgccgggtagccattgctgctctgctctcaggaagttgttttagcgccgtcgccgcgcctcctgtttcttacggcgtggaggaagatatcttccatccggtacgcgcgaaacaggggatggtggcgtctgtcgatgccactgccacccaagtgggggtagatattctaaaggagggcgggaatgccgttgatgccgccgtggcggtgggctacgcgctggcggtaacgcatccgcaggcagggaatctgggcggtggtggttttatgctgatccgctcgaaaaatggcaataccaccgctatcgatttccgcgagatggcacccgctaaagcgacccgcgatatgttccttgatgaccagggcaacccggacagcaaaaaatcactcacttcgcatctggcttccggcacgcccggtacggtcgctggtttctcgctggcgttggataagtacggcactatgccgttgaacaaagtggtgcagcccgcgttcaaactggcacgcgatggttttatcgttaacgatgctttggcagacgatctcaaaacctacggtagcgaagtgttgccgaatcacgaaaacagcaaagctatcttctggaaagagggcgaaccgctgaaaaagggcgacaagctggtgcaggcgaacctggcaaagagcctggagatgattgccgaaaacggcccggacgaattctataaaggcacgatagcggaacagattgcccaggagatgcagaaaaacggtggcttgatcactaaagaagatttagcggcgtataaagcggtcgaacgcacaccgataagtggcgattatcgcgggtatcaggtttactccatgccaccgccatcctccggcgggatccatatcgtacaaatcctcaatattctggaaaacttcgatatgaagaaatacggatttggcagcgccgatgcgatgcaaatcatggcagaagcggagaaatacgcctacgccgaccgctcggaatatcttggcgacccggattttgtcaaagtaccgtggcaggcgctgaccaataaagcctatgccaaatctattgccgatcaaattgatatcaataaagcgaagccatccagcgaaattcgccccggcaagcttgcgccttatgagagtaatcaaactacccattactcagtggtggataaagatggtaacgcggtggcggtgacctatacgctgaacaccaccttcggtacgggcattgtcgcgggcgagagcggtattctgcttaataatcagatggatgatttctccgctaaaccgggcgtaccgaacgtttacgggctggtgggcggtgatgccaacgccgtcgggccgaataaacgtccgctgtcgtcaatgtcaccaacgattgtggtgaaagacggtaaaacctggctggtcaccggtagccctggcgggagccggatcatcactacagtgctgcaaatggtggtgaatagcatcgattatggcatgaacgtcgccgaagcgaccaatgcgccgcgtttccaccatcagtggttgccggacgagctgcgtgtcgaaaaagggtttagcccggatacgctcaagctgctggaagcaaaaggtcagaaagtggcgctgaaagaggcgatgggcagtacacaaagcattatggttgggccggacggtgagttgtacggcgcatccgacccgcgctcggtggatgatttaacggcggggtactaa

SEQ ID NO: 458634 - DNA, 285 bp, Shigella boydii
atgattacttatcacgacgcattcgcgaaagcgaaccattaccttgatgatgcagatctcccggtcgtcattactctacatggacgctttagccagggctggtatttctgtttcgaagcacgagaatttctcgaaactggagatgaggccgcgcgcttagctggtaacgcaccttttattattgataaagacagtggtgaaattcattctctgggaacggcaaagccgctggaagaatatctacaggattacgaaataaaaaaggctaccttcggcttgccctga

SEQ ID NO: 458635 - DNA, 156 bp, Shigella boydii
atggaaaaacttacaacggaactacactccttaagtgagatggaccgaagacatgtagtctctattttagccgaaatagctaatggctatgatgattttaatgacatattgatttatttagaattttacccgaatcataagattctgatatcttaa

SEQ ID NO: 458636 - DNA, 171 bp, Shigella boydii
gtgtgccacttcaatatcaactactatggtgggcgcagcgaaacggaattaaccaccgcccaactgacgctgatcaccgatgaaggatcggtcaatgagaaacaggaaacatttattgtaccgatgcgtaatgctggcgagctgacgctggtgaaaagttttgactggtga

SEQ ID NO: 458637 - DNA, 2850 bp, Shigella boydii
ttgaaataccttgcttcttttcgtacaaccctgaaagcctcgcgctacatgttcagagcattggcgttagtgctctggctgttgattgctttttcatccgttttttacatcgttaatgcgttacatcagcgagaatcggaaattcgtcaggaatttaatctgagttccgatcaggctcagcgctttattcaacgcacctctgatgtgatgaaagagctgaagtacatcgccgaaaatcgcttatcggcagaaaacggtgtgctttccccgcgtggacgagaaacgcaggcggatgtgcctgcgtttgaaccgctgtttgccgactccgattgttccgcaatgagtaacacctggcgaggttctctggagtcattggcgtggtttatgcgctactggcgcgataatttttctgcggcttacgatctaaaccgggtatttttaatcggcagcgataacctctgcatggccaatttcggtctgcgtgatatgccagtggaacgcgataccgcgttgaaagctttgcatgaacgcatcaataaatatcgaaatgcaccacaagatgatagcggcagtaacctctactggatcagcgaaggtccgcgccctggcatcgggtatttttacgcgttgacgccagtttatctggcgaaccggttgcaggcgcttttgggggtcgagcagaccatccggatggagaactttttcttaccgggtacgttgccgatgggggttaccattcttgatgaaaatggtcataccctgatttcgcttaccggaccagaaagtaaaattaagggcgatcctcgctggatgcaggaacgctcctggtttggctatacggaagggttccgggagctggtgctgaagaaaaatctgccaccctcatcgctaagcatcgtgtattcggtgccggttgataaggtgcgggaacgcattcgcatgttgatccttaacgcaattttgctgaatgtgcttgccggagctgcattgtttactctcgcacggatgtacgagcgacgtattttcattccggcggaaagcgacgccctgcgactggaagaacatgagcagttcaatcgcaagattgtcgcctccgcgccagtgggtatctgcattttgcgtaccgctgatggcgtcaatattttaagtaacgaactggcgcatacctatctcaatatgcttacgcatgaggaccgccaacgactgacgcaaattatctgtgggcagcaggtcaattttgttgatgtcctgaccagcaacaataccaatctgcaaatcagcttcgtccattcgcgctatcgtaatgaaaacgtggccatttgtgtgctggtggatgtttcttcgcgcgtgaagatggaagagtcgttgcaggagatggcacaagcagcggaacaggcgagccagtcaaaatcgatgttccttgccaccgtcagtcatgagctgcgaacgccgctgtatggcattatcggtaacctggatctgttgcaaaccaaagagttaccgaaaggcgtcgatcggctggtgacggcaatgaacaactcttccagcctgttgttgaaaattatcagcgatattctcgatttctcgaagattgaatcggaacagttgaagatcgaaccgcgtgagttttcaccgcgtgaagtgatgaaccacatcaccgccaactatttaccgctggtggtacgcaagcagttaggcttgtactgctttattgaaccggatgtgccagtggccttaaatggcgacccgatgcgtttacagcaggtcatctccaacctgttgagtaacgccataaaattcaccgataccggctgtatagttttgcatgtccgcgctgatggcgattatctctctatccgtgttcgcgataccggcgtggggattccggcgaaagaagtggtgcgcttgtttgatcccttcttccaggtcggaacgggcgtacagcgaaacttccaggggaccggtctgggtctggcgatttgtgaaaaactgatcagcatgatggacggcgatatctcggtagattcagaaccgggaatgggcagccagtttaccgtgcgtattccgttgtacggcgctcagtacccgcagaaaaaaggcgtggaagggttgagtggtaaacgctgctggctggcggtccgcaatgcgtcgctctgtcagttcctggaaactagtttgcagcgcagcggcatcgtcgttacaacatacgaagggcaggaaccgactcccgaagatgtgttaattactgacgaggtagtgagtaaaaaatggcagggtagagcggtagtgaccttctgtcgtcgccatattggtattccgctggagaaagcgccaggggagtgggtacacagtgtggctgccccgcatgagctaccggcattgttggcgcgtatttatttgatcgagatggagagcgacgatcctgctaacgctctgccgtcgacggacaaagcggtcagcgataatgacgatatgatgattctggtcgtggatgatcatccgattaaccgacgtctgctggcagatcagttgggatcgttgggctatcaatgtaaaaccgcgaatgatggtgtcgatgcgcttaatgtacttagcaagaatcatattgatatcgtgcttagcgacgtcaacatgccaaatatggatggttaccgcttgacgcaacgcattcgtcagttgggactgacgttgccggtaatcggagtaactgctaatgcgttggctgaagagaagcagcggtgtctggagtccggtatggacagctgcctgtcgaagccggtaacgctggatgtgataaaacagacgctgacggtatatgccgagagggtcaggaaatcgcgggaatcgtag

SEQ ID NO: 458638 - DNA, 651 bp, Shigella boydii
atgaacaatatgaacgtaattattgccgatgaccatccgatagtcttgttcggtattcgcaaatcacttgagcaaattgagtgggtgaatgttgtcggcgaatttgaagactctacagcactgatcaacaacctgccgaaactggatgcgcatgtgttgattaccgatctctccatgcctggcgataagtacggcgatggcattaccttaatcaagtacatcaagcgccatttcccaagcctgtcgatcattgttctgactatgaacaacaacccggcgattcttagtgcggtattggatctggatatcgaagggatcgtgctgaaacaaggtgcaccgaccgatctgccgaaagctctcgccgcgctgcagaaagggaagaaatttaccccggaaagcgtttctcgcctgttggaaaaaatcagtgctggtggttacggtgacaagcgtctctcgccaaaagagagtgaagttctgcgcctgtttgcggaaggcttcttggtgaccgagatcgctaaaaagctgaaccgcagtattaaaaccatcagtagccagaagaaatctgcgatgatgaagctgggtgtcgagaacgatatcgccctgctgaattatctctcttcagtgacgttaagtccggcagataaagactaa

SEQ ID NO: 458639 - DNA, 2661 bp, Shigella boydii
atgcgtcagaaagagacaacggccacgacccgcttttcactcctaccggggagcattacccgcttctttttactgttgatcattgtgttactggtgacgatgggtgtaatggtacaaagcgccgttaacgcatggctgaaagataaaagttaccagattgtcgacattacccacgctatccaaaagcgcgtcaatacctggcgttacgtgacctggcagatctacgacaacattgccgcgacgacctccccctcctccggcgaaggtttcctgaaacaggatgtctactatctggagaaaccgcgccgcaaaacggaagcgttaatctttggctctcacgacaactcaacgcttgagatgactcagcggatgtccacctatctggacacattgtggggcgcagaaaatgtaccgtggtcgatgtattacctgaatggtcaggataacagtctggtgctgatctcaaccctgcccctcaaagatctcacctccggatttaaagaatcgaccgtcagcgacattgttgattcacgtcgtgcagagatgttgcaacaggccaacgccctcgatgaacgcgaaagtttttctaacatgcgccgcctggcctggcagaacggtcattactttaccttgcgtaccacgttcaaccagccgggacatctggcaacggtcgtagcttttgatctaccgattaatgatttgatcccaccgggtatgccgctggacagtttccgccttgagccagacgcgacggcaacgggagacaatgataatgagaaagaagggacggatagcgtcagtatccactttaacagaacgaagattgaaatctcctcggcactcaactctaccgatgtgcgcctggtctggcaggttccttatggcaccttattgctggatacgttgcaaaacattctgctgccactgctgctgaacatcggtttgctggcgctggcgttatttggctataccacattccgccatttctccagccgcagtacagaaagtctacccagcacggcggtcaataacgaattgcgcattttacgggcaattaatgaagagatagtctcactgctgccgctcggcctgctggttcacgatcaggaatcgaaccgcactgtcataagtaacaaaattgccgatcatttgctgccgcatttgaatctgcaaaacatcaccaccatggcggaacagcatcaggggattattcaggcgacgatcaataacgagctgtatgagatccgcatgttccgcagccaggtcgcgccgcgcacacaaattttcattattcgcgatcaggatcgcgaagtgctggtaaacaagaaactcaagcaggcgcagcgtctgtatgagaaaaaccagcaggggcggatgacctttatgaaaaacattggcgatgcgctgaaagaacccgcacagtccctggcggagagcgcggctaaactcaacgccccggaaagcaaacaactggcgaatcaggcagatgtgctggtgcggctggtcgatgaaatacagttagcgaacatgcttgcggacgatagctggaaaagtgagacggtgctgttctccgtgcaggatttaattgatgaagttgtgccttcagtgttgcctgccatcaagcgtaaaggtctgcaactgctgattaacaatcatctgaaagcacacgatatgcgccgcggcgatcgcgatgccttacgacgtattttgctgctactgatgcaatatgccgtgacctcaacgcaattgggaaaaatcacccttgaggttgatcaggatgagtcctctgaagaccgcctgacattccgcattctggacacgggagaaggcgtaagtattcatgaaatggataatttgcacttcccgtttatcaaccagccccaaaacgatcgctatggcaaggcggacccgctggcattctggctgagcgatcaactggcgcgtaaactgggcggtcatttaaacatcaaaacgcgggatgggcttggtacacgctactctgtgcatatcaaaatgctcgccgctgacccggaagttgaagaggaagaagagcgtttactggatgatgtctgcgtaatggtggatgttacttcggcagaaattcggaatattgtcactcgccagttagaaaattggggtgcaacctgtatcacacccgatgaaagattaattagtcaagattatgatatctttttaacggataatccgtctaatcttactgcctctggcttgcttttaagcgatgatgagtctggcgtacgagaaattgggcctggtcaattgtgcgtcaacttcaatatgagcaacgctatgcaggaagcggtcttacaattaattgaagtgcaactggcgcaggaagaggtgacagaatcgcctctgggcggagatgaaaatgcgcaactccatgccagcggctattatgcgctctttgtagacacagtaccggatgatgttaagaggctgtatactgaagcagcaaccagtgactttgctgcgttagcccaaacggctcatcgtcttaaaggcgtatttgccatgctaaatctggtacccggcaagcagttatgtgaaacgctggaacatctgattcgtgagaaggatgttccaggaatagaaaaatacatcagcgacattgacagttatgtcaagagcttgctgtag

SEQ ID NO: 458640 - DNA, 1131 bp, Shigella boydii
atgaaagttaaagtactgtccctcctggtcccagctctgctggtagcaggcgcagcaaacgctgctgaagtttacaacaaagacggcaacaaattagatctgtacggtaaagtagacggcctgcactatttctctgacaacaagtcagaagacggcgaccagacctatgtacgtcttggtttcaaaggcgaaactcaggttactgaccagctgaccggttacggccagtgggaatatcagatccagggcaatacctctgaagacaacaaagaaaactcctggacccgtgtggcattcgcaggtctgaaattccaggatgtaggttctttcgactacggtcgtaactacggcgttgtttacgacgtaacttcctggaccgacgtactgccagaattcggtggcgacacctacggttctgacaacttcatgcagcagcgtggtaacggcttcgcgacctaccgtaacaccgacttcttcggtctggttgacggtctgaactttgctgttcagtaccagggcaaaaacggtagcgtaagcggcgaaggcatgaccaacaacggtcgtggcgctctgcgtcagaacggcgacggtgtcggcggttctatcacttatgattacgaaggcttcggtatcggtgctgcagtttccagctccaaacgtactgatgatcaaaatggtagctacatcagcaatggtgtagttcgtaactacatcggtactggcgaccgtgctgaaacctacactggtggtctgaaatacgacgctaacaacatctacttggctgctcagtacacccagacctacaacgcaactcgcgtaggttccctgggttgggcgaacaaagcacagaacttcgaagctgttgctcagtaccagttcgacttcggtctgcgtccgtctgtagcatacctgcagtctaaaggtaaaaacctgggtgtcatcaatggtcgtaactacgacgacgaagatatcctgaaatatgttgatgttggcgcgacctactacttcaacaaaaacatgtccacctatgttgactacaaaatcaacctgctggacgacaaccagttcactcgtgacgctggcatcaacactgataacatcgtagctctgggtctggtttaccagttctaa

SEQ ID NO: 458641 - DNA, 1056 bp, Shigella boydii
atggaaataagctttacccgcgtggcactgctggctgccgcgctcttctttgttggttgcgatcaaaaaccacaacccgccaaaacccacgctactgaagttaccgttcttgaaggcaaaaccatgggtaccttctggcgtgccagcatcccgggcattgatgccaaacgcagtgccgaacttaaagaaaagattcagacccagctggacgccgacgatcagctgctttcgacctataaaaaagattccgcgctgatgcgctttaacgactcgcaaagtttgtcgccgtggccagtaagtgaagcgatggccgaaatcgtcactacctcgctgcgcattggcgcgaagaccgatggtgcgatggatattaccgtcgggccgctggtaaatctgtggggctttggcccggaacaacagccggttcaaattccgagccaggaacagatcgacgagatgaaagccaaaactggtttacagcaccttacggtcattaatcagtcgcatcagcaatatctgcaaaaagacctgccggatttatatgtcgatctctctaccgtcggcgaaggttatgcggcggatcacttggcacgcttgatggagcaggaagggatttcccgctatctggtgtcggtgggcggcgcgctgaacagccgtggtatgaacggtgaaggcctgccgtggcgggtagcgattcaaaaaccaaccgataaagaaaacgcagttcaggctgtggtggatatcaacggtcatgggattagcacctctggcagctaccgtaactattacgaactggacggcaaacgtctttctcatgttatcgatccgcaaaccgggcgtcccatcgaacacaatctggtatccgtgacggtgattgctccgacggcgctggaagccgatgcctgggatactggcttgatggtactcgggccggagaaagccaaagaggttgttcgccgggaagggctggcggtttatatgatcaccaaagaaggcgatagctttaaaacctggatgtcaccacagtttaaaagcttccttgtcagcgaaaaaaattaa

SEQ ID NO: 458642 - DNA, 1065 bp, Shigella boydii
atgaaaaacgccacatgcttaactgacgatcaacgctggcaatctgtcttagcccgcgacccgaatgccgacggcgaattcgttttcgccgtgcgcaccacaggcatcttttgccgtccgtcttgccgcgccagacatgccttgcgggaaaatgtctccttctacgcaaatgccagcgaggcactcgccgccggatttcgcccctgcaaacgctgccaacctgataaagccaatgcccagcaacatcggttggataaaatcacccacgcgtgtcgactgctggaacaggaaacgcctgtaacgttggaagccttagccgaccaggtggcgatgagtccatttcatctacatcggttgtttaaagcgactaccggaatgacgcctaaagcctggcaacaggcctggcgcgctcgccgtttgcgcgaatcgctggcgaaaggggagagcgtgacgacgtctattcttaacgccggattccccgacagcagcagttactaccgcaaagccgatgaaacgctgggcatgacggctaaacaattccgtcacggtggcgaaaatctggcggtgcgttacgcgctggctgattgtgcgctgggtcgttgcctggtggcagaaagcgagcgggggatttgcgcgatattgctgggcgatgatgacgcgacattaatcagcgagttgcagcagatgtttcccgctgccgacaacgcgcctgccgatctgacgtttcagcaacatgtgcgtgaagtgatcgccagcctcaatcaacgcgatacgccgctgacgttaccgctggatattcgcggcactgcttttcagcaacaagtctggcaggcactgcgcacgataccttgcggtgaaaccgtcagttatcagcaactggctaacgccatcggcaaaccgaaagcggtacgggccgttgccagcgcctgtgccgccaacaagctggctatcgtaataccctgtcatcgagtggtccgtggtgatggcacactttccggttaccgctggggcgtgtcgcgtaaagcgcaactgctgcgccgcgaagctgaaaatgaggagaggtaa

SEQ ID NO: 458643 - DNA, 651 bp, Shigella boydii
atgttggatctgtttgccgatgctgaaccgtggcaagagccactggcggctggtgcggtaattttacggcgttttgcttttaacgctgcggagcaactgatccgcgatattaatgacgttgccagccagtcgccgtttcgccagatggtcacccccgggggatataccatgtcggtggcgatgaccaactgtgggcatctgggctggacgacccatcggcaaggttatctctattcgcccattgatccgcaaacaaataaaccgtggcccgccatgccacaaagctttcatgatttatgtcaacgtgcggctacggcggcgggctatccagatttccagccagatgcttgtcttatcaaccgctacgctcctggcgcgaaactgtcgctgcatcaggataaagacgaaccggatctgcgcgcgccaattgtttctgtttctctgggcttacccgcgatttttcaatttggtggcctgaaacgtaatgatccgctcaaacgtttgttgttggaacatggcgatgtggtggtatggggcggtgaatcgcggctgttttatcacggtattcaaccgttgaaagcggggtttcatccactcaccaccgactgccgctacaacctgacattccgtcaggcaggtaaaaaagaataa

SEQ ID NO: 458644 - DNA, 1644 bp, Shigella boydii
atggaacttcttgtacttgtctggcggcagtatcgctggccatttatcagtgtgatggcgctaagcctcgccagtgcggcattaggcattggcttaattgcttttatcaatcagcgccttatcgaaatggcggataccagtctgctggtattgccggagtttctgggattattgctgctgttgatggcagtcactctcggatcgcaactggcgctcaccactttggggcatcacttcgtttaccgactgcgtagtgaatttatcaagcggattctggatacccacgtcgagcgcattgaacaactcggtagcgcctcgttgctggcgggattaaccagcgatgtgcgcaatatcaccattgcttttgtgcgtcttccggaactggtgcaggggatcattctcactatcggttccgcggcgtatctgtggatgctgtcgggcaaaatgttgctggtaacggctatctggatggcgatcaccatctggggtggttttgtactggtggcgcgggtgtacaaacatatggcgaccctacgtgaaaccgaagacaagctgtacacggattttcaaactgtacttgaagggcgcaaagagctgactctgaaccgggaacgcgccgagtatgtgtttaacaacctctacatccccgatgcgcaagagtatcgccatcatattattcgcgcagacaccttccatcttagtgccgtgaactggtcaaacatcatgatgctgggcgctatcggcctggtgttctggatggcgaacagtctcggttgggctgataccaacgttgctgcgacctattcgttgacgcttttattcctgcgtacgccgctgctttcggcggttggcgcattgccgacgctgctgacggcgcaggtggcgtttaacaagctgaacaaattcgcgctcgcgcctttcaaagcagagtttccgcgcccgcaggcgtttcccaactggcaaacgctggagctgcgtaatgtgacgtttagctatcaggataacgcgttttccgttggtccgattaatctcaccatcaaacgtggcgagctactgtttctgattggtggtaacggtagtggaaaatcgacgctggcgatgttgttgacgggcttgtatcagccacaaagcggcgaaatcttgctggatggcaaacctgtcagcggcgaacaaccggaagattatcgcaaactgttttcggcagtgtttaccgatgtctggctgtttgatcaactgctggggccggagggtaaacccgctaacccgcaactggttgagaagtggctggcgcagctgaaaatggctcataagcttgagttaagcaacgggcgtattgttaacctgaagttatcaaaagggcagaaaaaacgcgtggcgctgttgctggcgctggcagaagaacgcgatattatcctgctggatgaatgggcggcggatcaggatccacacttccgtcgtgagttttatcaggtgttgctgccgctgatgcaggagatgggtaaaactattttcgctatcagtcatgatgatcattactttatccacgccgaccgcctgctggaaatgcgcaatgggcaacttagcgagctgacgggcgaagagcgcgatgccgcttcgcgtgatgccgttgcccggacggcataa

SEQ ID NO: 458645 - DNA, 1647 bp, Shigella boydii
atgaaaaaagtgactgccatgctcttctcgatggccgtggggcttaatgccgtttcgatggcggcaaaagcgaaagcgtccgaggagcaggaaactgatgtactgttgattggcggcggcattatgagcgccacgttggggacctatttacgcgagctggagcctgaatggtcgatgaccatgctggagcgcctggagggtgtcgcgcaggagagttcgaacggctggaataacgccggaaccgggcattctgcactgatggaactgaactacaccccgcaaaacgccgatggcagtatcagtattgaaaaagcagtcgccattaacgaagcatttcagatttcccgccagttctgggcgcaccaggtcgagcgcggcgtgctgcgtactccgcgttcatttatcaataccgttccgcatatgagctttgtctggggcgaggataacgttaatttcctgcgcgcccgttacgccgcgttgcaacaaagctcgctgtttcgcggtatgcgttactctgaagatcacgcgcagatcaaagagtgggcaccgttagtgatggaagggcgcgatccgcaacagaaagtggcagccacgcgtacggaaattggtaccgatgtgaactacggcgagatcacccgccagttaattgcttccttgcagaagaaatctaacttctcgctgcaactcagcagcgaagtccgcgccctaaagcgtaatgacgataacacctggaccgttaccgttgccgatctgaaaaatggcactgcacagaacattcgtgccaaatttgtctttatcggcgcgggcggtgcggcgctgaagctgttacaggaatcggggattccggaagcgaaagactacgccggtttcccggtgggcggacagttccttgtttcggaaaacccggacgtggttaatcaccatctggcgaaggtttacggtaaagcatccgttggcgcaccaccgatgtcggttccgcatatcgatacccgcgttctggacggtaaacgcgtagtgctgtttgggccatttgccaccttctcaaccaaattcctcaaaaacggttcattgtgggatctgatgagttccaccaccacctctaacgtgatgccgatgatgcacgtcgggctggataatttcgatctggtgaaatatctggtgagtcaggtgatgttgagtgaagaggatcgttttgaagcgttgaaagagtactatccgcaggcgaaaaaagaggactggcgtttgtggcaagcggggcagcgtgtgcagattatcaagcgtgatgccgataaaggtggtgtactgcgtctgggtactgaagtggtcagtgaccagcaagggaccattgccgcgctcctgggagcatcgccaggggcgtcaaccgccgcgccgattatgttggatctgctggaaaaagtatttggcgatcgcgtttccagcccgcaatggcaggctacgttgaaagcgatcgttccgtcttatggacgcaagctgaacggtgatgtagcggcaacagaacgcgagttgcagtacaccagcgaagtgctggggctgaaatacgacaagccgcaggcagcagatagtacgccaaaaccgcagttgaaaccgcaacccgttcaaaaagaagtggcggatattgcgttgtaa

SEQ ID NO: 458646 - DNA, 489 bp, Shigella boydii
atgaagaccattctacctgcagtattgtttgccgctttcgctaccacttccgcctgggcggcagaaagcgtccagccactggaaaaaatcgcgccttatccacaagctgaaaaagggatgaagcgtcaggtgattcagttaaccccgcaagaagatgaatctaccctgaaagtagaactgttaatcggtcagacgctggaagtcgattgcaatttgcatcgtctcggcgggaagctggaaagcaaaacgctggaaggctggggctatgattattatgtctttgataaagttagctcgccggtttccacgatgatggcctgcccggatggcaagaaagagaagaaatttgtcaccgcgtatctgggcgatgctggaatgctgcgttacaacagcaagctgccgatcgtggtgtatacgccagacaatgtagatgtgaaataccgcgtctggaaggcggaagagaaaattgacaacgcagaagttcgctaa

SEQ ID NO: 458647 - DNA, 165 bp, Shigella boydii
atgcataccccgatcggggtaaaacctgtagcaggatcaaaagagtggcgggaagcgtggcaaaaacgggcttttgctcacatttcaaatggttataaacatatttatatagcgattaattcaccagagatatttctgctggtttgttctctcatcagaatttaa

SEQ ID NO: 458648 - DNA, 495 bp, Shigella boydii
gtgaagattgatgcatcccgtcggggcatactcactggtcgctggcgcaaagccagtaacggtatccgtccgccctggtccggtgatgaatctcattttctgacccattgcacccgttgcgacgcctgtattaatgcttgtgaaaacaacattctgcaacgcggcgcgggcggctatccgagcgttaatttcaaaaataacgagtgcagcttctgttacgcttgcgcgcaggcttgccccgaatcgctattttctctgcgccacactagggcctgggatttgcagttcaccattggggacgcgtgcctggcgtatcagtcagttgaatgccgccgctgtcaggatagctgtgagccaatggcaattatctttcgcccgacgctctccgggatctaccagccgcaacttaatagccaactttgcaacggatgtggagcatgtgcagccagctgtccggtatcagccataactgcggagtatctccatgcacactaa

SEQ ID NO: 458649 - DNA, 264 bp, Shigella boydii
atgcacactaactggcaagtttgcagcctggtcgtgcaggccaaaagcgaacgaatttcagacatcagcacccaactgaacgcctttcccggctgtgaagttgctgtcagcgacgcgccgagcggtcagttgattgtggtggtggaagcagaagacagcgaaacgctgatccaaaccattgagtcagtacgcaacgtagagggcgtgctggcggtgtcgctggtttatcaccagcaggaagagcaaggtgaggaaacaccatga

SEQ ID NO: 458650 - DNA, 2487 bp, Shigella boydii
atgaaactcagtcgtcgtagctttatgaaagctaacgccgttgcggccgctgcggcggctgccggtctcagcgtgccgggcgttgcccgcgccgttgttggtcagcaggaagccatcaaatgggataaagcgccgtgccgtttctgcggtactggttgcggcgttctggtcggaacgcagcagggacgtgtggtggcctgtcagggcgacccagacgcaccggttaaccgtggcctgaactgcattaagggctatttcctgcccaagatcatgtacggtaaagaccgtttgacgcagccgctgctgcgtatgaaaaacggtaaatatgacaaagaaggcgaatttaccctaatcacctgggatcaggccttcgatgtgatggaagagaaattcaaaaccgccctgaaagaaaaagggccggaatcgatcggtatgttcggttctggtcagtggactatctgggaaggttatgccgcgtccaagctgtttaaagcgggcttccgttcgaacaacatcgacccgaacgcgcgtcactgtatggcgtcggcagtagttggctttatgcgtacctttggtatggatgagccgatgggctgctatgacgacatcgagcaggctgacgcgtttgtgctgtggggcgcaaacatggcggagatgcacccgatcctctggtcgcgcatcactaaccgtcgtctctctaatcagaacgtcaccgtggcggtgctttctacctaccagcatcgtagcttcgagctggcggataacggcatcatctttacgccacagtctgacctggtgatcctgaactacatcgccaactatatcattcaaaacaatgcgataaatcaggacttcttcagcaaacacgttaacctgcgcaaaggggcgacggacattggctacggtttacgtccgacccatccgctggaaaaagcagcgaagaatccaggttctgacgcctccgaaccgatgagctttgaagattacaaagccttcgttgccgagtatacgctggaaaaaactgccgaaatgaccggcgtgccgaaagaccagttagaacaactggcgcagctgtatgccgatccgaacaagaaagtcatctcctactggacgatgggcttcaaccagcatactcgtggcgtgtgggctaacaacctggtctacaacctgcacctgctgaccggcaaaatttcccagccgggttgcggtccgttctccctgaccgggcaaccttctgcgtgtggtactgcgcgtgaagtgggcacctttgctcaccgtctgcctgcggacatggtggtgaccaacgagaaacaccgtgatatctgcgagaagaagtggaatatcccgagcggcaccattccggcgaaaatcggtctgcacgcggtggcacaagaccgtgcgctgaaagacggcaaactgaatgtttactggaccatgtgtaccaacaacatgcaggccgggccgaacatcaatgaagagcgtatgccgggctggcgcgatccgcgcaacttcatcatcgtctccgatccgtatccgacagtcagtgcgctggccgccgacttgatcctgccgaccgcaatgtgggtagagaaagagggcgcttacggtaacgccgaacgccgtactcagttctggcgtcaacaggtacaggcaccgggcgaagcgaaatcggatctctggcagttagtccagttctcccgccgcttcaaaactgaagaagtatggccggaagatctgctggcgaagaaaccggaactgcgtggcaaaacgctgtacgaagtgctgtatgccacaccggaagtgagcaaattcccggtatccgaactggcggaagatcagctgaacgatgaatcccgcgagctgggcttctatctgcaaaaagggctgttcgaagagtacgcatggtttggtcgcggtcacggtcacgatctggcaccgttcgatgactaccacaaagcgcgcggtctgcgctggccggtggtgaacggtaaagaaacgcagtggcgttacagcgaaggtaacgacccgtacgtgaaagcgggcgaaggctataagttctacggcaaaccggatggcaaagcggtgatcttcgcactgccattcgaaccggcggcggaagcaccggatgaagagtacgacctgtggctctctaccggacgcgttctggagcactggcacaccggcagtatgactcgccgtgtaccagaactgcaccgcgccttcccggaagcggtcctgtttattcacccgctggatgcgaaagcgcgcgatctgcgtcgtggcgacaaagtgaaagtggtttctcgccgtggcgaagtgatctcgattgtcgaaacgcgcggtcgtaaccgtccgccgcagggcctggtgtacatgccgttcttcgacgccgcacagctggttaacaaactaacgctggacgcgaccgatccgctctcgaaagagacggacttcaagaagtgcgcagtcaaactggagaaggtgtaa

SEQ ID NO: 458651 - DNA, 696 bp, Shigella boydii
atgtcccggtcagcgaaacctcaaaatggtcgccgccgctttctgcgcgatgttgttcgcacagcaggcgggctggctgccgtgggtgtggcgctggggttacaacagcaaaccgcacgcgcatctggcgtgcggttgcgcccgcccggagccataaacgagaacgcctttgccagtgcctgtgtgcgttgcggtcagtgtgttcaggcttgcccttacgacaccttaaaactggcgacgctggcctctggtctgtcggcgggcacgccatattttgtcgcacgggatattccttgcgaaatgtgtgaggacattccgtgcgccaaagtgtgcccgagcggtgcgctggatcgtgagatcgaatcgatcgacgacgcgcggatggggctggcggtactggtggaccaggaaaactgtctcaactttcaggggctgcgctgcgatgtttgttatcgcgaatgcccgaaaattgatgaggccatcaccctggagctggagcgcaacacgcgtaccggtaagcacgcccgctttctgccgacggttcacagagacgcctgtaccggttgcggtaagtgcgaaaaagtgtgcgtgctggaacaaccggcaatcaaggtgttaccgctgtcactggctaaaggggagttaggtcaccattaccgcttcggctggctggaggggaacaatggcaaatcgtaa

SEQ ID NO: 458652 - DNA, 864 bp, Shigella boydii
atggcaaatcgtaaacgtgacgccgggcgcgaggcgctggagaaaaaaggctggtggcgcagtcaccgttggctggtgttacgtcgcctttgtcagttcttcgtgctggggatgtttttgagcggtccgtggtttggtgtgtggatcttacacggtaactacagcagtagcctgttattcgacaccgttccgctgaccgatccgctgatgacgctgcaaagtcttgccagcggtcatctgcctgccacggtggcgttgaccggtgcggtgattatcaccgtgctctacgccctggcaggaaagcgattattttgcagctgggtctgcccgctgaatccgattaccgacttagcgaactggttacgcaggcgctttgacctcaatcagtctgcgacgatccctcgccacattcgctacgtgctgttggtggtcattctgctgggatcggccttaactggcacgctcatctgggaatggatcaaccccgtatctctgatggggcgcagcctggtaatgggcttcggcagcggcgcgctgcttattctcgcgctgtttttatttgatctactggtcgttgaacacggctggtgcgggcacatttgtccggttggcgcgctgtatggcgtgctgggtagcaaaggtgtgattaccgttgcggccaccgatcggcagaaatgtaaccgctgtatggattgttttcatgtttgcccggaaccgcgtgtgctacgtgccccggtgctggatgaacaaagcccggtgcaggtcaccagccgcgattgcatgacgtgcggtcgctgcgtggatgtctgttctgaggatgtatttacaataactacacgatggagttcgggagcgaaatcatga

SEQ ID NO: 458653 - DNA, 450 bp, Shigella boydii
atgaaaagccatgacctgaagaaagcgctgtgtcaatggacggcgatgctggccctggtggtaagcggcgcggtttgggcggctaatggcgtcgattttagccagtcgccggaagtatccgggacacaggaaggggccattcgaatgccaaaagagcaggaacggatgccgctgaactatgtgaatcagccgccaatgatcccgcatagcgttgaaggttatcaggtaacgaccaataccaaccgctgcttgcagtgccacggtgtcgaaagttatcgcaccactggcgcgccgcgcattagtcctactcactttatggacagcgacggcaaagtgggcgcggaagtggctccgcgtcgttatttctgtctgcaatgtcacgtaccgcaggccgataccgcgccaatcgtggggaatacctttaccccatcaaaaggttacgggaaataa

SEQ ID NO: 458654 - DNA, 603 bp, Shigella boydii
atgggaaattctgaccgtaagcctggtctgattaagcgcctgtggaaatggtggcgtacccccagccgtctggcgctggggacgctgctgttgatcggttttgttggcggcatcgtcttctggggtggctttaacactgggatggaaaaagccaataccgaagagttctgcattagctgccacgaaatgcgcaacacggtgtatcaggaatacatggattccgtgcactacaacaaccgtagcggcgtccgtgcgacctgtccggattgtcacgttccgcacgagtttgtgccgaagatgatacgcaagctcaaagcaagtaaagagctgtatggtaaaatttttggcgttattgacacgccgcagaaatttgaagctcatcgtctgacgatggcacagaatgagtggcggcgcatgaaggacaataactcgcaggagtgccgtaactgtcacaacttcgagtatatggatacaaccgcccagaaatcggttgccgcgaagatgcatgaccaggcggtgaaagatgggcaaacctgtattgattgccataaagggatagcgcacaagctgcccgatatgcgtgaagtcgagccaggtttttaa

SEQ ID NO: 458655 - DNA, 618 bp, Shigella boydii
atgcttgaagccagagagttactttgtgagcgggatgaacgaaccttatttagtggcttgtcatttacgctgaacgcaggagagtgggtacaaatcaccggtagcaacggcgcggggaagacaacgcttctccgtttgctgacggggttgtctcgccctgacgcaggcgaggttctctggcaagggcagcccttgcatcaggtacgcgacagctaccatcaaaacctgttatggataggccatcagccggggatcaaaacccggctgacggcgttagaaaatctgcacttttatcatcgcgatggcgataccgcacaatgtctggaagccctggcgcaggccgggcttgccggattcgaagatattcctgtaaatcagctctcggccgggcaacaacgccgcgtcgctttagcgcgtctgtggctgacccgtgccacgttatggatcctcgacgagccttttaccgcgattgacgttaacggcgtcgatcgtctgacccagcgtatggcgcagcatacggagcagggggggattgtgattctgactacccaccagccgctcaacgttgctgaaagtaaaattcgccgcatttcactgacgcaaacgagggccgcatga

SEQ ID NO: 458656 - DNA, 663 bp, Shigella boydii
atgatgttctggcgcattttccgtcttgagctgcgtgtagcgtttcgccatagcgccgaaatcgccaacccgctgtggttcttcctgattgtaattaccctttttccgctcagtatcggtccggagccgcaactgctggcgcgtattgcaccgggcattatctgggttgctgcgctgctttcatccttgctggcgctggaacgactgttccgtgacgatttgcaggacggcagtcttgaacaattgatgttgttgccgttacccttgcccgccgttgtgctggcgaaggtgatggcgcactggatggtaaccggtctgccgttactcatcctttcgccactggtagcaatgctactgggaatggatgtttatggctggcaagtgatggcgctgacgctgctgctgggaacgcctacgcttggctttctcggtgcaccgggtgtggcgttgacagtgggacttaagcgcggtggtgtgctgctcagcatactggtgttaccgctgactatcccattactcatctttgccaccgccgcgatggacgcggcttccatgcatttgcccgttgacgggtatctggcaattttaggcgcgttgctggcaggcaccgcgacattaagtccttttgcgacggcggcagcgttacgaatcagcattcaataa

SEQ ID NO: 458657 - DNA, 762 bp, Shigella boydii
ttgttcgagtctggtatcgaaactatgtggaaaacactgcatcaactggcgatcccaccacggctgtatcaaatctgtggctggtttataccgtggctggcaattgccagtgtggtcgtgcttaccgtcggctggatctggggattcggctttgctccggctgattatcagcagggaaatagctaccgcattatctacctgcatgtgcctgcggcgatctggtcgatgggtatttatgcatcaatggcggtggcggcgtttattggccttgtctggcagatgaaaatggccaacctggcggtggcggcgatggcccccattggtgccgtgtttacctttattgccctggttaccggctctgcatggggaaaaccgatgtggggcacctggtgggtatgggatgcacgtctgacttctgaactggtgctgctgtttttgtatgtgggtgtgattgccctgtggcacgccttcgacgaccgccgtctggcgggccgtgcggcaggtatcctggtgctgattggcgtggtgaatctgccgattattcattactccgtggagtggtggaacaccctgcatcagggatcaacgcggatgcagcaaagtatcgatccggcgatgcgttcgccgctgcgctggtcgatttttggcttcctgctcctgtctgccacgctgacgctgatgcggatgcgtaatttgattttgctgatggaaaaacgccgtccgtgggtgagtgaactgatactgaaaagaggccgtaaatga

SEQ ID NO: 458658 - DNA, 210 bp, Shigella boydii
atgacccctgcatttgcttcctggaatgaatttttcgcaatgggcggttacgccttttttgtctggctggcggtggtgatgaccgttattccgctggtggttttggtcgtgcactcggtgatgcagcatcgcgcaattctgtgtggtgtggagcaacagcgggcgcgtgaggcgcgtttacgtgctgcgcaacagcaggaggctgcatga

SEQ ID NO: 458659 - DNA, 480 bp, Shigella boydii
atgaatattcgccgtaaaaaccgcttgtggattgcctgtgctgtgttggcaggtttggcgctgaccatcggtctggtgctgtatgcgctgcgctcgaatatcgatctcttttatacgccgggggaaattctctacggcaagcgtgaaactcagcaaatgccggaagtcggtcagcgtctgcgcgttggcgggatggtgatgccgggtagtgtgcagcgcgatcccaattcgctgaaagtgaccttcaccatttacgacgctgaaggctcagtggatgtctcttacgaaggcattttgccggatctgttccgtgaagggcagggcgttgtggtgcagggcgagctggaaaaaggcaatcatatcctcgcgaaagaagtgctggcgaaacacgacgaaaactacacgccgccagaagttgagaaagcgatggaagctaaccaccgtcgcccggcgagtgtttataaggacccagcatcatga

SEQ ID NO: 458660 - DNA, 1944 bp, Shigella boydii
atgatgccggaaattggaaacgggctgctgtgcctggcgctgggaattgcgctgctgctgtccgtgtatccgctatggggcgtggcgcgcggagatgcgcgcatgatggcgtcttcccgcttgtttgcctggctgctgtttatgtctgtggctggcgcatttctggtgctggtcaatgctttcgtggtcaacgactttaccgtcacctatgttgccagcaactccaatacccagcttccggtgtggtatcgcgtggcggctacctggggcgcgcatgaaggttcgcttctgctgtgggtgctgctgatgagcggctggacctttgcggtggcgatttttagtcagcgtattccgctggatattgtggcccgtgtactggcgataatggggatggtcagcgtcggctttttgctgttcattctctttacctctaacccgttctcacgcacgctgccgaacttcccaattgaagggcgcgatcttaacccgctgttacaggatccggggctgatcttccatccgcctctgctttatatggggtacgtgggtttctcggtggcgtttgcttttgccattgcttctttgctgagcgggcgtctggacagcacttatgcgcgttttactcgcccgtggacgctggcggcgtggattttcctgacgctcggcattgtgctcggttccgcatgggcctattacgaactcggctgggggggctggtggttctgggatccggtagaaaacgcctcgtttatgccgtggctggtggggactgcgctgatgcactcactggcggtcactgaacaacgcgccagcttcaaagcgtggacattactgctggcaatcagtgccttctcgttgtgtctgctggggactttcctggtgcgttccggcgtgctggtatcggtacacgcgtttgcctctgattcggcacgcggtatgtttatcctcgcctttatggtactggtgattggtggttcgctgctgctgtttgccgcgcgtggacacaaagttcgctcacgcgtaaacaatgcgctgtggtcgcgggaatctctgctgttagcgaacaacgttttgttggtcgccgcgatgctggtggtattactggggacgctgctgccgctggtgcacaagcaactgggactgggcagtatttcgattggcgaaccgttcttcaacaccatgtttacctggctgatggtgccgtttgcgctgctgcttggtgtcggtcctctggtgcgctgggggcgcgatcgcccacgtaaaatccgcaatttattgattatcgccttcatctcaacgctggtgctgtcgctgctgctgccgtggctgttcgaaagcaaagttgtggcgatgacggtgctcggcctggcaatggcctgctggattgctgtgctggcaattgcggaagctgcgctgcgtatttcacgtggcacgaaaaccaccttcagttattggggaatggtggcggctcacctggggctggcagtgacaattgttggtattgcctttagccagaactatagcgttgagcgtgatgtgcgcatgaagtccggcgatagcgtcgatattcatgaatatcgcttcaccttccgtgatgtcaaagaggtgactggcccgaactggcgcggcggtgtggcgactattggcgtaacgcgagagggtaaaccggaaacggtgctgtatgcggaaaaacgttattacaacactgccgggtcgatgatgaccgaagcggcgattgacggcggcatcacgcgtgacctgtacgccgcgctcggtgaagagctggaaaacggcgcgtgggccgtgcgtctttactacaaaccgtttgttcgctggatttgggcgggcgggctgatgatggcgttgggcggactgctgtgtctgtttgatcctcgctatcgtaagcgcgtgagtccgcaaaaaactgcgccggaggctgtatga

SEQ ID NO: 458661 - DNA, 558 bp, Shigella boydii
atgaagcgcaaagtattgttaattccgttgattatcttcctggcgattgccgcggcgctgctgtggcagctggcgcgtaatgccgaaggggatgatccgaccaatctggaatcggcgctcattggcaagccagtgccgaagtttcgcctcgaatcactggacaatccggggcagttttatcaggcggatgtgctgactcagggcaaacctgtgctgcttaacgtctgggctacctggtgtccgacctgccgtgcggaacatcaatatctgaatcagctttctgcgcagggcattcgcgtggtcggcatgaactataaagacgatcgccagaaggcaataagctggctgaaagagctgggcaatccttacgcgctaagcctgtttgatggcgatggcatgttagggctggatctcggtgtctatggcgcgccagaaacgttcctcatcgacggcaacggcatcattcgctatcgccatgcgggcgatctcaatcctcgcgtctgggaagaagagatcaagccgctgtgggagaaatacagtaaggaggccgcacaatga

SEQ ID NO: 458662 - DNA, 1053 bp, Shigella boydii
atgaggtttttattgggcgtgctgatgctgatgatctccggctcagcgctggcgaccatcgacgtgttgcagtttaaggatgaagcgcaggagcagcagttccgccaactcactgaagaactacgctgcccgaaatgccagaacaacagcattgccgattccaactcgatgattgccaccgacctgcgccagaaagtgtatgaactgatgcaggaaggtaaaagtaaaaaagagattgtcgattatatggtggcgcgttacggcaacttcgtcacttacgatccgccgttaacgccgctgaccgtgctgctgtgggtgcttccggtagtggctattggcattggcggttgggtcatttacgcccgttcgcggcgtcgggtacgcgtggtgccggacgcgtttcctgaacaaagcgtgccggaaggtaagcgtgccggatatattgtttatctgccgggtattgtggtggcgttaattgtggctggcgtcagctactaccagactggcaattatcagcaggtgaaaatctggcagcaggccacggcacaggctccggcgttgctggacagggcgctggatccgaaagccgatccgctcaacgaagaagagatgtcgcgtcttgcgctggggatgcgtactcaactgcaaaaaaatccgggagatatagaaggctggattatgttgggccgcgttggcatggcgctgggtaacgccagtatcgccaccgatgcatacgctactgcgtatcgcctcgatccgaaaaacagtgatgcagcactgggttatgctgaagcgttgacacgttcatctgatcccaacgacaaccgcctcggtggtgaactgctgcgccagttggtgagaacggaccatagcaatatccgtgtgttaagcatgtatgcgtttaatgcctttgagcagcagcgatttggcgaagccgttgccgcgtgggagatgatgttgaaactcttatctgccaacgatactcgccgtgcggtgattgaacgtagtatcgcgcaggcgatgcaacatttgtcgccgcaggagagtaaataa

SEQ ID NO: 458663 - DNA, 648 bp, Shigella boydii
atgcctgaagcaacgccttttcaggtgatgattgtggatgatcatccacttatgcgacgcggtgttcgtcagttactggagcttgatcctggctttgaagtggtcgccgaagcgggcgacggcgcgagcgcgatcgatctggcgaatagactggatatcgacgtgatcttgctggatctcaatatgaaaggtatgagtggcctggataccctcaatgccttgcgcagggatggcgttaccgcgcaaattattatcctgaccgtatcagatgcctccagcgatgtctttgcgctgatagacgcagacgcagacggttatctgttgaaagacagcgacccggaagtattgctggaagcaattcgtgctggagcgaaaggcagcaaagtctttagcgaacgcgtcaatcagtacttacgtgaacgtgaaatgtttggcgcggaagaagatcccttcagcgtgctgacggagcgcgagctggatgttctgcacgagctggcacaggggctgtcaaataaacagattgcctcggtgttgaatatttcagagcagacagtaaaagtacatattcgcaatctgctgcgcaaactcaatgtccgctcacgcgtggcagccaccattctgttcctgcaacaacgcggggcacaataa

SEQ ID NO: 458664 - DNA, 483 bp, Shigella boydii
atgaccattccgaaaacggatattgccgtcattaaaggcgcgtgggtcgatggaatgggaagcccgtctacaggtgacttccatgatttagtcaagttatcgattcagggaaatctcaccgccccacagtcatgcaaaattaatcagggcgatgttattaaggttaattttggattcatcaatggtcagaagtttaccacccgtaatgccatgccagacggttttactccagtagactttgatatcacttatgactgtggtgatacttcaaagattaaaaactcgttgcaaatgcgcatcgacggtacaactggggtagtagaccagtacaacctggtcgccaggcgaagaagttcagacaatgtgcccgatgtcggtattcgtattgaaaatctcggcggcggagttgcaaatattccttttcagaacggtatccttcccgttgatccttccgggcatggcaccgtcaatatgcgcgcctag

SEQ ID NO: 458665 - DNA, 861 bp, Shigella boydii
atgaaacaacaccaatcggcggataattctcagggccagctttacattgtaccgacgccaatcggcaatctggcggatatcacccagcgtgcgttagaggtattacaggccgttgatctgattgccgccgaggatactcgtcacaccggtttattgctgcaacattttgggattaatgcccggttgtttgcgctgcacgaccataacgaacaacaaaaagccgaaacgctgctggcgaagctgcaagaggggcaaaacattgcgctggtttccgatgccggaacgccgctaattaacgatcctggctaccatctggtgcgtacctgccgtgaagcggggattcgcgtggtgccgctacccgggccgtgtgctgctatcactgcgttaagcgccgcgggtttaccctctgaccgtttctgttacgaaggctttttacctgccaaatcaaaaggccgccgtgatgcgctaaaagccattgaagcggagccgcgcacgctgattttttatgaatccacccaccgtctgttagatagcctggaagatatcgttgcggtattaggcgaatcccgctacgtggttctggcgcgtgagctgaccaaaacctgggaaaccattcacggcgcgcccgttggcgaactgctggcgtgggtaaaggaagatgaaaaccgtcgcaaaggcgaaatggtgctgattgtcgaaggtcataaagcacaggaagaagacttacccgccgatgccctgcgcacgctggcgctgctacaggcagaactgccgctgaaaaaagcggcggcgctggtcgcagaaattcatggcgtgaagaaaaatgcgctgtataagtatgcgctggagcagcaggggtaa

SEQ ID NO: 458666 - DNA, 2037 bp, Shigella boydii
atggtaccctcaacattttctcgtttgaaagccgcgcgttgtctgcctgttgttctggcagccctgattttcgccggttgtggcacccatactctcgatcagtccactgcttatatgcagggcacggcgcaggctgattctgccttttatcttcagcagatgcagcaaagctctgatgataccaggatcaactggcaattactcgccattcgtgcactggtgaaagaaggtaaaaccaggcaggcggttgagttgtttaaccaactaccgcaagaactgaacgattctcagcgtcgcgagaaaacactgctggcggtagagattaaactggcgcagaaagattttgctggcgcgcaaaacttgctggcgaaaatcacacctgccgatttagaacaaaaccagcaagcgcgttactggcaggcaaaaatcgatgccagccaggggcgtccttccattgatttactgcgcgcgttaattgctcaggaaccgctgctcggcgcgaaagaaaaaaagcagaatattgatgccacctggcaggcgctctcctccatgactcaggaacaggcgaatacgctggtgatcaacgccgacgaaaatattctgcaaggctggctggatctgcagcgcgtctggtttgataaccgtaacgatcccgatatgatgaaagccgggatcgccgactggcagaaacgttatccgaacaatccgggcgcgaaaatgctgccaacgcagttggttaacgtaaaagcgtttaaaccagcctcgaccaacaaaatcgccctgctgttgccgctgaatggccaggcagcggtatttggtcgcactattcagcaaggctttgaagcggcgaaaaatatcggcactcagccagtggcggctcaggtagctgccgcacctgccgcagacgtagcagaacaacctcagccgcaaactgcggatggcgttgccagcccggcacaagcctcggttagcgatctgaccggtgatcagcctgcggcccagccggtgcctgtaagcgccccggcgacaagcaccgcagcggtaagcgcacccgcaaatccatccgcagagctgaaaatctacgatacctcatcacaaccacttagccagatcttaagccaggttcagcaggatggcgcgagtattgtggttggtccgttgctgaaaaataacgttgaagagttgcttaagagcaacaccccgctgaacgtgctggcactgaaccagccggagaatatcgaaaaccgcgtcaatatttgttacttcgcgctttcaccggaagacgaagcgcgcgatgcagcgcgtcatattcgtgaccagggtaaacaagcgccgctggtgctgatcccacgcagttcattgggcgatcgcgtagccaatgcgtttgcgcaggagtggcagaaactgggcggcggcaccgttctgcaacaaaaatttggttccaccagcgaattacgcgcgggtgttaacggcggttctggtatcgctttaacgggtaccccgattactcccagagcgacaaccgactccggcatgacgaccaacaatccaacgctgcaaaccacgccaaccgatgaccagttcaccaataatggcggtcgtgtcgatgcggtgtacattgtggcaacgccgggtgaaatcgcttttatcaaaccgatgatcgccatgcgtaacggtagccagagcggtgcaatgctgtacgccagctcccgcagcgcacaaggcaccgcaggcccggatttccgtctggagatggaaggtttgcagtacagcgaaatcccgatgctggcgggcggtaatctgccgttaatgcagcaggcactcagcgcggtgaataacgattattcactggctcgcatgtatgcgatgggcgtcgatgcctggtcgctggcaaatcatttctcacaaatgcgccaggttcagggttttgaaatcaacggtaataccggaagcctgacggcaaacccggattgcgtgattaacaggaagttatcatggctacagtaccaacaaggtcaggtagtccccgccagttaa

SEQ ID NO: 458667 - DNA, 396 bp, Shigella boydii
atggctacagtaccaacaaggtcaggtagtccccgccagttaaccaccaaacagaccggcgatgcgtgggaagtacaagcgcgtcgctggctggaaggcaaaggactgcgatttgtcgccgctaacgtgaacgagcgtggcggtgagatcgatctgataatgcgtgaaggctggaccaccgtttttgtcgaggtgcgttaccgccgctctgcgctttatggcggcgcggcagccagtgtgacccgcagcaaacaacacaaattattacagactgcccgcttgtggctcgcgcgtcataatgggagttttgatactgtggattgccggttcgatgtggtagccttcaccgggaatgaggttgagtggattaaggatgcctttaatgaccactcataa

SEQ ID NO: 458668 - DNA, 591 bp, Shigella boydii
gtgcaagaaagaattaaagcttgcttcactgaaagcattcaaactcaaattgcggcggcagaggcgcttccggatgccatctcccgtgcagccatgacgctggttcagtctctgctcaatggcaacaaaatcctctgttgtggtaatggaacttccgctgccaatgcacagcattttgctgccagcatgatcaaccgtttcgaaacggagcggcccagcttacctgccattgcactaaatactgataatgttgtcttaacggcgattgccaacgatcgcttacatgatgaagtgtatgcaaaacaggtgcgggcgctgggtcatgcgggagatgtattgttagccatttccacccgtggcaacagccgcgatattgttaaagcagttgaagccgccgttacgcgtgatatgaccattgtggcattgaccggctatgacggcggcgaacttgcaggtttgttagggccacaggatgtggagatccgcattccttcgcatcgtagtgctcgcattcaggaaatgcatatgctgacggtaaattgcctgtgcgatctgatcgataacacgcttttccctcaccaggatgattaa

SEQ ID NO: 458669 - DNA, 576 bp, Shigella boydii
atgaaggcattatcgccaatcgcagtccttatttccgcgctgctgttgcaaggttgtgttgccgctgccgtagtgggtaccgctgctgtgggtaccaaagccgcaactgacccacgcagtgtcggcacccaggtggacgatggtaccctggaagtgcgcgtgaacagcgcattgtcgaaagacgaacagattaagaaagaaacccgtattaatgtcacggcgtatcagggcaaagtgctgctggttgggcagtcaccaaatgctgaactttcggctcgcgccaaacagattgctatgggcgtagacggtgccaacgaagtgtataacgagattcgtcagggccagccgattggtctgggcgaagcatctaacgatacgtggatcaccaccaaagtgcgttcgcagctcttaaccagcgacctggtgaaatcgtccaacgtgaaagtgaccaccgaaaacggtgaagtgttcctgatggggctggtgactgaacgtgaagcgaaagcggcggcagatattgccagccgggtgagcggcgtaaagcgggtaaccacagcgtttacgtttattaaatag

SEQ ID NO: 458670 - DNA, 1041 bp, Shigella boydii
atgactggtcagtcttcatctcaggcggcaacgcccattcagtggtggaaacccgcgcttttctttctcgttgtcattgccggtctctggtatgtgaaatggcaacattactacggcaaagcgtttactgcagccgaaacccacagtatcggtaaatctatccttgcgcaggcggatgctaatccgtggcaagcggcgttggattacgcgatgatctatttcctcgcagtatggaaagcggcggtgctgggggtgatcctcggttcgttgattcaggtgctgatcccgcgtgactggttgttgcgtacgcttgggcaatcgcgctttcgcggcacgctgctgggaacgctgttttcgctgccgggcatgatgtgtacctgctgtgcggctccggtcgcggcggggatgcgtcgccaacaggtatcgatgggcggtgcgctggcattctggatgggcaatccggtgttaaacccggcgacgctggtgtttatggggtttgtcctcggctggggttttgcggcgattcgtctggtggccgggctggtgatggtgttgctgattgcgacgctggtgcaaaaatgggtgcgtgaaacaccgcaaacgcaggcaccggtcgaaattgacataccggaagcacagagcggtttttttagccgctggggcagggcgctatggacacttttctggagtacgatcccggtttacatccttgcagtactggtgttgggtgccgcacgcgtctggttattcccccatgccgatggtgctgtcgataacagcctgatgtgggtggtggcgatggcggtagcaggatgcttgtttgtcattcccacggcagcagaaattccgattgtacaaacgatgatgctggcaggtatgggaaccgctccggcgctggcattgttgatgacgctcccggcagtgagtttgccgtcactgattatgctgcgcaaagcgttcccggcgaaagccttatggctgacaggggcgatggtggcagtgtctggtgtgattgtcggcgggctggcgctgttgttctga

SEQ ID NO: 458671 - DNA, 636 bp, Shigella boydii
atgagtcaggtactgattacaggcgcaacggggctggtgggcggtcacctgctgcggatgttgattaatgaaccgaaagttaacgccattgctgcgccgacgcgacgtccgttgggcgatatgcccggggtgtttaatccccatgatccgcaactgagtgacgcgttggcgcaggtcaccgaccccatcgacattgtgttttgttgtctcggcaccacgcggcgagaagcggggagcaaagaggcgtttattcatgccgattacacgctggtagtggataccgcattaaccgggcggcggctgggcgcgcagcatatgctggtggtcagtgctatgggggccaatgcccactcgccgtttttctataaccgcgtcaaaggggagatggaagaagcattaattgcccagaactggccgaaattgaccattgctcgcccgtcgatgttactgggcgatcgtagcaaacagcggatgaacgaaacgctttttgcgccgctgttccgtttgttaccaggtaactggaaatccattgatgcgagagacgtggcgcgggtcatgctggcagaggcgatgcggcctgagcatgaaggcgtgacgattttaagctcttcagaattacgcaaaagagctgaataa

SEQ ID NO: 458672 - DNA, 519 bp, Shigella boydii
atgagtaagaaaattgccgttttaatcagtgatgaatttgaggattcagaatttacttcacccgcagacgagttccgtaaagccggacacgaagtaattaccattgaaaagcaagcgggtaaaacggtgaaaggcaaaaaaggagaagccagcgtgaccatcgataaatccatcgatgaagtgacgccagcggagttcgatgccctgctgctaccgggcggccattcaccggattatctgcgtggggacaaccgttttgtcacctttacccgtgattttgtgaatagcggcaaacctgttttcgccatctgtcacggtccgcagctgctgatcagcgccgatgtgattcgggggcgcaaactgaccgcagttaaaccgatcattattgatgttaaaaatgcgggcgcggaattttacgatcaggaagtcgtggttgataaagatcagctggttaccagccggacaccggacgatctgccagcgtttaaccgcgaggcgttacgcctgctcggtgcctga

SEQ ID NO: 458673 - DNA, 444 bp, Shigella boydii
atggaaacactcatcaccatcagccgttggttggcaaaacaacatgttgtcacctggtgtgtgcagcaggaaggggaactgtggtgcgctaatgctttttatctgtttgatgcgcagaaagtcgccttctacattttgacggaagaaaaaacgcgccacgcgcagatgagtgggccgcaggctgcggttgccggaacggtaaacggtcagccgaaaacggtagcgttaattcgcggtgtgcagtttaaaggtgagatccgcaggctggaaggtgaggaaagcgacctcgcgcgcaaggcgtacaatcgtcgctttccggttgccagaatgctgtcggccccggtgtgggaaatccggctcgatgaaatcaaattcaccgacaacacgctgggctttggtaaaaaaatgatttggctacgcgactcaggcaccgagcaggcgtaa

SEQ ID NO: 458674 - DNA, 303 bp, Shigella boydii
atgacaccctggtttctttacttgatccgtaccgccgacaataagctttataccgggatcaccacggatgtcgaacgccgctatcagcagcaccaaagcggcaaaggggcgaaagcactgcgcgggaaaggagaactgacgctggcgttttctgcgccagtgggcgaccgttcgctggcactacgggcggaatatcgcgttaagcaactgaccaaacggcaaaaagagcgtctggtagcggaaggcgcagggtttgcagaactgttgagcagcctgcaaaccccggagattaaaagcgattga

SEQ ID NO: 458675 - DNA, 504 bp, Shigella boydii
atgctaattcgagtagaaattcccattgatgcgccgggtattgatgccctgctgcgtcgctcattcgaaagtgatgcggaagcgaagctggttcacgatctgcgtgaagatggctttctgacgctggggctggtggcgacagatgacgaaggtcaggtcattggctatgtggcatttagtccggttgatgtgcagggcgaagacctgcaatgggtcggcatggcaccgttggcggttgatgaaaaataccgtggacaggggctggcacgcaaactggtctatgaaggactcgattcgcttaatgagttcggctatgccgcagtggtgacgctgggcgatccggcgctgtacagtcgtttcggctttgaactggcggcgcatcacgatctgcgttgccgctggccgggcactgaaagcgccttccaggtacatcgtttagcggatgacgcgctgaatggcgtaaccggtctggttgagtatcacgagcatttcaatcgcttttaa

SEQ ID NO: 458676 - DNA, 525 bp, Shigella boydii
gtgttgaataaactgcgttcccgtattgtgcatttggggccatctctgttgagtgtaccggtaaaactgacgccatttgcgctaaaacgccaggttcttgagcaggtcttaagctggcaattccgtcaggcgctggatgatggcgagctggagtttcttgaaggccgcaggttaagtattcatgtgcgtgatattgacctgcaatggtttacctcggtggtgaatggcaaactggtggtcagccagaacgcgcaagctgatgtgagttttagtgccgacgccagcgatctgctgatgattgcggcgcgtaaacaagatccagatacgctcttcttccagcgtcggctggtgattgaaggcgatacggagctggggctgtatgtgaaaaacctgatggacgccattgaactggagcaaatgccgaaagccttacgcatgatgctgctgcaactggcggattttgttgaggcgggaatgaaaaccgcgcctgaaaccaaacagacatcggtaggtgaaccatgctaa

SEQ ID NO: 458677 - DNA, 981 bp, Shigella boydii
atggagctgctctgccctgccggaaatctcccggcgcttaaggcggccatcgaaaacggcgcagatgctgtttatatcgggctaaaagatgataccaatgcccgtcacttcgccggccttaactttaccgagaaaaaattgcaggaagcggtgagttttgtccatcaacatcgccgcaaacttcacatcgcgattaacacttttgcgcatccggacggttacgcccgttggcagcgcgccgtggatatggcggcgcagctgggtgccgacgcgctgatcctcgccgacctcgccatgctggaatacgccgccgagcgttatccgaatattgagcgccacgtatcggtgcaggcttcggcgaccaatgaagaggcgattaacttttatcatcgccattttgacgttgcccgcgtggtgctgccgcgcgtgttgtcgattcatcaggtgaaacagctggcacgggtcacacctgtaccactggaagtgtttgctttcggcagcctgtgcattatgtcggaaggccgttgctatctgtcgtcgtatctgacgggtgagtcgcctaacaccgtgggcgcgtgttctccggcccgtttcgtgcgctggcaacaaacgccgcaggggctggaatcccgcctgaacgaagtgctgatcgaccgttatcaggacggcgaaaacgcaggttatccgacgctgtgtaaagggcgttatctggtggacggcgagcgctatcacgcgctggaagaaccaaccagtctcaataccctggaactgctgccggagttaatggcggcgaatattgcttcggtgaaaattgaaggccgccagcgtagcccggcgtatgtcagccaggtggcgaaagtctggcgtcaggctatcgaccgttgtaaggccgatccgcaaagcgcgtggatggagacgctcgggtcgatgtccgaaggcacgcagaccacccttggcgcgtatcaccgtaaatggcagtga

SEQ ID NO: 458678 - DNA, 879 bp, Shigella boydii
atgaaatattccttagggccagtgctgtggtactggccaaaagagacgctggaagatttttatcagcaggccgccaccagcagcgccgacgtgatttatcttggtgaagcggtatgcagcaagcgccgggcaaccaaagttggcgactggctggagatggcaaaatcgctcgccggaagtggcaagcagattgtgctctccacgctggcgctggtgcaggcatcctctgaactgggcgaactgaaacgctatgttgagaacggtgagtttctgattgaagccagcgatctcggcgtggtgaatatgtgcgctgaacgcaaactgccgttcgtcgccgggcacgcgctgaactgctacaacgcggtgacgctgaaaatattgctcaaacagggcatgatgcgctggtgtatgccggtggagctttcccgcgactggctggtgaatctgcttaatcagtgcgatgagctgggcattcgcaaccagtttgaagtggaagtcctgagctacggtcatctaccgctggcctactccgctcgctgctttaccgcgcgttcggaagaccgcccgaaagatgagtgtgaaacctgctgcattaagtatccgaacgggcgcaacgtgctgtcgcaggaaaaccaacaagtgtttgtactcaatggcattcagaccatgagcggctacgtttacaacctcggtaacgagctgacatccatgcagggattggttgatgtggtccgcctgtcaccgcagggtactgacactttcgcgatgctcgacgccttccgcgctaatgaaaatggcgctgcgccactattgttgacggcaaacagcgactgtaacggctactggcggcggctggcaggactggagctgcaagcctaa

SEQ ID NO: 458679 - DNA, 1008 bp, Shigella boydii
atgactgataaaaccattgcgttttcgctactcgatctggcccccattcccgaaggttcttcagcgcgagaagcattctcccactctctcgatctcgcccgtctggctgaaaagcgcggctatcatcgctactggctggcagaacaccacaatatgactggcattgccagtgctgccacgtcggtattgattggctatctggcggcgaataccaccacgctgcatctggggtctggcggcgtgatgttgcctaaccactcaccgttggtcattgccgaacagttcggcacgctcaatacactctatccggggcgaatcgatttggggctggggcgtgcgtcaggtagtgaccaacggacaatgatggcgctgcgtcgccatatgagcggcgatattgataatttcccccgcgatgtcgcggagctggtggactggtttgacgcccgcgatcccaatccgcatgtgcgcccggtaccaggctatggcgagaaaatccccgtgtggttgttaggctccagcctttacagcgcgcaactggcggcgcagcttggtctgccgttcgcgtttgcctcacacttcgcgccggatatgttgttccaggcgctgcatctttatcgcagcaacttcaaaccgtcggcacgactggaaaaaccatacgcgatggtgtgcatcaatattatcgccgccgacagcaaccgcgatgccgaattcctgtttacctcaatgcagcaagcctttgtgaagctgcgccgcggcgaaaccgggcaactgccgccaccgattcaaaatatggatcagttctggtcgccgtccgaacagtatggtgtgcagcaggcgctgagtatgtcgttggtaggtgataaagcgaaagtgcgtcatggcttgcagtcgatcctgcgcgaaaccgacgctgatgagattatggtcaacgggcagattttcgaccaccaggcgcggctgcattcgtttgagctggcgatggatgttaaggaagagttgttgggatag

SEQ ID NO: 458680 - DNA, 1245 bp, Shigella boydii
atggcaacactaaccaccacccaaacgtcaccgtcgctgcttggcggcgtggtgattatcggcggcaccattattggcgcagggatgttttctctgccagtggtcatgtccggggcgtggtttttctggtcaatggcggcgctgatctttacctggttctgtatgctgcattccggcttgatgattctggaagctaacctgaattaccgaatcggttcgagttttgacaccatcaccaaagatttgctgggcaaaggctggaacgtggtcaacggtatttccattgcctttgtgctctatatcctgacctatgcctatatttctgccagtggttcaattctgcatcacaccttcgcagagatgtcgctaaacgtcccggcacgggcggcgggttttggttttgcactgctggtagcgtttgtggtgtggttgagtactaaggccgtcagccgcatgacggcgattgtgctgggggcgaaagtcattaccttcttcctcacctttggcagcctgttggggcatgtgcagcctgcgacattgttcaacgttgcagaaagcaatgcatcttatgcgccgtatctgctgatgacattgccgttctgcctggcgtcgtttggttatcacggtaacgtgccaagcctgatgaagtattacggcaaagatccgaaaaccatcgtgaaatgcctggtgtacggtacgctgatggcactggcgctgtataccatctggttgctggcgacgatgggtaacatcccgcgtccggagtttatcggtattgcagagaagggcggtaatattgatgtgctggtacaggcattaagcggcgtgctgaacagccgtagcctggaccttctgctggtcgtgttctcaaactttgcggtagcgagttcgttccttggcgtaacgctgggtttgtttgactatctggcagatctgtttggtttcgatgactcggctatgggccgcttgaaaacagcattgttgacctttgcaccgcctgttgtgggtggtctgctgttcccgaatggattcctgtacgccattggttatgctggtttagcggctaccatctgggcggcaattgttccggcactgctggcccgcgcatcgcgtaaacgctttggcagcccgaaattccgcgtctggggcggcaagccgatgattacgctgattctggtgtttggcgtcggcaacgcattggtacatattttatcgagctttaatttactgccggtgtatcagtaa

SEQ ID NO: 458681 - DNA, 1890 bp, Shigella boydii
atggctgaattcgaaaccacttttgcagatctgggcctgaaggctcctatccttgaagcccttaacgatctgggttacgaaaaaccatctccaattcaggcagagtgtattccacatctgctgaatggccgcgacgttctgggtatggcccagacggggagcggaaaaactgcagcattctctttacctctgttgcagaatcttgatcctgagctgaaagcaccacagattctggtgctggcaccgacccgcgaactggcggtacaggttgctgaagcaatgacggatttctctaaacacatgcgcggcgtaaatgtggttgctctgtacggcggccagcgttatgacgtgcaattacgcgccctgcgtcaggggccgcagatcgttgtcggtactccgggccgtctgctggaccacctgaaacgtggcactctggacctctctaaactgagcggtctggttctggatgaagctgacgaaatgctgcgcatgggcttcatcgaagacgttgaaaccattatggcgcagatcccggaaggtcatcagaccgctctgttctctgcaaccatgccggaagcgattcgtcgcattacccgccgctttatgaaagagccgcaggaagtgcgcattcagtccagcgtgactacccgtcctgacatcagccagagctactggactgtctggggtatgcgcaaaaacgaagcactggtacgtttcctggaagcggaagattttgatgcggcgattatcttcgttcgtaccaaaaacgcgactctggaagtggctgaagctcttgagcgtaacggctacaacagcgccgcgctgaacggtgacatgaaccaggcgctgcgtgaacagacactggaacgcctgaaagatggtcgtctggacatcctgattgcgaccgacgttgcagcccgtggcctggacgttgagcgtatcagcctggtagttaactacgatatcccgatggattctgagtcttacgttcaccgtatcggtcgtaccggtcgtgcgggtcgtgctggccgcgcgctgctgttcgttgagaaccgcgagcgtcgtctgctgcgcaacattgaacgtactatgaagctgactattccggaagtagaactgccgaacgcagaactgctgggcaaacgccgtctggaaaaattcgccgctaaagtacagcagcagctggaaagcagcgatctggatcaataccgcgcactgctgagcaaaattcagccgactgcagaaggtgaagagctggatctcgaaactctggctgcggcactgctgaaaatggcacagggtgaacgtactctgatcgtaccgccagatgcgccgatgcgtccgaaacgtgaattccgtgaccgtgatgaccgtggtccgcgcgatcgtaacgaccgtggcccgcgtggtgaccgtgaagatcgtccgcgtcgtgaacgtcgtgatgttggcgatatgcagctgtaccgcattgaagtgggccgtgatgatggtgttgaagttcgtcatatcgttggtgcgattgctaacgaaggcgacatcagcagccgttacattggtaacatcaagctgtttgcttctcactccaccatcgaactgccgaaaggtatgccgggtgaagtgctgcaacactttacgcgcactcgcattctcaacaagccgatgaacatgcagttactgggcgatgcacagccgcatactggcggtgagcgtcgtggcggtggtcgtggtttcggtggcgaacgtcgtgaaggcggtcgtaacttcagcggtgaacgccgtgaaggtggccgtggtgatggtcgtcgttttagcggcgaacgtcgtgaaggccgcgctccgcgtcgtgatgactctaccggtcgtcgtcgtttcggtggtgatgcgtaa

SEQ ID NO: 458682 - DNA, 885 bp, Shigella boydii
atgaagccttttttgcgctggtgtttcgttgcgacagcacttacgcttgcaggatgcagtaatacttcctggcgtaaaagtgaagtcctcgcggtaccattgcaaccgactttacagcaggaagtgattctggcacgtatggaacaaatccttgccagtcgggctttaaccgatgacgaacgcgcacagcttttatatgagcgcggagtgttgtatgatagtctcggtctgagggcattagcgcgtaacgatttttcgcaagcgctggcaatccgaccggatatgcctgaagtgttcaattacttaggcatatatttaacgcaggcaggcaattttgatgctgcctatgaagcgtttgattctgtacttgagcttgatccaacttacaactacgcgcacttgaatcgcgggatcgcattatattacggcggtcgtgacaagttagcgcaagatgatctgctggcgttttatcaagacgatcccaatgatcctttccgtagtctgtggctttatctcgccgagcagaagctcgatgagaagcaggctaaagaagtgttgaaacagcacttcgaaaaatcggataaggaacagtggggatggaacattgtcgagttctacctgggcaacattagcgaacaaacgttaatggaaaggctcaaggcggacgcaacggataacacctcgctcgctgagcatctcagtgaaaccaacttctatttaggtaagtactacctaagtctgggggatttggacagcgccacggccctgttcaaactggcggttgtcaacaacgttcataactttgttgagcaccgatacgcattgttggaattatcgctcctgggccaggaccaagatgacctggcagaatcggaccagcaatag

SEQ ID NO: 458683 - DNA, 2136 bp, Shigella boydii
ttgcttaatccgatcgttcgtaaattccagtacgaccaacacaccgtgactctggaaaccggcatgatggctcgtcaggctactgccgctgttatggttagcatggatgacaccgcggtatttgttaccgttgttggccagaaaaaagccaaaccaggtcaggacttcttcccactgaccgttaactatcaggagcgtacctacgctgctggtcgtatcccgggtagcttcttccgtcgtgaaggtcgtccaagcgaaggcgaaaccctgatcgcgcgtctgattgaccgcccgattcgcccgctgttcccggaaggcttcgtcaacgaagttcaggttatcgccaccgtggtttctgttaacccgcaagttaacccggatatcgtcgcgatgattggtgcttccgcagcactgtctctgtctggtattccgttcaatggtccgattggtgctgctcgcgtaggttacatcaatgaccagtacgtactgaacccgactcaggacgagctgaaagagagcaaactggatctggttgttgccggtactgaagccgctgttctgatggttgaatctgaagctgaactgctgagcgaagaccagatgctgggcgcagtagtgttcggtcatgaacaacagcaggttgttattcagaacatcaatgaactggtgaaagaagccggtaaaccacgttgggactggcagccggagccggtaaacgaagcgctgaacgcgcgcgttgctgcactggctgaagctcgcctgagcgatgcttaccgcatcaccgacaaacaagagcgttatgcgcaggttgatgtcatcaaatctgaaaccatcgcgacgctgcttgctgaagacgaaaccctggacgaaaacgaactgggtgaaattctgcacgctatcgagaaaaacgttgttcgtagccgcgtactggcaggcgaaccgcgtatcgacggtcgtgaaaaagatatgatccgtggtctggatgtgcgtactggcgtgctgccgcgtactcacggttctgcgctgttcacccgtggtgaaacgcaggcgctggttaccgcaacgctgggtactgctcgtgacgcgcaggttcttgatgaactgatgggcgaacgtaccgataccttcctgttccactacaacttccctccgtactccgtaggcgaaaccggcatggtcggttctccgaagcgtcgtgaaattggtcacggtcgtctggcgaagcgcggcgtgctggcagtcatgccggatatggacaaattcccgtacaccgtacgtgttgtgtctgaaatcactgaatccaacggttcctcttctatggcttccgtgtgcggcgcgtctctggcgctgatggacgcaggtgtgccgatcaaagctgccgttgcgggtatcgcaatgggtctggtgaaagaaggcgacaactacgttgtactgtctgacattttgggcgacgaagatcacctgggcgatatggacttcaaagttgcgggttcccgcgagggtatctctgcattgcagatggatatcaaaattgaaggtatcaccaaagagatcatgcaggttgcgctgaaccaggctaaaggtgcgcgtctgcatatcctgggcgtaatggaacaggcgatcaacgcgccgcgtggcgatatctctgagttcgcaccgcgtatccataccatcaagatcaacccggacaagatcaaagacgttatcggtaaaggcggctctgttatccgtgccctgaccgacgaaactggcactaccatcgaaatcgaagatgacggtactgtgaagatcgcagcgaccgacggcgagaaagcgaaacatgctattcgtcgtatcgaagagatcactgcagaaatcgaagtgggccgcgtctacactggtaaagtgacccgtatcgttgactttggcgcatttgttgccatcggcggcggtaaagaaggtctggtccacatctctcaaatcgctgacaaacgcgttgagaaagtgaccgattacctgcagatgggtcaggaagtaccggtgaaagttctggaagttgatcgccagggccgtatccgtctgagcattaaagaagcgactgagcagtctcaacctgctgcagcaccggaagctccggctgctgaacagggcgagtaa

SEQ ID NO: 458684 - DNA, 270 bp, Shigella boydii; identical to SEQ ID NO: 1115

SEQ ID NO: 458685 - DNA, 945 bp, Shigella boydii
atgagtcgtcctcgtcgtcgcggtcgcgacattaacggcgttttgttgctggataaaccgcagggtatgtccagcaatgatgcgctgcaaaaagtgaaacggatttataacgccaaccgtgccgggcataccggtgctctggacccgctggcaactggcatgttgccaatttgcttcggggaagcgacgaagttttcccagtatctgctggactccgacaaacgctatcgggtcattgcgcgtcttggacagcgtaccgatacttctgatgccgacggacaaatcgttgaagaacgtccggtaacctttagcgcagagcaactggcggcggcgctggatactttccgtggcgatatcgaacagatcccttcgatgtattcagcactgaaatatcagggtaaaaaactgtacgaatatgcgcgtcagggcattgaagtaccgcgtgaagcgcgcccgattaccgtttatgaattgctgtttattcgccacgaaggcaatgagctggagctggaaattcactgctcaaaaggcacttatatccgcaccatcattgatgacctgggtgaaaaactcggttgtggcgcgcatgttatttacctgcgtcgtctggcggtaagtaaatatccggttgaacggatggtgaccctggaacatctgcgtgaactggtcgaacaagccgaacagcaggatattccggctacggagttacttgatccattactgatgccaatggacagtccagcttcggactacccggtggtgaatcttccgttaacgtcttctgtttacttcaaaaatggtaacccagttcgtacatccggtgcgccgctggaaggactggttcgcgttacagaaggtgagaacggcaagtttatcggtatgggcgaaattgacgatgaaggccgcgtcgcgcctcgtcgcctggtggttgaatacccggcgtaa

SEQ ID NO: 458686 - DNA, 402 bp, Shigella boydii
atggcgaaagaatttggtcgcccgcagcgcgtagcgcaggaaatgcaaaaagagatcgctctcatcctgcagcgtgaaattaaagatcctcgcctgggcatgatgaccaccgtttccggtgtcgaaatgtctcgcgacctggcgtatgccaaagtatatgtgacgttcctcaacgacaaagatgaagacgcggttaaagcgggcatcaaagcgttgcaagaagcttctggtttcatccgcagcctgctggggaaagcgatgcgcctgcgtatcgtgccggaactgaccttcttctacgacaactctctggttgaagggatgcgcatgtcaaacctggtgaccagcgtggtcaaacatgacgaagaacgtcgtgttaacccggacgacagcaaggaggactaa

SEQ ID NO: 458687 - DNA, 2673 bp, Shigella boydii
atgacagatgtaacgattaaaacgctggccgcagagcgacagacctccgtggaacgcctggtacagcaatttgctgatgcaggtatccggaagtctgctgacgactctgtgtccgcaaaagagaaacagactttgattgaccacctgaatcagaaaaattcaggcccggacaaattgacgctgcaacgtaaaacacgcagcacccttaacattcctggtaccggtggaaaaagcaaatcggtacaaatcgaagtccgcaagaaacgcacctttgtgaaacgcgatccgcaagaggctgaacgccttgcagcggaagagcaagcgcagcgtgaagcggaagagcaagcccgtcgtgaggcagaagaatcggctaaacgcgaggcgcaacaaaaagctgaacgtgaggccgcagaacaagctaagcgtgaagctgctgaacaagcgaaacgtgaagctgcggaaaaagacaaagtgagcaatcaacaagacgatatgactaaaaacgcccaggctgaaaaagcccgccgtgagcaggaagctgcagagctcaagcgtaaagctgaagaagaagcgcgtcgtaaactcgaagaagaagcacgtcgcgttgctgaagaagcacgtcgtatggcggaagaaaacaaatggactgataacgcggaaccgactgaagattccagcgattatcacgtcactacttctcaacatgctcgccaggcagaagacgaaagcgatcgtgaagtcgaaggcggccgtggccgtggtcgtaacgcgaaagcagcgcgtccgaagaaaggcaacaaacacgctgaatcaaaagctgatcgtgaagaagctcgcgcagcagtacgtggaggtaaaggcggaaaacgtaaaggttcttccctgcagcaaggcttccagaagccagctcaggccgttaaccgtgacgttgtgatcggcgaaaccatcaccgttggcgaactggcgaacaagatggcggttaaaggctctcaggtcatcaaagcgatgatgaaactgggcgcaatggcaaccatcaaccaggttatcgatcaggaaaccgcacagctggttgctgaagagatgggccacaaagttatcctgcgtcgtgaaaacgagctggaagaggcggtaatgagcgaccgtgacacgggggctgcggctgaaccgcgcgcgccggttgtgaccatcatgggtcacgttgaccacggtaaaacctctctgctggactacattcgttcaacgaaagtggcctctggcgaagcgggcggcattacccagcacattggtgcataccacgttgaaactgaaaacggcatgatcaccttcctggacaccccagggcacgccgcgtttacttcaatgcgtgctcgtggtgcgcaggcaacggacatcgtagtcctggttgttgctgccgacgacggcgtgatgccgcagaccatcgaagcaatccagcacgcgaaagcggcgcaggtaccggtggtggttgcagtgaacaagattgataaaccagaagccgatccggatcgtgttaagaacgaactctcccagtatggcatcctgccagaagagtggggcggtgaaagccagttcgtacacgtatctgcgaaagcgggtaccggcatcgatgaactgctggacgctatcctgctgcaggcggaagttctggagctgaaagcggtacgtaaaggtatggcgagcggtgcggttatcgaatccttcctcgataaaggtcgtggtccggttgctaccgttctggtacgtgaaggtactctgcacaagggcgatatcgttctgtgtggcttcgaatacggtcgtgttcgtgcgatgcgtaacgaactgggtcaggaagtgctggaagcgggtccgtccattccggtggaaatcctcggcctgtccggcgtaccggctgcgggtgatgaagttaccgttgtacgtgacgagaagaaagcgcgtgaagttgcactgtatcgtcagggtaaattccgcgaagttaaactggcgcgtcagcagaaatctaaactcgagaacatgttcgccaacatgaccgaaggcgaagttcacgaagtgaacatcgtcctgaaggcagacgtacagggttctgtggaagcgatctccgactccttgctgaaactgtctactgacgaagttaaagtgaagatcatcggttctggcgtaggtggtatcaccgaaaccgacgccaccctggctgcggcgtccaacgccatcctggttggcttcaacgtacgtgctgatgcctctgcacgtaaagtgattgaagcggaaagcctggatctgcgttactactccgtcatctataacctgattgacgaagtgaaagcgccgatgagcggtatgctgtctccggaactgaaacagcagattatcggtctggcggaagttcgtgacgtgttcaaatcgccgaaatttggtgccatcgcaggctgtatggttaccgaaggtgtggttaaacgtcacaacccgatccgcgttctgcgtgacaacgtggttatctacgaaggcgagctggagtccctgcgccgcttcaaagatgacgttaacgaagtccgtaacggtatggaatgtggtatcggcgttaagaactacaacgacgtccgcactggcgatgtgatcgaagtattcgaaatcatcgagatccaacgtaccatcgcttaa

SEQ ID NO: 458688 - DNA, 1488 bp, Shigella boydii
atgaacaaagaaattttggctgtagttgaagccgtatccaatgaaaaggcgctacctcgcgagaagattttcgaagcattggaaagcgcgctggcgacagcaacaaagaaaaaatatgaacaagagatcgacgtccgcgtacagatcgatcgcaaaagcggtgattttgacaccttccgtcgctggttagttgttgatgaagtcacccagccgaccaaggaaatcacccttgaagccgcacgttatgaagatgaaagcctgaacctgggcgattacgttgaagatcagattgagtctgttacctttgaccgtatcactacccagacggcaaaacaggttatcgtgcagaaagtgcgtgaagccgaacgtgcgatggtggttgatcagttccgtgaacacgaaggtgaaatcatcaccggcgtggtgaaaaaagtaaaccgcgacaacatctctctggagctgggcaacaatgctgaagccgtgatcctgcgcgaagatatgctgccgcgtgaaaacttccgccctggcgaccgcgttcgtggcgtgctctattccgttcgcccggaagcgcgtggcgcgcaactgttcgtcactcgttccaagccggaaatgctgatcgaactgttccgtattgaagtgccagaaatcggcgaagaagtgattgaaattaaagcagcggctcgcgatccgggttctcgtgcgaaaatcgcggtgaaaaccaacgataaacgtatcgatccggtaggtgcctgtgtaggtatgcgtggcgcgcgtgttcaggcggtttctactgaactgggcggcgagcgtatcgatatcgtcctgtgggatgataacccggcgcagtttgtgattaacgcaatggcaccggcagacgttgcttctatcgtggtggatgaagataaacacaccatggatatcgccgttgaagccggtaacctggcgcaggcgattggccgtaacggtcagaacgtgcgtctggcttcgcagctgagcggttgggaactcaacgtgatgaccgttgacgacctgcaggctaagcatcaggcggaagcgcacgcagcgatcgacaccttcaccaaatatctcgacatcgacgaagacttcgcgactgttctggtagaagaaggcttctcgacgctggaagaactggcctatgtgccgatgaaagagctgttggaaatcgaaggccttgatgagccgaccgttgaagcactgcgcgagcgtgctaaaaatgcactggccaccattgcacaggcccaggaagaaagcctcggtgataacaaaccggctgacgatctgctgaaccttgaagggatagatcgtgatttggcattcaaactggccgcccgtggcgtttgtacgctggaagatctcgccgaacagggcattgatgatctggctgatatcgaaggggtgaccgacgaaaaagccggagcactgattatggctgcccgtaatatttgctggttcggtgacgaagcgtaa

SEQ ID NO: 458689 - DNA, 453 bp, Shigella boydii
ttgtccacattagagcaaaaattaacagagatgattactgcgccagttgaggccctgggttttgaactggttggcatcgaatttattcgcggtcgcacatccacactgcgcatctatattgatagtgaagatggcatcaatgttgatgattgtgctgatgtgagccaccaggtaagtgctgtgctggatgttgaagatcccatcaccgttgcttataacctggaagtctcctcaccgggtctcgatcgcccactgttcacggctgaacactacgcccgttttgtcggagaagaggtgactctggttctccgtatggcggtacaaaaccgtcgtaaatggcagggcgttatcaaagcggtagacggtgaaatgatcacagttaccgtcgaaggtaaagatgaagtgttcgcgctgagtaatatccagaaggcgaacctggttccccacttttaa

SEQ ID NO: 458690 - DNA, 1344 bp, Shigella boydii
atgacgacgattctcaagcatctcccggtaggtcaacgtattggtatcgctttttctggcggtctggacaccagtgccgcactgctgtggatgcgacaaaagggagcggttccttatgcatatactgcaaacctaggccagccagacgaagaggattatgatgcgatccctcgtcgtgccatggaatacggcgcggagaacgcacgtctgatcgactgccgcaaacaactggtggccgaaggtattgccgctattcagtgtggcgcatttcataacaccaccggcggcctgacctatttcaacacgacgccgctgggccgcgccgtgactggtaccatgctggttgctgcgatgaaagaagatggcgtgaatatctggggtgacggtagcacctataaaggaaacgatatcgaacgtttctatcgttatggtctgctgaccaatgctgaactgcagatttacaaaccgtggcttgatactgactttattgatgaactgggcggccgtcatgagatgtctgaatttatgattgcctgcggtttcgactacaaaatgtctgtcgaaaaagcctactccacagactccaacatgcttggtgcaacgcatgaagcgaaggatctggaatacctcaactccagcgtcaaaatcgtcaacccgattatgggcgtgaaattctgggatgagagcgtgaagatcccggcagaagaagtcacagtacgctttgagcaaggtcatccggtggcgctgaacggtaaaacctttagcaacgacgtagaaatgatgctggaagctaaccgcatcggcggtcgtcacggcctgggcatgagcgaccagattgagaaccgtatcatcgaagcgaaaagccgtggtatttacgaagctccggggatggcactgctgcacattgcgtatgaacgtctgttgaccggtattcacaacgaagacaccattgagcagtatcacgcgcatggtcgtcagttgggccgtctactgtaccaggggcgttggtttgactcccaggcgctgatgctgcgtgactctctgcaacgctgggttgccagccagatcactggtgaagttaccctggagctgcgccgtgggaacgattattcaatcctgaataccgtctcagagaacctgacctacaagccagagcgtctgacgatggaaaaaggcgactcggtgttctcgccagatgatcgtattggtcaattgaccatgcgtaatctggatatcactgatacccgagagaaactttttggttatgccaaaactggcctgctctcctcctctgccacttcaggcgtgccgcaggtggagaatatggaaaacaaaggccagtaa

SEQ ID NO: 458691 - DNA, 582 bp, Shigella boydii
atgaatactctccctgaacattcatgtgacgtgttgattattggtagcggcgcagccggactttcactggcgctacgcctggctgaccagcatcaggtcatcgttctaagtaaaggcccggtaacggaaggttcaacattttatgcccagggcggtattgccgccgtgtttgatgaaactgacagcattgactcgcatgtggaagacacattgattgccggggctggtatttgcgatcgccatgcagttgaatttgtcgccagcaatgctcgttcctgtgtgcaatggttaattgaccagggggttttgtttgatacccacgttcaaccgaatggcgaagaaagctaccatctgacccgtgaaggtggacatagtcaccgtcgtattcttcatgccgccgacgccaccggtagagaagtacaatccacgctggtgagcaaggcgcagaaccatccgaatattcgtgtgctggagcgcagcaacgcagttgatctgattgtctctgacaaaattggcctgccgggcacgcgacgggtgaggtgtactggcaatagcggacactaccatttgttctttttttaa

SEQ ID NO: 458692 - DNA, 576 bp, Shigella boydii
atgagcgagcagttaacggaccaggtcctggttgaacgggtccagaagggagatcagaaagcctttaacttactggtagtgcgctatcagcataaagtggcgagtctggtttcccgctatgtgctgtcgggtgatgttcccgatgtggtacaagaagcttttattaaagcctatcgtgcgctggattcgttccggggagatagcgctttttatacatggctgtatcggattgctgtaaatacagcgaaaaattacctggttgctcaggggcgtcgtccaccttccagtgatgtggatgccattgaagctgaaaacttcgaaagtggcggcgcgttgaaagaaatttcgaaccctgagaacttaatgttgtcagaagaactgagacagatagttttccgaactattgagtccctcccggaagatttgcgcatggcaataaccttgcgggagctggatggcctgagctatgaagagatagccgctatcatggattgtccggtaggtacggtgcgttcacgtatcttccgagcgagggaagctattgataacaaagttcaaccgcttatcaggcgttga

SEQ ID NO: 458693 - DNA, 651 bp, Shigella boydii
atgcagaaagaacaactttccgctttaatggatggcgaaacgctggatagtgagctgcttaacgaactggctcataacccagaaatgcagaaaacctgggaaagctatcacttaatccgtgactcaatgcggggtgatactcccgaggtgctccatttcgatatctcttcacgcgtgatggccgccattgaagaagagccagtacgtcaaccggcgacattgatcccggaagcccagcctgcgccgcatcaatggcagaaaatgccattctggcagaaagtacgtccgtgggcggcacagcttacccaaatgggcgtagcagcatgcgtatcgcttgcagttatcgttggcgtccagcactataatggacaatctgaaacgtcccagcagcccgaaacgccggtatttaatacactgccgatgatgggtaaagccagcccggtaagcctgggagtaccttctgaagcgaccgcaaacaatggtcaacagcagcaggtacaggagcagcgtcgtcgcattaatgcaatgttgcaggattacgaactgcaacgccgactccactctgaacagcttcagtttgagcaggcgcaaacccagcaagccgctgtacaggtgccaggaattcaaactttaggaacgcaatcgcagtaa

SEQ ID NO: 458694 - DNA, 957 bp, Shigella boydii
atgaagcaactttggtttgccatgtcattagtgacaggtagcctgttattctctgctaacgcctcggccactcccgcgtccggggcgttattacagcagatgaacctggccagtcagtcactgaattacgagctgtcattcatcagcatcaataaacagggtgttgagtctctgcgttatcgacatgcacgcctcgataaccgtcctcttgcacaattgttgcaaatggatggcccgcgccgggaagtggtacagcgcggcgatgaaatcagctattttgaaccgggacttgaaccgttcacgcttaatggcgattacattgttgattctctgccatcgctcatctataccgatttcaaacgcctttctccttactacgactttatctccgtcgggcgcacgcgtattgctgatcgtctttgcgaagtcattcgcgtggttgcccgagatggtacacgctacagctacatcgtgtggatggacaccgaatcgaaattaccgatgcgggttgatctccttgatcgcgatggtgaaacgctggaacaatttcgcgtgattgcttttaacgtcaatcaggatatcagcagcagtatgcagacgctggcgaaggcaaatttgccgccgttgctttctgttcctgtaggtgaaaaagctaaattcagctggacgccaacctggttgccacagggttttagcgaagtttccagtagtcgacgtccgctaccgacgatggacaacatgcctatcgaatcacgtctctattctgacggattattcagcttctcggtaaacgttaaccgcgctacgccatcgagcaccgatcagatgttgcgcaccggacgcagaaccgtcagtacaagcgtacgtgataacgccgaaatcaccattgtcggtgaactgccgccgcaaacggcgaaacgcattgccgagaatattaagttcggggcagcgcaatga

SEQ ID NO: 458695 - DNA, 480 bp, Shigella boydii
atgatcaaagagtgggctaccgtcgtctcctggcaaaacgggcaggcgctggtcagttgtgatgttaaagcttcatgcagcagctgcgcttcacgcgccggttgcggtagccgcgtgttgaataaacttggcccgcaaaccacgcataccattgtcgtaccctgtgatgaaccgttagtgccggggcaaaaagtggaattggggatcgccgaaggcagcctgcttagctccgcattactggtttatatgtcgccgctggtgggattattcctcatcgcttcgctatttcagctactctttgcttctgacgtcgcagcattatgtggtgcggtcctcggcggtattggcgggttcctgattgcgcgcggctactcgcgtaagtttgctgcccgggcagaatggcaaccgatcatcttaagcgtggcattgccgcctggccttgtgcgatttgaaacatcttcggaagacgcgagccagtga

SEQ ID NO: 458696 - DNA, 1800 bp, Shigella boydii
atgaagaatatacgtaacttttcgatcatagctcacattgaccacggtaaatcgacgctgtctgaccgtattatccagatctgcggtggcctgtctgaccgtgaaatggaggcgcaggttctcgattccatggatcttgagcgtgagcgtggcattaccatcaaagcgcaaagcgtgacgctggactacaaagcgtctgacggcgaaacctatcagcttaactttatcgacaccccgggccacgtagacttctcctatgaagtttcccgttcgctggctgcctgtgaaggtgcattgctggtggtcgacgccgggcagggcgtggaagcgcaaaccctggcaaactgctacaccgccatggaaatggatctcgaagtggtgccagtactgaacaagattgacctgccggcagccgatcctgaacgcgtggcggaagaaattgaagatatcgtcggcatcgacgccactgacgcggtgcgctgttcagcgaaaaccggcgttggcgtgcaggacgttctcgaacgtctggtgcgcgacattccgccgccggaaggcgatccggaaggcccgttgcaggcactaattatcgactcatggttcgacaactacctgggcgttgtttcacttatccgtattaaaaacggcaccctgcgtaagggcgacaaagtgaaagtcatgagtaccgggcagacctataacgccgaccgtctgggcatcttcacgccgaaacaggttgaccgcactgaactgaaatgtggcgaagtaggctggctggtatgtgcgattaaagatatccacggcgctccagtcggcgataccttaacgctggcgcgtaatccggcagaaaaggcgctgcctggctttaagaaagtcaaaccgcaggtatacgccggtctgttcccggtaagttccgacgactatgaagccttccgtgacgcgctgggtaaactcagcctgaatgatgcctcactgttctatgagccggaaagctccagcgcgctgggctttggtttccgctgcggcttccttggcctgctgcacatggagatcatccaggaacgtctggaacgtgaatacgatctggatctgatcaccactgcgccgaccgtagtgtatgaagttgaaaccacgtcaagggaagttatctacgtcgacagcccatccaagctgcctgcggtaaataacatttacgaactgcgcgagccgattgcagagtgtcacatgctgctgccgcaggcatatctcggcaacgttattacgctgtgcgtagaaaaacgcggcgtgcagaccaatatggtttaccacggtaatcaggtggcgctgacgtacgagatcccgatggcggaagtggtgctcgacttcttcgatcgcctgaaatctacctcgcgtggttatgcgtctctggattacaacttcaaacgcttccaggcgtccgacatggtacgtgtagacgtattaatcaacggtgaacgtgttgatgcgttggcgctgatcacccaccgtgataattcgcaaaaccgcggtcgcgagttggtggagaagatgaaagatctgatcccacgccagcagtttgatatcgccattcaggcagcgattggtacgcacattattgcgcgatccaccgtgaaacagctgcgtaaaaacgtactggctaaatgttatggcggcgatatcagccgtaagaaaaagctgctgcagaagcagaaagaaggtaagaaacgcatgaagcagatcggtaacgtcgagctgccgcaggaagcgttcctcgccattctgcacgtcggcaaagacaacaaataa

SEQ ID NO: 458697 - DNA, 975 bp, Shigella boydii
atggcgaatatgtttgccctgattctggtgattgccacactggtgacgggcattttatggtgcgtggataaattctttttcgcacctaaacggcgggaacgtcaggcagcggcgcaggcggctgccggtgactcactggataaagcaaccctgaaaaaggttgcgccgaagcctggctggctggaaaccggtgcttctgtttttccggtgctggctatcgtattgattgtacgttcgtttatttatgaaccgttccagatcccgtcaggttcgatgatgccgactctgttaatcggtgattttattctggtagagaagtttgcttatggcattaaagatcctatctaccagaaaacgctgatcgaaaccggtcatccgaaacgcggcgatatcgtggtctttaaatatccggaagatccaaagcttgattacatcaagcgcgcggtgggtttaccgggcgataaagtcacttacgatccggtctcaaaagagctgacgattcaaccgggatgcagttccggccaggcgtgtgaaaacgcgctaccggtcacctactccaacgtggaaccgagcgatttcgttcagaccttctcacgccgtaatggtggggaagcgaccagcggattctttgaagtgccgaaaaacgaaaccaaagaaaatggaattcgtctttccgagcgtaaagagacactgggtgatgtgacgcaccgaattctgacagtgccgattgcgcaggaccaggtggggatgtattaccagcagccagggcaacaactggcaacctggattgttccgccgggacaatacttcatgatgggcgacaaccgcgacaacagcgcggacagccgttactggggttttgtgcctgaagcgaatctggtcggtcgggcaacggctatctggatgagtttcgataagcaagaaggcgaatggccgacaggtgtgcgcttaagtcgcattggcggcatccattaa

SEQ ID NO: 458698 - DNA, 681 bp, Shigella boydii
atgaaccccatcgtaattaatcggcttcaacggaagctgggctacacttttaatcatcaggaactgttgcagcaggcattaactcatcgtagtgccagcagcaaacataacgagcgtttagaatttttaggcgactctattctgagctacgttatcgccaatgcgctttatcaccgtttccctcgtgtggatgaaggcgatatgagccggatgcgcgccacgctggtccgtggcaatacgctggcggaactggcgcgcgaatttgagttaggcgagtgcttacgtttagggccaggtgaacttaaaagcggtggatttcgtcgtgagtcaattctcgccgataccgtcgaagcattaattggtggcgtattcctcgacagtgatattcaaaccgtcgagaaattaatcctcaactggtatcaaactcgtttggacgaaattagcccaggcgataaacaaaaagatccgaaaacgcgcttgcaagaatatttgcagggtcgccatctgccgctgccgacttatctggtagtccaggtacgtggcgaagcgcacgatcaggaatttactatccactgccaggtcagcggcctgagtgaaccggtggttggcacaggttcaagccgtcgtaaggctgagcaggctgccgccgaacaggcgttgaaaaaactggagctggaatga

SEQ ID NO: 458699 - DNA, 906 bp, Shigella boydii
atgagcatcgataaaagttactgcggatttattgccatcgtcggacgtccgaacgttggcaaatccacattgttgaacaaactgctggggcagaagatctccatcacctcccgcaaagcgcaaacaactcgtcaccgcattgtggggatccatactgaaggcgcgtatcaggcgatctacgttgatacccctggcctgcatatggaagaaaaacgcgctattaaccgcctgatgaacaaagcggcgagcagctctattggcgacgttgagctggtgatttttgtcgttgaaggcacccgctggacgccggacgacgaaatggtgctcaacaaactgcgcgatggcaaagcgccggtgatcctcgcggtgaacaaagtggataacgtgcaggaaaaagccgatctgctgccgcacttacagttcctggcaagtcagatgaacttcctcgatatcgtgccgatctctgctgaaaccgggctgaatgtcgacactatcgcagcaatcgtgcgtaagcatctgcctgaagcgacccatcacttcccggaagattacatcaccgatcgctcacagcgttttatggcgtctgaaatcatccgcgaaaaactgatgcgtttcctcggcgctgaactgccgtactccgtgaccgtggagatcgaacgtttcgtctctaacgaacgcggtggttatgacatcaatggtttgattctcgttgagcgtgaagggcagaagaagatggttattggcaacaaaggggccaagatcaaaaccatcgggattgaagcgcgtaaagacatgcaggaaatgttcgaagcgcctgtccaccttgaactgtgggtaaaagtgaaatccggttgggccgacgacgaacgcgcactgcgcagtctcggttacgttgacgatctttaa

SEQ ID NO: 458700 - DNA, 729 bp, Shigella boydii
atggaaggctggcagcgcgcatttgtcctgcatagtcgcccgtggagcgaaaccagcctgatgctggacgtcttcacggaggaatcgggtcgcgtgcgtctggttgccaaaggcgcacgctctaaacgctctactctgaaaggtgcattacagcctttcacccctctcttgctacgtttcggcgggcgtggcgaagtcaaaacgctgcgcagtgctgaagctgtctcgctggcgctgccattaagcggtatcacgctttacagcggtctgtacatcaacgaacttctctcccgcgtactggaatacgagacgcgcttctctgaactctttttcgattatttgcactgcattcagtctcttgcaggtgccactggtacgccagaacccgcgctgcgccgctttgaactggcactgctcgggcatctgggctatggcgtcaattttacctattgcgcgggtagcggcgagccggtagatgacaccatgacgtatcgttatcgcgaagaaaaagggtttatcgcaagcgtcgttatcgacaataaaacgttcaccggaaggcagttaaaagcgttaaacgcgcgggaatttcctgacgcagacacactacgcgccgcgaaacgctttacccgcatggcgcttaagccgtatcttggcggtaaaccattaaagagcagggaactgttccggcagtttatgcctaagcgaacggtgaaaacacattatgaatga

SEQ ID NO: 458701 - DNA, 732 bp, Shigella boydii
atggctgaattactgttaggcgtcaacattgaccatattgcaacgctgcgtaacgcacgcggtactgcttacccggatccggtgcaggcggcgtttattgccgagcaggcgggagcggacggcattaccgtgcatttacgtgaagatcgccgccacattactgaccgcgatgtgcgcatcctgcggcagacgctggatacccgaatgaatctggagatggcagtgaccgaagagatgctggcgatcgccgttgagacgaagccacatttttgctgcctggtaccggaaaagcgtcaggaagtaacaaccgaaggcggcctggacgttgcagggcagcgtgaaaaaatgcgcgatgcctgcaaacgtctgacagatgccgggattcaggtttctctctttatcgacgccgatgaagagcagatcaaagctgcggcagaggttggcgcaccgtttatcgagatccacaccggttgctatgctgatgccaaaactgacgccgaacaggcgcaagagctggtgcgtatcgccaaagccgcgacctttgccgctagtctcggtctgaaagttaacgccggacacggtctgacctatcacaacgtgaaagccattgccgccatccctgagatgcatgaactgaatatcggtcatgccattattggccgtgcagtgatgaccggactgaaagatgcggtggcagaaatgaagcgtctgatgctggaagcgcgtggctaa

SEQ ID NO: 458702 - DNA, 381 bp, Shigella boydii
atggcaatattaggtttaggcacggatatcgtagagatcgctcgcatagaagcagtgatcgcccgatccggtgagcgcctggcacgccgcgtattaagcgataacgaatgggcaatctggaaaacgcaccaccagccggtgcgttttctggcgaagcgttttgctgtgaaagaagccgcagcaaaagcgtttggcaccgggatccgcaatggtctggcgtttaatcaatttgaagtattcaatgatgagctcggcaaaccacggctacggctatggggggaggcattaaaactggcggaaaagctcggcgttgtaaatatgcatgtaacgctggcagatgaacgccactatgcttgtgccacggtaattattgaaagttaa

SEQ ID NO: 458703 - DNA, 261 bp, Shigella boydii
atggcgttgttaatcactaaaaaatgcatcaattgtgatatgtgtgaacccgaatgcccgaatgaggcgatttcaatgggagatcatatctacgagattaacagcgataagtgtaccgaatgcgtagggcactacgagacaccaacctgccagaaggtgtgcccgatccccaatactattgtgaaagatccggcgcatgtcgagacagaagaacagttgtgggataaatttgtgctgatgcaccacgcggataaaatttaa

SEQ ID NO: 458704 - DNA, 849 bp, Shigella boydii
atgaacggcttacttcgtatccgtcagcgttaccaggggcttgcccagagtgataaaaaactggcggattatctgctgctacaacctgatacggcgcgccatttaagctctcagcaactggccaacgaagccggagtcagtcagtccagcgtcgtgaagttcgcgcaaaaactcggctataaaggttttccggcgcttaagttggcgttgagtgaagcgctggcaagccagccggaatcgccctccgtgcccattcataaccaaatccgcggtgatgatccgttacggctggtcggcgaaaaactgattaaagaaaatactgccgctatgtacgcaacgctaaacgttaatagtgaagagaaactgcatgaatgcgtaacaatgttgcgctctgcgcggcggataattctgaccggtattggcgcttcgggtctggtggcgcaaaactttgcctggaagctgatgaagattggcttcaatgctgccgcagtgcgcgatatgcatgcgctactcgcaacagtacaggcgtcgtcccctgacgatctgttattagccatttcctacaccggtgtacgacgcgagttaaacctggcggcagatgagatgctgcgagtgggcggaaaagtgctggcgattaccggctttactccgaatgccctgcaacagcgtgcttctcattgcctgtataccattgccgaagaacaagcgacaaacagtgcttcaatctctgcttgtcacgctcagggaatgttaacggatttgctgttcattgcgctgattcagcaggatctggaactggcaccagaacgtattcgtcatagtgaagcgctggtgaaaaaactggtctga

SEQ ID NO: 458705 - DNA, 636 bp, Shigella boydii
ttggcaactcacgagcgtcgtgtggtgttttttgacttagatggaacattgcatcagcaggatatgttcggcagttttctgcgctatttactacgtcgccaaccgctgaatgcgttacttgtcctgccgttgttaccgattatagccattgcgttattgataaaaggtcgtgcggcacgctggccgatgagtctgcttctgtgggggtgcacttttggtcacagcgaagcacgtttacagacgttgcaggccgatttcgtgcgctggtttcgcgacaatgttaccgcctttccgctggttcaggagcgattaaccacctacctgttaagttccgatgctgatatctggttgattaccggctctccgcagccgctggttgaagcggtttatttcgatacgccctggctgccgcgggttaatcttatcgccagccaaattcagcgtggctatggtggttgggtattgacgatgcgttgtctgggacatgaaaaggtcgcacaactggagcgcaaaatcggcactccgctgcggctgtacagtggctatagcgacagtaatcaggacaatccgctgctttatttctgtcagcatcgttggcgagtaaccccgcgcggtgaactccagcaactggaatag

SEQ ID NO: 458706 - DNA, 504 bp, Shigella boydii
ttgtctgaagtcgaatttagccacgaatactggatgcgtcacgcgctgacgctggcgaaacgtgcctgggatgagcgggaagtgccggtcggcgcggtattagtgcataacaatcgggtaatcggcgaaggctggaaccgcccgattggtcgccatgatcccaccgcacatgcagaaatcatggccctgcggcagggtggtctggtgatgcaaaattatcgtctgatcgacgccacgttgtatgtcacgcttgaaccatgtgtaatgtgtgccggagcgatgatccacagtcgcattggtcgcgtggtctttggtgcgcgtgacgcgaaaactggcgctgcgggatctttaatggatgtgctgcatcatccgggtatgaatcaccgagtggaaattacggaaggaatactggcggatgagtgcgcggcgttgctcagtgacttctttcgcatgcgccgccaggaaattaaagcgcagaaaaaagcgcaatcctcgacggattaa

SEQ ID NO: 458707 - DNA, 1557 bp, Shigella boydii
ttgaaaaaattaaagattaattatctgttcatcggcattctggcactgctgctcgcggtcgctctctggccatccattccctggtttggtaaagccgacaaccgtatcgccgccattcaagcgcggggagagttgcgtgtgagcaccattcatactcccctgacttataacgaaatcaacgggaaaccttttggcctggattacgaactggcgaaacagtttgccgattacctcggcgtaaaactgaaagtgaccgtgcggcagaatatcagccagctgtttgacgaccttgataatggtaacgccgacctgctggcggcaggactggtctataacagtgagcgggtaaaaaattatcagcctggccctacctattattccgtgtcacaacaactggtttataaagtgggtcagtatcgcccacgtacgctgtgcaacctgacggcggagcaactcaccgttgcaccgggtcatgtggtggttaacgatctccagaccctgaaagaaacaaaattcccggaattaagctggaaggtagacgacaaaaaaggctctgcggaattaatggaagatgtcatcgaaggaaaactcgattacaccattgctgattctgtcgccatcagcctgtttcagcgcgttcacccggagctcgccgtagcgctcgatatcaccgatgaacaaccggtgacttggtttagcccgttagatggcgataataccctttccgccgccctgctcgacttcttcaacgaaatgaatgaagacggtacgctggcacgcattgaagagaaatacctggggcatggcgatgattttgattacgtcgatacgcgcacatttttacgcgccgtcgatgcggtactgccgcagttaaagcccctgtttgagaaatacgccgaagaaattgactggcgtttgctggccgctattgcttatcaggaatcgcactgggatgcacaggccacttcaccgacgggtgtgcgcggcatgatgatgttaaccaaaaataccgcgcaaagcctcggcattacggatcgtaccgatgccgaacagagcatcagcggtggcgtgcgttatttgcaggatatgatgagtaaagtgccggaaagtgtgccggagaacgagcggatctggtttgccctcgctgcgtacaatatgggctatgcgcatatgctggatgcccgcgccctgacggcaaaaaccaaagggaatcctgacagttgggctgacgtaaaacagcgtctgcctttacttagccagaaaccctattacagcaagctgacttacggctacgctcgtggacatgaagcctacgcttatgtcgaaaatattcgtaagtatcaaattagcctggtgggttatctgcaagagaaagagaagcaggctacagaagcggcgatgcaactggcgcaggattatccggcggtatcgcctacggagttgggcaaagagaaatttccttttctctcgtttctttcccagtcgtcatcaaactatttgacccattctccctctctgctgttttccaggaaagggagtgaagagaaacaaaattaa

SEQ ID NO: 458708 - DNA, 3888 bp, Shigella boydii
atgatggaaattctgcgtggttcgcctgcactgtcggcattccgaatcaacaaactgctggcacgttttcaggctgccaggctcccggttcacaatatttacgccgagtatgtccattttgctgacctcaatgcgccgttaaacgatgatgagcacgcacaacttgaacgcctgctgaaatatggtccggcactcgccagccacgccccgcaaggcaaactcctgctggtgaccccgcgtcctggcaccatctctccctggtcttcgaaagcgaccgatattgcccataactgcgggctacaacaggtaaaccgccttgagcgcggcgttgcttactatatagaagccggtacgctgaccaatgaacaatggcagcaggttaccgctgaactgcacgaccgcatgatggaaactgtcttttttgatttagatgatgcagagcagttgtttgcccaccatcaaccgactccggtcacaagcgttgatttgctggggcagggccgtcaggcgctgatcgacgctaacctgcgtcttggcctggctctggcggaagatgaaattgactatctgcaggatgctttcacaaagcttggtcgtaacccgaacgacatcgagctgtatatgttcgctcaggcgaactctgagcactgccgccacaaaatttttaacgccgactggattatcgacggtgaacaacagccgaaatcgctgttcaggatgatcaaaaatactttcgaaaccacgccagatcacgttctctctgcttataaagataacgccgccgtaatggaaggttctgaagtgggccgctactttgctgaccacgaaacgggccgctatgatttccatcaggaaccggcgcatattctgatgaaagtcgaaactcacaaccacccgacggcgatttctccgtggccgggcgcggcgaccggttccggcggtgaaatccgcgatgaaggtgccaccgggcgcggcgcgaagccgaaagcgggtttggttggtttctccgtttccaacctgcgaattcttggcttcgaacagccgtgggaagaagatttcggtaagcctgagcgcattgtcaccgcgctggacatcatgaccgaaggcccgctgggcggtgcggcgtttaacaacgaatttggtcgtccggcactgaacggctacttccgtacttatgaagaaaaagtgaacagccacaacggcgaagagctgcgcggttatcacaaaccgatcatgctggcgggcgggatcggcaacattcgcgccgatcacgtacaaaaaggcgagatcaacgttggcgcgaagctggtcgttctcggcggcccggcaatgaacatcggtcttggcggcggcgcggcgtcttccatggcgtctggtcagtctgatgccgacctcgactttgcttccgtacagcgcgacaacccggagatggagcgtcgctgccaggaagtgattgaccgttgctggcagcttggtgatgccaacccaatactgtttatccacgacgttggcgcaggcggtctttctaacgctatgccggaactggtgagcgacggcgggcgtggcggtaaatttgaactgcgcgacattctgagcgacgagccaggcatgagcccgctggaaatctggtgtaacgaatcccaggaacgctacgtgctggcggttgctgccgatcaattaccgctgtttgacgaactgtgtaagcgtgagcgcgcaccctacgcggtgattggtgaagcgaccgaagaactgcatctttctctacacgatcgtcattttgataatcagccgatcgatctgccgctggacgtcctacttggtaaaacgccgaagatgacccgcgatgtacaaacgctgaaagcgaagggcgatgcgctggtccgtgaagggatcaccattgcagacgcggtgaaacgcatactgcatctgccgaccgtggcggagaaaactttcctggtgaccatcggtgaccgcagcgtaactggcatggtagcgcgcgatcagatggtgggtccgtggcaggtgccggtcgctaactgcgcggtcactaccgccagcctcgacagctactacggtgaagcgatggcgattggcgagcgtgcgccggttgcgctgctggatttcgccgcctctgcccgtctggcggtcggtgaagcgttaaccaatattgccgcaacacagattggcgatatcaaacgcattaaactttccgccaactggatggcggcggcaggccaccctggtgaagatgcgggcctgtatgaagccgttaaagccgtgggcgaagagctttgtccggcgctgggcctgacgatcccggtgggtaaagactctatgtcgatgaaaacccgctggcaggaaggtaacgaagagcgcgaaatgacgtcgccgctgtcgctggtgatttctgcatttgcccgcgtggaagatgtgcgtcacaccatcacgccacagctttctaccgaagataacgcactattgctgattgatttgggcaaaggcaataacgcgctgggcgcaacggcgctggcgcaggtttatcgtcagcttggcgacaaaccggcagatgtacgcgacgtcgcgcaactgaaaggcttctatgacgcgattcaggcgctggttgcacagcgtaagctgctcgcataccacgaccgctctgatggcggcctgctggtaacgctggcggaaatggcctttgctggtcattgcggcattaacgcggatattgcctctctgggcgacgatcgcctggcggcgttgtttaacgaagaactgggtgcggtgattcaggttcgtgccgctgaccgtgaagcggtcgagtccgtactggcacagcatgggcttgctgattgtgtccattatgtagggcaggcggtttccggtgaccgttttgtgattaccgccaacgggcagactgtattcagcgaaagccgcaccacgttgcgtgtctggtgggcagaaactacctggcagatgcagcgcctgcgtgacaacccggagtgtgccgatcaggagcatcaggcgaaatctaacgacgccgatccgggcctgaatgtaaaactgtcgttcgatatcaacgaagatgtggcagcaccgtatattgccactggcgcacgtccgaaagttgccgtactgcgtgagcagggcgtgaactcgcatgttgaaatggcggcagctttccaccgtgcaggctttgatgctatcgacgtgcatatgagtgacctgctgaccggacgcacgggcctggaagatttccacgccctggtcgcgtgcggtggtttctcctacggtgatgtgctgggtgccggtgaaggttgggcgaagtcaatcctgttcaatgaccgtgtacgcgatgagtttgcaaccttcttccaccgtccgcaaacgctggcgctgggggtatgtaacggttgccagatgatgtctaacctgcgcgaactgatcccaggtagtgagttgtggccacgttttgtgcgcaatacctccgatcgctttgaagcgcgtttcagcctggtcgaagtaacccaaagcccgtctctgctgttgcaggggatggtgggctcgcaaatgccgattgctgtctctcatggtgaagggcgcgtggaagtgcgtgatgcggcgcatctggcggcactggaaagcaaagggctggtggcactgcgctatgtcgataacttcggcaaagtcactgaaacctacccggctaacccgaacggttcaccgaacggtattacggcagtcacgactgaaagtggtcgagtcaccattatgatgccgcacccggaacgtgttttccgtactgtcagcaactcctggcatccggaaaactggggcgaggatggcccatggatgcgcattttccgcaatgcgcgtaagcagttggggtaa

SEQ ID NO: 458709 - DNA, 1383 bp, Shigella boydii
atgctggcatttttgctaattctactacccctgttggtgctggcatggcaagcctggcaaagcctgaatgcgcttagcgatcaggcggcgctggttaaccgcactacgcttattgatgcccggcgtagtgaagcgatgaccaacgcggcgctggagatggagcgtagctaccgtcagtattgcgtgctggacgaccctacgcttgcgaaggtttatcaaagccagcgcaagcgttacagcgaaatgctcgatgcccacgcaggcgtactgccagacgataaactttaccaggcattgcgtcaggatttgaacaatctggcccaacttcagtgtaacaacagtggtcccgatgctgccgccgccgcgcgtcttgaagcctttgccagtgccaataccgaaatggtgcaggccacgcgcacagtggtgttctctcgtgggcagcaacttcagcgtgaaatcgccgaacgtgggcaatattttggttggcaatcgctggtgctatttctggtgagtctggtgatggtgctacttttcacgcggatgattatcgggccggtgaaaaatatcgagcgcatgatcaaccgtctgggggaagggcgttctctgggcaatagcgtttcgttcagtggaccgagcgagttacgctcggttgggcaacgtattctttggttaagtgagcgcctgtcatggctggaatcccaacgccatcaatttttaagacatttatctcatgaattaaaaacgccactggcgagtatgcgcgagggcactgaattactggctgaccaggttgtcgggccgcttacgccagagcaaaaagaggtggtgagcattcttgatagcagcagccgcaatttgcaaaaactgatcgaacaactgcttgattacaaccgtaaacaggcggacagtgcggtggaactggagaatgttgaattagcaccgctggtggagacagtggtttctgctcatagcctgcccgcacgggctaaaatgatgcataccgacgtcgatctcaaagcaacagcttgcctggcggagccaatgctgctgatgagcgtactggataatctttactccaatgcggtgcactacggggctgaatccggtaacatttgccttcgcagcagttcacatggtgcgcgggtttatattgatgtcatcaatacaggcacgcccattccgcaagaggaacgcgccatgatcttcgaacccttttttcagggaagccaccagcgaaaaggggcggtgaagggcagcggtctgggattaagcattgccagggattgtattcgccgtatgcaaggggaactgtatctggtcgacgagagcgggcaagacgtttgtttccgcattgaattaccgtcgtcgaaaaacacgaaataa

SEQ ID NO: 458710 - DNA, 714 bp, Shigella boydii
atgcgacacatttttcaacgattattgccccgacggctgtggctggcagggctgccatgtctggcattgctgggttgcgtgcagaatcacaataagccagccattgatacgccagcagaagaaaaaattccggtttatcaactggctgactatctttctactgaatgtagcgacatctgggcgctgcaaggtaaatcaaccgaaaccaatccgctttactggctgcgggcgatggattgtgctgatcgtttaatgcctgcgcagtcgcgtcagcaagctcgccaatatgacgacggcagctggcaaaatacctttaaacaagggattttgctcgccgacgccaaaattacgccgtatgagcgccgccagctggtcgcgcgtattgaagcgttaagtaccgagatcccggcacaggttcgcccactgtatcaactctggcgcgacggtcaggcgctgcaactgcaactggcggaagagcgccaacgttacagtaaactccagcagtccagcgacagcgagctggatacattgcgccagcaacatcacgttctacagcagcaactggaactcaccacccgcaagctggaaaacctgactgatattgaacgccagctctcgacccgcaaaccggctggaaatttctcgccggatacgccgcacgagagtgaaaagcccgcgccatccacccatgaggtcactcctgatgagccataa

SEQ ID NO: 458711 - DNA, 1335 bp, Shigella boydii
atgagccataaacctgcgcatttattattggtcgatgacgatccgggattgctgaaactgcttggcctgcgcctgaccagcgaaggctacagtgtggtcacggcggaaagtggcgctgaaggattacgggtactgaatcgcgaaaaagtagatttagttatcagcgacctgcggatggatgaaatggacggtatgcagctatttgctgaaatccagaaagtgcagccgggaatgccagtaattattcttactgcgcatggttctatccccgatgccgttgctgcaacacagcagggcgtttttagtttcctcaccaagcctgtcgacaaagacgcgctatatcaggcaattgacgatgcgctggagcaatccgcgccagccaccgatgaacgctggcgcgaggcaattgtcacccgcagcccgctgatgctgcgtttgctggaacaggcgcggctggtggcgcaatcagacgtcagcgttttgattaacggtcagagcggcaccgggaaagagattttcgcccaggctatccacaacgccagcccgcgcaacagcaaaccatttattgctattaactgtggcgcattgcccgagcaattgctggagtcggagctgtttggtcatgcgcgtggcgcgtttactggcgctgtcagcaatcgcgaaggtttattccaggcggcggaaggcggaacgctatttctcgatgaaattggcgatatgcctgcgccgttacaggtcaaactgctgcgcgtgttgcaggagcgtaaagtgcgcccgctgggcagtaaccgcgatattgatatcaatgtgcggattatttctgccactcaccgtgatctgccaaaagcgatggcgcgcggggaattccgcgaagatctctattaccgcctcaacgttgtcagcctgaaaattccggctctggcagagcgcacagaagacattccgcttctggcaaatcacctgttgcgccaggcggcagagcgacataaaccgtttgtccgcgcgttctccactgatgcgatgaaacgcctgatgaccgctagctggccgggtaatgtgcgccagttggtcaacgtgattgaacagtgcgtggcgctgacctcatctccggttattagcgatgcattagtagagcaggcgctggagggtgaaaacacggcgctgccaacctttgttgaggcacgtaatcagtttgaactcaactatttgcgtaagctgctgcaaattaccaaaggcaacgtcacccacgcggcgagaatggcggggcgcaaccggacagaattttataaactgctttcccgacacgagctggatgcaaacgatttcaaggaatga

SEQ ID NO: 458712 - DNA, 339 bp, Shigella boydii
atgaaaaagattgatgcgattataaaacccttcaagctggacgatgtccgcgaagcactggccgaagtcggtattaccggcatgacggtgaccgaagtgaaaggctttggtcgccagaaaggccataccgagctgtaccgcggcgcggagtatatggtggattttctgccgaaagtgaaaattgagattgtcgtaccggacgacattgtcgatacctgtgtcgataccattattcgcacggcgcaaaccggcaaaatcggtgacggtaaaatcttcgtctttgacgtggcacgggtcattcgcatccgtaccggtgaagaggacgacgcggcaatttaa

SEQ ID NO: 458713 - DNA, 1191 bp, Shigella boydii
atgcttgacgctcaaaccatcgctacagtaaaagccaccatccctttactggtggaaacggggccaaagttaaccgcccatttctacgaccgtatgtttactcataacccagaactcaaagaaatttttaacatgagtaaccagcgtaatggcgatcaacgtgaagccctgtttaacgctattgccgcctacgccagtaatattgaaaacctgcctgcgctgctgccagcggtagaaaaaatcgcgcagaagcacaccagcttccagatcaaaccggaacagtacaacatcgtcggtgaacacctgttggcaacgctggacgaaatgttcagcccggggcaggaagtgctggacgcgtggggtaaagcctatggtgtactggctaatgtatttatcaatcgcgaggcggaaatctataacgaaaacgccagcaaagccggtggttgggaaggtactcgcgatttccgcattgtggctaaaacaccgcgcagcgcgcttatcaccagcttcgaactggagccggtcgacggtggcgcagtggcagaataccgtccggggcaatatctcggcgtctggctgaagccggaaggtttcccgcatcaggaaattcgtcagtactctttgactcgcaaaccggatggcaaaggctatcgtattgcggtgaaacgcgaagagggtgggcaggtatccaactggttgcacaatcacgccaatgttggcgatgtcgtgaaactggtcgctccggcaggtgatttctttatggctgtcgcagatgacacaccagtgacgttaatctcttccggtgttggtcaaacgccaatgctggcaatgctcgacacgctggcaaaagcaggccacacagcacaagtgaactggttccatgcggcagaaaatggcgatgttcacgcctttgccgatgaagttaaggaactggggcagtcactgccgcgctttaccgcgcacacctggtatcgtcagccgagcgaagccgatcgcgctaaaggtcagtttgatagcgaaggtctgatggatttgagcaaactggaaggtgcgttcagcgatccgacaatgcagttctatctctgcggcccggttggcttcatgcagtttaccgcgaaacagttagtggatctgggcgtgaagcaggaaaacattcattacgaatgctttggcccgcataaggtgctgtaa

SEQ ID NO: 458714 - DNA, 1254 bp, Shigella boydii
atgttaaagcgtgaaatgaacattgccgattatgatgccgaactgtggcaggctatggagcaggaaaaagtacgtcaggaagagcacatcgaactgatcgcctccgaaaactacaccagcccgcgcgtaatgcaggcgcagggttctcagctgaccaacaaatatgctgaaggttatccgggcaaacgctactacggcggttgcgagtatgttgatatcgttgaacaactggcgatcgatcgtgcgaaagaactgttcggcgctgactacgctaacgtccagccgcactccggctcccaggctaactttgcggtctacaccgcgctgctggaaccaggtgataccgttctgggtatgaacctggcgcatggcggtcacctgactcacggttctccggttaacttctccggtaaactgtacaacatcgttccttacggtatcgatgctaccggtcatatcgactacgccgatctggaaaaacaagccaaagaacacaagccgaaaatgattatcggtggtttctctgcatattccggcgtggtggactgggcgaaaatgcgtgaaatcgctgacagcatcggtgcttacctgttcgttgatatggcgcacgttgcgggcctggttgctgctggcgtctacccgaacccggttcctcatgctcacgttgttactaccaccactcacaaaaccctggcgggtccgcgcggcggcctgatcctggcgaaaggtggtagcgaagagctgtacaaaaaactgaactctgccgttttccctggtggtcagggcggtccgttgatgcacgtaatcgccggtaaagcggttgctctgaaagaagcgatggagcctgagttcaaaacttaccagcagcaggtcgcgaaaaacgctaaagcgatggtagaagtgttcctcgagcgcggctacaaagtggtttccggcggcactgataaccacctgttcctggttgatctggttgataaaaacctgaccggtaaagaagcagacgccgctctgggacgtgctaacatcaccgtcaacaaaaacagcgtaccgaacgatccgaagagcccgtttgtgacctccggtattcgcgtgggtactccggcaattacgcgtcgcggcttcaaagaagcagaagcgaaagaactggctggctggatgtgtgacgtgctggacagcatcaatgatgaagccgttatcgagcgcatcaaaggtaaagttctcgacatctgcgcacgttacccggtttacgcataa

SEQ ID NO: 458715 - DNA, 1053 bp, Shigella boydii
ttgcaggaactggaaagcgaaaaacgggtggtgaatattgacgatgaaagccagacgcgcgggcatagtagcggtacatggctgattgcgccggaaggtgactggacgctgtgcctgaacgtgacgcccaccagtattgagtgtcaggttgctaatgcttgtttaagtccgaaaggtgaatttgagtatttacagattgatgcaccgacgccgcaggcgctgctgtccgaaatcgaaaaatgctggcatcgccaccgtaaattgtggccggaccgcaccatcaatctggcgctggcaatccacggtcaggttgatccggtgaccggcgtgtcgcaaaccatgccgcaagcgccgtggacaacgccggttgaggtgaagtatctgctggaagagaagctgggcattcgggtgatggtcgataatgactgcgtgatgctggcgctggcggagaaatggcaaaataattcgcaggaacgggatttctgcgtgatcaacgttgattacggcattggctcgtcgttcgtgattaacgagcaaatttatcgcggcagtttgtatggtagcggacaaattggtcacaccatcgttaatccggatggcgtcgtctgcgactgtggacgttacggctgcctggaaaccgtcgcctcgttaagtgcattaaaaaaacaggcgcgggtatggctaaaatcacaaccggttaatactcagcttgatcctgaaaaactgacaaccgcgcagttaatcgctgcctggcagagtggagaaccgtggatcaccagctgggttgatcgctctgccaatgccattggtttgagtctgtataacttcctcaacatcctcaatattaatcagatttggttgtacggtcgcagttgtgcctttggtgagaactggcttaatactattattcgccagacaggatttaacccgttcgaccgcgacgaaggaccgagcgtgaaagcgacgcaaattggcttcgggcaattaagccgcgcacaacaggtgctgggaattggctatttgtatgttgaggcgcagttacgacagatttga

SEQ ID NO: 458716 - DNA, 3186 bp, Shigella boydii
atgaaaagaatgttaatcaacgcaactcagcaggaagagttgcgcgttgcccttgtagatgggcagcgtctgtatgacctggatatcgaaagtccagggcacgagcagaaaaaggcaaacatctacaaaggtaaaatcacccgcattgaaccgagtctggaagctgcttttgttgattacggcgctgaacgtcacggtttcctcccactaaaagaaattgcccgcgaatatttccctgctaactacagtgctcatggtcgtcccaacattaaagatgtgttgcgtgaaggtcaggaagtcattgttcagatcgataaagaagagcgcggcaacaaaggcgcggcattaaccacctttatcagtctggcgggtagctatctggttctgatgccgaacaacccgcgcgcgggtggcatttctcgccgtatcgaaggcgacgaccgtaccgaattaaaagaagcactggcaaaccttgaactgccggaaggcatggggcttatcgtgcgcaccgctggcgtcggcaaatctgctgaggcgctgcaatgggatttaagcttccgtctgaaacactgggaagccatcaaaaaagccgctgaaagccgcccggccccgttcctgattcatcaggagagcaacgtaatcgttcgcgctttccgcgattacttacgccaggacatcggcgaaatccttatcgataacccgaaagtgctcgaactggcacgtcagcatatcgctgcattaggtcgcccggatttcagcagcaaaatcaaactgtacaccggcgagatcccgctgttcagccactaccagatcgagtcgcagatcgagtccgccttccagcgtgaagtccgtctgccgtccggtggttcgattgttatcgacagtaccgaagcgttaactgccatcgacatcaactccgcacgcgcgacccgcggcggcgatatcgaagaaaccgcatttaacaccaacctcgaagctgccgatgagattgctcgtcagctgcgcctgcgtgacctcggcggcctgattgttatcgacttcatcgacatgacgcctgtacgccaccagcgtgcggtagaaaaccgtctgcgtgaagcggtgcgtcaggaccgtgcgcgtattcaaatcagccatatttctcgctttggcctgctggaaatgtcccgtcagcgcctgagcccatcactgggtgaatccagtcatcacgtttgtccgcgttgttctggtactggcaccgtgcgtgacaacgaatcgctgtcgctctctattctgcgtctgatcgaagaagaagcgctgaaagagaacacccaggaagttcacgccattgttcctgtaccaatcgcttcttacctgctgaatgaaaaacgttctgcggtaaatgccattgaaactcgtcaggacggtgtgcgctgcgtgattgtgccaaacgatcagatggaaaccccgcactaccacgtgctgcgcgtgcgtaaaggggaagaaaccccaaccttaagctacatgctgccgaagctgcatgaagaagcgatggcgctgccgtctgaagaagagttcgctgaacgtaagcgtccggaacaacctgcgctggcaacctttgccatgccggatgtgccgccagcgccaacgccagctgaacctgccgcgcctgttgtagctccagcaccgaaagctgcaccggcaacaccagcagctcctgcacaacctgggctgttgagccgcttcttcggcgcactgaaagcgctgttcagcggtagtgaagaaaccaaaccgaccgagcaaccagcaccgaaagcagaagcgaaaccggaacgtcaacaggatcgtcgcaagcctcgtcagaacaaccgccgtgaccgtaatgagcgccgcgacacccgtagtgaacgtactgaaggcagcgataatcgcgaagaaaaccgtcgtaatcgtcgccaggcacagcagcagactgccgagacgcgtgagagccgtcagcaagctgaggtaacggaaaaagcacgtaccaccgacgagcagcaagcgccgcgtcgtgaacgtagccgccgccgtaacgatgataaacgtcaggcgcaacaagaagcgaaggcgctgaatgttgaagagcaatctgttcaggaaaccgaacaggaagaacgtgtacgtccggttcagccgcgtcgtaaacagcgtcagctcaatcagaaagtgcgttacgagcaaagcgtagccgaagaagcggtagtcgcaccggtggttgaagaaactgccgctgccgaaccaattgttcaggaagctccagctccacgcacagaactggtgaaagtcccgctgccagtcgtagcgcaaactgcaccagaacagcaagaagagaacaatgctgataaccgtgacaacggtggcatgccgcgtcgttctcgccgctcgcctcgtcacctgcgcgtgagtggtcagcgtcgtcgtcgctatcgtgacgagcgttatccaacccagtcgccaatgccgttgaccgtagcgtgcgcgtctccggaactggcctctggcaaagtctggatccgctatccaattgtacgtccgcaagatgtacaagttgaagagcagcgcgaacaggaagaagtacaagtgcagccgatggtgactgaggtccctgtcgccgccgctgtcgaaccggttgttagcgcgccagttgttgaagaaatggctgaagtcgtagaagcccccgtaccggttgccgaaccgcaaccggaagtggttgaaacgacgcatcctgaagtgattgccgccgcggtaactgaacagccgcaggtgattaccgagtctgatgttgccgtagcccaggaagttgcagaacacgcagaaccggtggttgaaccgcaggaagagacggcagatattgaagaagttgccgaaactgctgaggttgtggttgcagaacctgaagttgttgctcaacctgccgcgccagtcgtcgctgaagtcgcagcagaagttgaaacggtagccgcggttgaaccagagatcaccgttgagcataaccacgctaccgcgccaatgacgcgcgctccggcaccggaatatgttccggaggcaccgcatcacagtgactggcagcgccctacttttgccttcgaaggtaaaggtgccgcaggtggtcatacggcaacgcatcatgcctctgccgctcctgcgcgtccgcaacctgttgagtaa

SEQ ID NO: 458717 - DNA, 954 bp, Shigella boydii
atgcgtttcagtacccagatgatgtaccagcaaaacatgcgtggcatcaccaattctcaggcggaatggatgaagtacggcgagcagatgtcgacaggtaagcgagtcgttaacccttctgacgatcccattgcagcatcacaagccgtagttctctcccaggcacaggcgcaaaacagccagtacacgctggcgcgtactttcgccactcaaaaagtgtcactggaagagagtgtacttagccaggtcaccactgctatccagaatgctcaggaaaaaattgtctacgccagcaatggcaccttgagtgacgatgaccgggcctcgctggctacggatattcaggggattcgtgaccagttgctgaatctggcgaacaccactgacggtaacgggcgctacatttttgccggttataaaacagagactgcgccgtttagcgaagagaaagggaaatacgtcggtggagcagaaagtattaagcaacaggtcgatgcttcgcgttcgatggtgatagggcacacgggtgacaaaattttcgacagtattaccagcaacgcagttgcggagccagacggtagcgcttctgaaaccaatctttttgccatgctggatagcgccatcgcagccctgaaaacgccggtcgcggatagcgaagcggataaagaaatcgccgctgcggcattggataaaaccaaccgtggactgaaaaactcgctgaataatgtccttaccgttcgcgcggaattaggcacgcagctgaacgaactggagtcgctggattccttaggtagcgatcgcgctttagggcaaacgcagcagatgagcgatctggttgatgtggactggaatgcaactatttcatcttacatcatgcagcaaacggcattgcaggcatcgtataaagcatttaccgatatgcagggattgtcgctcttccagctcaacaaataa

SEQ ID NO: 458718 - DNA, 1644 bp, Shigella boydii
atgtccagcttgattaataacgccatgagcggactgaacgcggcccaggcggcgttaaatacggcaagtaataatatctccagctataacgttgccggatatacccgccaaaccactattatggcgcaggccaatagcacgttgggcgctggcggctgggttggcaatggtgtctacgtttctggtgtgcagcgtgagtatgatgcgtttatcaccaaccagttacgtgcggcgcagacgcaaagtagcggcctgactgcccgctatgagcagatgtcgaaaatcgacaatatgctctccaccagtacctcttcgctggcaacacagatgcaggatttcttcaccagcctgcaaacgctggtgagtaacgcggaagacccggcagcgcgccaggcgctgattgggaaatcagaagggttggtgaatcagtttaaaaccaccgatcagtatcttcgcgaccaggacaaacaggtcaatatcgcgataggtgccagcgttgatcagatcaacaattacgctaaacaaatcgccagcctgaacgaccaaatctcccgcctgacaggcgtgggggcaggggcgtcacctaacaatctgctggatcaacgcgatcaactggtgagcgaattaaaccagattgttggtgtagaagtcagcgttcaggatggcggcacttataacatcacgatggccaatggttactcactggttcagggaagtacggcgcggcaactggcggcagttccttccagcgccgacccttctcgtatgactgtcgcttacgttgatgggacggcaggcaatattgagatcccggagaaattactgaataccgggtcgctgggcggcattctgacattccgttctcaggatctggaccagacgcgtaatacgcttggacaactggcgctggcatttgccgaggctttcaacacccaacacaaagccggatttgatgccaacggcgatgctggtgaagatttctttgctatcggtaagcccgcggttttgcaaaacacgaaaaacaaaggtgacgttgcgatcggtgccacggtaactgatgcctccgcggtactggcgacagattacaaaatctcgttcgataataatcagtggcaggtcacccgccttgccagcaataccacttttacggtgacgccggatgccaacggtaaagtggcatttgatggtctggagttgacgtttacaggaacgcctgccgttaacgacagcttcacgctgaaaccagtaagtgacgccatcgtcaacatggatgtattaatcaccgacgaagcgaaaatagcgatggcgagcgaaaaagatgcgggtgatagcgataaccgcaacggtcaggccctgctggatctgcaaagcaacagtaaaacggtgggcggtgcgaaatcctttaacgacgcttatgcctcgttagtgagtgatatcggtaataaaaccgcgacgttgaaaaccagtagcgccacgcaaggtaatgtggtgacgcagctttccaatcagcagcagtctatctctggcgtcaatctcgacgaagagtacggaaatctgcaacgttttcagcagtattacctggcgaatgcgcaggttctgcagacggcaaacgcgatttttgatgcgctgattaacattcgctaa

SEQ ID NO: 458719 - DNA, 741 bp, Shigella boydii
atgatcagcgacagcaaactactggcaagtgcggcctgggatgcgcaatcactcaacgaactaaaggcgaaagcgggcgaagatccggcggcaaatatccgtccggtggcccgtccggtggcccgtcaggtggaagggatgttcgtgcagatgatgttgaaaagcatgcgcgacgctttaccaaaagatggcctgttcagcagcgagcacactcgcctgtataccagtatgtatgaccagcagattgcccaacagatgacggcgggcaaaggtctggggcttgcagagatgatggttaaacagatgacgccagaacaaccattgccagaggagtccacgccagcagcaccgatgaaattcccgctcgaaactgtggtgcgttatcaaaatcaggcgctttcgcagctggtgcaaaaggccgtgccacgtaactacgatgattcgctgccgggtgacagtaaagcattcctcgcgcaactctcgctgcccgcccaactggcaagccagcaaagcggtgtgccacatcatttgatcctcgctcaggcggcgctggaatctggttgggggcaacggcaaatccgccgcgaaaacggcgagccgagctataacctgtttggtgtcaaagcctctggcaactggaaagggccagttactgaaatcaccacgactgaatatgaaaacggcgaagcgaagaaagtaaaagcgaagtttcgggtctacagctcgtatctggaagcatag

SEQ ID NO: 458720 - DNA, 906 bp, Shigella boydii
atgctctcacagctgggaattaccgttccgacgggcaccaatatgcagctaaaaaacgtcgctgcggtaatggtgacagcgtcacttcctccgtttggacgtcaggggcaaaccatcgatgtggtggtttcttccatgggtaatgccaaaagcttgcgtggaggtacgttgttgatgacaccgcttaagggcgttgacagtcaggtgtatgcgctggcgcagggcaatattctggttggcggcgcaggagcctccgctggcggtagcagtgttcaggttaaccaactgaacggtggacggatcaccaatggtgcggttattgaacgtgaattgcccagccagtttggcgtcgggaatacccttaatttgcaacttaacgacgaagatttcagcatggcgcagcaaatcgctgacaccatcaaccgcgtgcgtggatatggcagcgccaccgcgttagatgcgcggactattcaggtgcgcgtaccgagtggcaacagttcccaggtccgcttccttgccgatatccagaatatgcaggttaatgtcaccccgcaggacgctaaagtagtgattaactcgcgcaccggttcggtggtgatgaatcgcgaagtgaccctcgacagctgcgcggtagcgcaggggaatctctcagtaacagttaatcgtcaggccaatgtcagccagccagatacaccgtttggtggtggacagactgtggttactccacaaacgcagatcgatttacgccagagcggcggttcgctgcaaagcgtacgttccagcgccaggctcaataacgtggtgcgcgcgctcaatgcgctgggcgctacgccgatggatctgatgtccatactgcaatcaatgcaaagtgcgggatgtctgcgggcaaaactggaaatcatctga

SEQ ID NO: 458721 - DNA, 243 bp, Shigella boydii
gtgattaaatttctctctgcattaattcttctactggtcacgacggcggctcaggctgagcgtattcgcgatctcaccagtgttcagggggtaaggcaaaactcactgataggctatggtctggtggtgggctggatggcaccggtgaccagacaacccagacgccgtttaccacacaaacgcttaataacatgctctcacagctgggaattaccgttccgacgggcaccaatatgcagctaa

SEQ ID NO: 458722 - DNA, 699 bp, Shigella boydii
atgcaaaaaaacgctgcgcatacttatgccatttccagcttgttggtgctttcactaaccggctgcgcctggataccctccacgccgctggtgcagggggcgaccagtgcacaaccggttcccggtccgacgcccgtcgccaacggttctattttccagtctgctcagccgattaactatggctatcaaccgctgtttgaagatcgtcgaccacgcaatattggcgatacgctgaccatcgtgttgcaggagaacgtcagcgccagcaaaagctcctctgtgaatgccagccgtgacggtaaaactaattttggctttgatactgtgccgcgctatttgcaggggctgtttggtaacgctcgtgccgatgtcgaagcctccggtggtaacacgttcaacggaaagggcggggccaatgccagcaatacctttagcggcacgttgacggtgacggttgaccaggtactggtcaacggcaacctgcatgtggtgggtgaaaaacagattgccattaatcagggtaccgaatttattcgcttctctggcgtggttaatccacgcactatcagcggcagcaataccgtatcgtctactcaggtggtggatgcgcgcattgaatacgtaggcaatggctacattaacgaagcgcaaaatatgggctggttgcagcgtttcttccttaacctgtcgccaatgtaa

SEQ ID NO: 458723 - DNA, 555 bp, Shigella boydii
atgatcagttcattatggatcgccaaaacgggccttgacgcccagcaaaccaatatggacgtcattgccaacaacctggcaaacgtcagtactaacggttttaagcgtcagcgcgcggtgtttgaagatctgctttatcaaaccattcgccagccgggggcacagtcttccgaacaaaccaccttaccctccggattacaaatcggcacgggggtacgcccggtcgccactgaacgcttacacagccagggaaacctgtcgcagaccaacaacagcaaagatgtcgcgattaaagggcagggctttttccaggtgatgttgccagatggttcatcagcctatacccgtgacggctctttccaggtggatcagaacgggcagctggtgacggctggtggttttcaggtgcagccagcgatcaccattccggcgaatgcgttaagtatcaccatcggtcgtgatggcgtggtcagcgtaacccaacaaggccaggcagctccggttcaggttgggcagctcaatctcaccacctttatgaatgacaccgggctgtag

SEQ ID NO: 458724 - DNA, 756 bp, Shigella boydii
atggatcacgcaatttatactgcgatgggagcagccagccagacgctgaatcaacaggcggtaaccgccagtaatctggccaatgcctctacgcccggttttcgcgcgcagttaaacgccttgcgcgcagtgccggtggaagggctttcactgcccacgcgcacgctggtaacggcgtcaacaccgggtgcagacatgacgcccggcaagatagattacacctcgcgcccgctggacgttgcgttgcagcaggatggctggctggccgtgcagaccgctgacggcagcgaagggtatacgcgtaatggcagcattcaggttgatcccaccgggcaactgacaattcaggggcatcaggtgataggcgaggcggggccaattgctgtgccggaaggagcggaaatcactattgctgccgatggcacaatctcggcgctcaatccgggcgatccggcaaatacagttgcgccagtagggcgtctgaaactggtgaaagccacgggcagcgaagtgcagcgcggtgacgacggcatttttcgtttaagcgcagaaacccaggccacgcgagggccggtactgcaggcagatccaaccttgcgtgtgatgtcgggggttctggaaggcagtaacgtcaatgccgttgcggcaatgagcgacatgattgccagcgcgcggcgttttgaaatgcagatgaaggtgatcagcagcgtcgatgataacgcaggccgtgccaaccaactgctgtcgatgagttaa

SEQ ID NO: 458725 - DNA, 1209 bp, Shigella boydii
atggccttttctcaagcggttagcggattaaacgctgccgccactaacctcgatgttattggcaacaatatcgtcaactccgccacctacggctttaaatcaggcacggcctcttttgccgatatgtttgccggttcgaaagtgggactgggggtaaaagttgccggtatcactcaggactttacagatggcacgaccaccaacaccgggcgaggtctggacgttgctatcagccagaacggttttttccgtctggtagacagcaacggttcggtgttctacagccgtaacggacaatttaagctggatgaaaaccgtaacctggtgaatatgcaaggtttacagctgacgggttacccggcaaccggtacgccgccgactattcagcaaggggcgaatccgaccaatatttcgatcccgaataccctgatggcagcgaaaactaccaccacggcgtcgatgcagatcaacctgaattccagtgatccgcttcctactgttacgccattcagcgccagcaatgcggatagctataacaaaaaaggttcggtgactgttttcgacagtcagggtaatgctcatgacatgagcgtctactttgtgaagaccggggataataactggcaggtctacacccaggatagcagtgatccaaacagcattgcgaagacagcgacaacactggaatttaatgctaatggcacattagtggatggtgcgatggcgaataatatcgcaaccggcgcaattaacggtgcagaccccgccacgtttagtctgagcttcctcaactccatgcagcaaaataccggcgctaacaatattgtggcaaccccccagaacggctacaaaccgggtgatctggtgagttatcaaatcaatgatgacggtacggttgtcggcaactattccaacgaacaaactcaactgctggggcagattgtactggcgaactttgccaacaacgaaggtctggcatccgaaggcgacaacgtctggtctgcgacgcaatcttctggcgtggcgctgttggggacagccgggacgggaaactttggcaccctgaccaacggtgcgctggaagcgtccaacgtcgatctcagtaaagaactggtcaatatgatcgttgcccagcgtaactatcagtctaacgcccagaccatcaaaacccaggaccagatcctcaacacgctggttaacttacgctaa

SEQ ID NO: 458726 - DNA, 696 bp, Shigella boydii
atgtccattgcggtaaccaccaccgatccgacaaataccggcgtcagtaccaccagcagtagttcgctcacgggcagcaacgccgcagatttacaaagcagttttctgactttgctggtggcgcagctgaaaaaccaggacccgaccaatccaatggaaaacaacgagctgacgtcgcaattggcacaaatcagcacggtcagcgggattgaaaaactcaataccacgctcggatctatttccggacagattgataacagccagtcgttacaggccagtaacctgatcggtcacggcgtgatgatccccggcacaactgttcttgcgggaaccggcagtgaagaaggggctgtgaccacgaccacgccgtttggtgttgagctgcaacaggcggcagacaaagttacggccaccatcaccgataaaaatggcgcggttgtgcgcaccattgatattggtgaactgaccgccggagttcacagtttcacctgggacggtacgttgactgatggcagcactgcgccgaacggttcttacaatgtagcgattaccgccagtaacggtggtacacaactggttgcccagccgctgcagtttgctctggtgcagggtgtgatccgcggcaacagcggtaatacgctggatctcggcacttacggcaccaccaccctcgacgaagtacggcagataatttaa

SEQ ID NO: 458727 - DNA, 405 bp, Shigella boydii
atggcactgctgaatatttttgatatcgccgggtcggcgttaactgcccagtcccagcgcctgaacgtggcggccagtaatctggcgaatgctgatagcgtgaccggtcccgatggacagccatatcgggcaaaacaggtggtattccaggttaacgctgcaccaggtgctgcgacaggcggcgtaaaggttgccgatgttatagaaagtcaggccccggacaaactggtttatgaaccgggtaatccgctggcggatgcaaagggctacgtaaaaatgccgaacgttgatgttgtcggagagatggttaacaccatgtcggcgtcacgcagctatcaggccaatgttgaagtgctcaacacggtgaaaagcatgatgctgaaaacccttacgctcggtcaataa

SEQ ID NO: 458728 - DNA, 417 bp, Shigella boydii
atgctcgataagctcgacgccgccttacgttttcaacaagaggcgctcaatctgcgcgcccagcgtcaggaagtgctggcagcaaacatcgccaatgccgatacccctggttatcaggcgcgcgatatcgattttgccagtgaacttaaaaaagtcatgcaacgtggacgggatgcaaccagtgtggttgctctgacgatgacctcaacgcaacacattccggcgcaggcgctgacgcctcctaccgcagaactgcaataccgcattccggaccagccttcgcttgacggtaataccgtcgatatggatcgcgaacgcacccagtttgccgataacagcctgcaataccagatgagccttagtgcgttgagcgggcaaatcaaaggcatgatgaacgttttacagagcggaaattaa

SEQ ID NO: 458729 - DNA, 660 bp, Shigella boydii
atgctggcaataaaacgtagcgtggcgatcatcgcgatactgttcagtccgttaagtgcggcgagcaatctcacatcgcaattgcacaccttttttagcgcccagctcgtgggggtaagtgatgaggttcgtgtttctattcgtacagcccccaatctactaccgccgtgcgagcagccattgctttcgatgagcaataattcccgcctgtggggcaatgtgaatgtgttggcacgctgcggtaacgacaaacgatatttacaggttaatgtgcaggccacaggaaattatgtggttgccgcgatgcccattgtgcggggaggaaagctggaagctggcaatgtcaaactaaaacgcggacgactggataccctgccaccgcgtacggtgctggatatcaatcaacttgttgatgccattagcctacgcgatctatcacccgatcaaccaatccaattaacccattttcgccaggcatggcgggtaaaagcgggacaacgcgtcaacgtgatcgccagcggtgacgggtttagcgccaacgcagaaggtcaggcgctgaacaatgcagccgtcgcacagaatgcgcgggtgcgcatggtatcgggactggtggtcagcggcgttgttgatgcagatgggaatattcttataaacctgtaa

SEQ ID NO: 458730 - DNA, 318 bp, Shigella boydii
atgagtattgatcgcacttcgcctctgaatcccgtaagcaccgttcaaccgcgcgaaaccactgacgcgccggtaacgaacacccgggcggcaaaaacaaccgactccaccagcaccagcaccagcaccagcaccagcaccagtgtgacgttaagcgacgcgcaagcaaaactgatgcaacccggcagcagtgatatcaatcttgaacgtgtcgaagcgttaaaactggcgattcgtaacggtgaactaaaaatggacatcggcaaaattgccgatgcgctgatcaacgaagctcagcaagacttgcagagtaactga

SEQ ID NO: 458731 - DNA, 417 bp, Shigella boydii
atgacacgtcttgcagagatccttgaccagatgtccgctgtgcttaacgatctcaaaacggtaatggatcaagagcagcaacatctctctatggggcagatcaacggcagccagttgcaatggattacagaacaaaaaagctcactgctggcgacgctggattacctcgaacagttacgcaagaaagaacccaatacagcaaatagcgttgatattagtcaacgctggcaggaaattactgtgaaaacgcagcaactacgccaaatgaatcaacataacggttggttactggaaggacagattgagcgcaatcaacaggcgctggaaatgttgaaaccgcatcaggaaccgacgctatatggggcgaacggtcagacctcaacaacccatcgcggcggtaaaaagatttcgatctga

SEQ ID NO: 458732 - DNA, 1536 bp, Shigella boydii
atgaatttattaaaatcgctggccgccgtcagctcgatgaccatgttttcgcgtgtgcttggcttcgcacgagacgcaattgtcgccagaatctttggcgcagggatggcaaccgacgcctttttcgtcgcttttaaacttcctaacttgttacgccgtatctttgccgaaggggcattttcccaggcatttgtaccgattctggcggaatataaaagtaagcagggtgaagacgccacgcgggtctttgtctcttatgtttctggcctgctgacacttgcgctggcggttgtgacggtcgctggcatgctcgccgcaccgtgggtgatcatggtgaccgcgccaggcttcgctgacacagctgacaaatttgccctgaccagccagctactaaagattacctttccctatatcttgctgatctccctggcgtcgctggtgggagcgattctgaatacgtggaaccgcttctcgattccggcgtttgcgccaacactgcttaacatcagcatgattggtttcgcgctgtttgccgcaccgtactttaacccaccggtgctggcgctggcgtgggctgttacggtcggcggcatcctgcagctggtgtatcagctaccgcacctgaagaagatcggcatgctggtcctgccgcgcattaacttccacgatgccggagcaatgcgcgtggtgaaacagatgggaccggcgatccttggcgtctctgtgagccagatctccttaatcatcaacaccatttttgcctcgtttcttgcttccggttcggtgtcttggatgtattacgccgaccgcttaatggagtttccgtccggtgtgctgggcgtggcgcttggcaccattttgctgccgtcgctgtcgaaaagttttgccagtggcaatcatgatgaatacaaccgtttgatggactgggggttgcgtctttgtttcctgttggcgctgccgagtgcggttgcgttgggcattctttcaggtccgttaaccgtttcgctgttccagtacggtaaatttaccgcgtttgatgcgctgatgacccagcgggcgttaattgcctactcggtgggtttgattggcctgattgtagtgaaagtgttggctcctggcttttattcccgccaggacattaaaacgccagtgaaaattgccatcgttacgctgattttaacgcaattgatgaacctggcgtttattggtccgttgaaacatgccgggctgtcactttctattggtctggcggcgtgtctgaatgcttcgctgctttactggcagttgcgtaagcagaaaatctttactccgcaacccggctggatggcgtttctgttgcgtctggtggtggcggtactggtgatgtctggcgtgcttttaggtatgttacatatcatgccggagtggtcattgggtaccatgccctggcgcttactgcgtttaatggcggtcgtgctggcggggattgccgcgtacttcgctgcactggcggtactgggcttcaaagttaaagaatttgcccgccggacggtgtaa

SEQ ID NO: 458733 - DNA, 828 bp, Shigella boydii
gtgaaaaaattacgtatcggcgttgtgggattaggcggcattgcgcaaaaagcgtggttaccggtgctggcggcagcgtctgactggatgttacaaggagcctggtcgcctacgcgcgcgaaagccctgccaatttgtgaaagctggcgcattccttatgccgattcgttatccagccttgccgccagttgcgatgcggtttttgtgcattccagcaccgccagccactttgacgtggtcagtacgttactcaatgcgggtgtacatgtctgtgtcgataaaccgctggcagaaaatctgcgcgatgctgaacggctggtggaactggcggcgcggaaaaaacagacgttgatggtcggttttaaccgtcgtttcgcaccactctacggtgagttaaaaacgcaactcgctaccgcagcttcgctaagaatggataaacatcgtagcaatagtgtcgggccacacgatctttatttcacgttgctggatgattatctgcatgtggtggataccgcgctgtggttgtcgggcggcaaagcctctctggatggcggtacgctactgactaacgacgctggcgaaatgctgtttgccgagcaccatttttcggccggtcctttgcagatcaccacctgtatgcatcgccgtgccggaagtcagcgtgaaaccgtgcaggccgtgactgacggtgcgctcatcgacattacggatatgcgcgaatggcgtgaggagcgcgggcagggcgtagtgcataaaccgattcctggttggcagagcactcttgaacaacgtggatttgtcggctgtgcgcggcacttcattgaatga

SEQ ID NO: 458734 - DNA, 648 bp, Shigella boydii
atgaaatatcaacttactgcccttgaagctcgcgtgattggttgcttgctggaaaagcaggtgaccacgccggagcaatacccgctctcagtcaatggtgtagtcacggcctgtaatcagaaaacgaaccgtgaaccggtcatgaatctgagtgaatctgaagtgcaggagcaactggataatctggtcaaacgccattatctgcgcacggtgagtggctttggtaatcgggtcaccaaatatgaacaacgtttttgtaattcagaatttggcgatctgaaactgagcgcagcggaagtggcgttaatcaccacgttgttattgcgtggtgcccagacgccgggtgaactgcgcagccgcgccgcgcgaatgtatgaattcagcgatatggcggaagtggagtcgacgctggaacaactggcaaatcgcgaagatggtccttttgtggtgcgtctggcccgcgaaccgggtaaacgcgaaagccgctacatgcatcttttcagtggtgaggtagaggatcagccggcggtaacggatatgtcgaacgcggttgatggtgatttacaggcccgcgtcgaagccctggaaatcgaagtggcagaactgaaaccgcgtcttgattcgttgctggcccatctgggagattaa

SEQ ID NO: 458735 - DNA, 585 bp, Shigella boydii
atgtttggctatcgcagtaacgtgccaaaagtgcgcttaaccacagaccgactggtcgtgcgtctggtgcatgatcgtgatgcctggcgtcttgcggattattacgcagagaatcgccatttcctcaagccctgggagccagtgcgcgacgaaagccactgttatccatcaggctggcaggccaggctggggatgattaacgaatttcataaacaaggttcagctttctactttggcttattcgacccggacgaaaaagagattattggcgttgccaatttttccaatgttgttcgtggctcttttcatgcctgctatctcggttattcgattgggcaaaaatggcagggcaaaggactcatgtttgaagccctgaccgcagccattcgttatatgcagcgcacccaacatattcatcgcattatggctaattatatgccgcacaataaacgcagcggtgatttactggcgcgactgggttttgaaaaagaaggctatgcgaaagactatctgttgattgatggacaatggcgcgatcacgtactgacggcattaactaccccagactggacgcccggccgctaa

SEQ ID NO: 458736 - DNA, 1209 bp, Shigella boydii
atgtcccgcgtatcgcaggcgaggaacctgggtaaatatttcctgctcatcgataatatgctggtcgtgctggggttctttgttgtcttcccgctgatctctatccgcttcgttgatcaaatgggctgggccgccgtcatggtcggtattgctctcggtctacgccagtttattcagcaaggtctgggtattttcggcggcgcaattgccgaccgctttggtgccaaaccgatgattgttaccggtatgctgatgcgcgccgccggattcgcaacaatgggtatcgcccacgaaccgtggctattgtggttttcatgcctgctctcgggactcggcggcacgttgtttgatccgccgcgttcggcgctggtggtgaaactaatccgtccacaacaacgtggtcgttttttctcgctgttgatgatgcaggacagtgccggtgcggtcattggcgcattgttggggagctggctgttgcaatacgactttcgcctggtctgcgccacaggggccgttttgtttgtgctgtgtgcggcgttcaatgcgtggttgttaccggcatggaaactctccaccgtacgcacgcccgttcgcgaaggcatgacccgcgtgatgcgtgacaagcgttttgtcacctatgtcctgacgctggcgggttactacatgctggctgtacaagtgatgctgatgctgccaattatggtcaacgacgtggctggcgcgccctctgccgttaaatggatgtatgccattgaagcgtgtctgtcgttaacgttgctctaccctatcgcccgctggagtgaaaagcattttcgtctggaacaccggttgatggctgggctgttgataatgtcattaagcatgatgccggtgggcatggtcagcggcctgcaacaacttttcaccctgatttgtctgttttatatcgggtcgatcattgccgagcctgcgcgtgaaaccttaagtgcttcgctggcggacgcaagagctcgcggcagctatatggggtttagccgtctgggtctggcgattggcggcgctattggttatatcggtggtggctggctgtttgacctgggcaaatcggcgcaccagccagagcttccgtggatgatgctgggaattattggcatcttcactttccttgcgctgggttggcagtttagtcagaaacgcgccgcgcgtcgtttgctggaacgcgacgcctga

SEQ ID NO: 458737 - DNA, 648 bp, Shigella boydii
gtgaagctatacatttacgatcactgcccttactgcctcaaagcccgcatgattttcggcctgaaaaatatccccgtcgaattacatgttctgctcaacgacgacgcagaaacacccacccggatggtcggtcaaaaacaggttcccattctgcaaaaagatgacagccgctatatgccagaaagcatggatatcgttcactatgtcgataaactcgacggcaaaccgttactgaccggcaaacgttcccctgccattgaagagtggctgcgcaaggtcaatggctacgccaacaaactgctgttgccgcgttttgccaaatcggcatttgatgagttttctactcccgccgcgcgcaaatatttcgtcgacaagaaagaggccagcgcgggtaattttgccgacctgctggcccactctgacggtctgattaagaatatcagcgatgatttgcgtgcgctggacaaactgatcgtcaaaccgaacgccgtgaatggcgaactttcggaagatgatattcagctatttccgctactgcgtaatctgacgttggtagccggaatcaactggccaagccgcgttgctgattaccgcgataatatggcgaaacagacacaaatcaatttgttatcatcaatggcgatttaa

SEQ ID NO: 458738 - DNA, 561 bp, Shigella boydii
atgaacaagtttttatttgccgctgcattgatcgtcagtggcctgctcgttggctgtaatcaactcacccaatacaccatcaccgaacaagaaattaaccagtcgcttgcgaaacataataatttctcaaaagatatcggtttacccggcgtggctgacgcccatattgttctgacaaacttgaccagccaaattggtcgcgaagagccgaataaggttaccctaaccggagacgccaatctggacatgaactccctgttcggtagtcagaaagcgaccatgaaactgaagctgaaagcgctgcccgtgtttgataaagaaaaaggtgcgatcttcctgaaagagatggaagtggtcgatgcgacggtacaaccggaaaaaatgcaaacggtgatgcaaacgttgcttccctatttgaaccaggcattacgcaattactttaaccagcaacctgcttacgtcctgcgcgaagatggcagtcagggcgaagcaatggcgaaaaaactggcgaaaggcattgaagtgaagccaggcgaaattgtcattccgtttacggattaa

SEQ ID NO: 458739 - DNA, 1047 bp, Shigella boydii
atgactgcaccatcccaggtattaaagatccgccgcccagacgactggcaccttcacctccgcgatggcgacatgttaaaaactgtcgtgccgtataccagcgaaatttatggacgggctattgtaatgcccaatctggctccgcccgtgaccactgttgaggctgccgtggcgtatcgccagcgtattcttgatgccgtacctgccgggcacaatttcaccccattgatgacctgttatttaacagattcgctggatcctaatgagctggagcgcggatttaacgaaggcgtgttcaccgctgcaaaactttatccagcaaacgcaaccactaactccagccacggcgtgacgtcaattgacgcaatcatgccggtacttgagcgcatggaaaaaatcggtatgccgctactggtgcatggtgaagtgacacatgcagatatcgacatttttgatcgtgaagcgcactttatagaaagcgtgatggaacctctgcgccagcgcctgactgcgctgaaagtcgtttttgagcacatcaccaccaaagatgctgccgactatgtccatgacggaaatgaacggctggctgccaccatcactccgcagcatctgatgtttaaccgcaaccatatgctggttggtggcgtgcgtccgcacctgtattgtttacccatcctcaaacgcaatattcaccaacaggcattgcgtgaactggtcgccagcggttttaatcgagtattcctcggtacggattctgcgccacatgcacgtcatcgcaaagagagcagttgtggctgcgcgggctgcttcaacgccccaaccgcgctgggcagttacgctaccgtctttgaagagatgaatgctctgcagcactttgaagcattctgttctgtaaacggcccgcagttctatggcttgccggtcaacgatacattcatcgaactggtacgtgaagagcaacaggttgctgaaagcatcgcactgactgatgacaccctggtgccattcctcgccggggaaacggtacgctggtccgttaaacaataa

SEQ ID NO: 458740 - DNA, 246 bp, Shigella boydii
atgcgaattgaagtcaccatagcgaaaacttctccattgccagctggggctattgacgccctggctggcgaactttcccgccgtattcagtatgcgtttcctgataatgaaggccacgtatcggtacgttatgccgcagcgaataatttatcggttattggcgtaacaaaagaagataaacagcgcattagcgaaattctccaggaaacgtgggaaagcgccgatgactggtttgtcagcgaataa

SEQ ID NO: 458741 - DNA, 255 bp, Shigella boydii; identical to SEQ ID NO: 263920

SEQ ID NO: 458742 - DNA, 1119 bp, Shigella boydii
atgaaatacgatctcatcattattggcagcggttccgtaggcgctgccgccgggtattatgcaacccgcgccggtttaaacgtgctaatgaccgacgcccatatgccaccgcatcaacacggcagccaccacggcgatacgcgattaattcgccatgcttatggtgaaggcgaaaagtatgtcccgttggtcctccgcgcgcaaacgctgtgggatgaactttcccgccacaacgaagatgatcccatttttgtacgctctggtgtcattaacctcggcccggctgactccgcatttctcgccaacgtcgcccacagcgccgaacagtggcaactcaacgttgaaaagctcgatgcgcaagggattatggcccgctggccagaaatacgcgtcccggacaactacatcggcttatttgagactgattccggttttttgcgcagcgaactggcgattaaaacctggatccaactggcgaaggaagcgggctgtgcgcaactgttcaactgcccggtcaccgcaattcgtcatgacgatgatggcgtaactattgaaaccgttgacggtgagtatcaggcgaaaaaagcgattgtctgcgcgggaacatgggtaaaagacctgctcccggagctgcctgtccagcctgtacgtaaagtatttgcctggtatcaggccgatggccgctatagcgtgaagaataaattcccggcgtttaccggtgaactgcccaatggcgatcaatattatggttttccggcagaaaacgacgcgttgaagattggcaaacataacggaggccaggttatccattcagcggatgaacgtgttccgtttgcggaagtggtcagcgatggttcggaagccttcccgttcttgcgcaatgtattgccgggtatcggttgctgcctgtacggcgctgcctgcacctatgataattcgcctgacgaagattttattatcgataccctacccggccacgataatacactgctcattaccggcctgagtgggcacggttttaaatttgcgtcagttttaggggaaatagctgccgattttgcgcaagacaaaaaaagcgattttgatttgacgccattcaggctttcccgcttccaataa

SEQ ID NO: 458743 - DNA, 567 bp, Shigella boydii
atgtcattcacaaatacccctgaacgctatggtgttatatctgcggccttccattggctaagcgcaattattgtctacggcatgtttgctttaggtctgtggatggtcacgctcagttattacgatggctggtatcacaaagcacccgaactgcataaaagcatcggtattttgttaatgatggggctggttattcgcgttctgtggcgtgtcatatctccaccgccgggtccgctgccgagttattcgcccatgactcgtcttgccgcaaaggctggacatctcgcattgtacctattgctgttcgccatcggcatcagcggctatctgatctcaactgccgatggtaaaccgatcagcgtttttggctggtttgacgtccccgcgacccttgccgacgctggcgcacaggcagactttgccggtgccctgcatttttggctcgcgtggagcgtcgtagtactgtccgttatgcacggatttatggccctgaagcatcatttcatcgataaagacgacactctgaagcgcatgctgggaaagtcgtcatctgactatggagtataa

SEQ ID NO: 458744 - DNA, 576 bp, Shigella boydii
atgaaaaaaagcctgcttggtttaaccttcgcgtccctgatgttctctgccggttcagcggttgccgccgattacaaaattgacaaagaaggtcagcacgcctttgttaatttccgcatccagcaccttggctatagctggttatacggcacctttaaagatttcgacggtacttttacctttgacgaaaaaaatccggctgccgataaagtgaatgtgacaattaacaccaccagcgtcgatactaatcacgccgaacgcgataaacatcttcgcagtgcagatttcctcaataccgcaaaatatccacaggcaacattcacctccaccagcgtgaagaaagacggtgacgaactggatattaccggcgatctgacgctgaatggcgtaaccaaacccgtcacgctggaagcgaaattaattggtcagggcgacgacccatggggtggtaaacgtgcaggcttcgaggccgaaggcaaaattaagctcaaggacttcaatatcaagacagatttaggtccagcttctcaggaagtggatctgattatttcagtggaaggcgtacagcagaagtaa

SEQ ID NO: 458745 - DNA, 603 bp, Shigella boydii
gtgtgccacttcatgcgtaaccactatgagtatgaagtggggcactttgaaaacgcgctcgaaattccggcagataccttccgtgagcagctgccaaaagcagtcgagatgatgcaggcacataaagataaaaaaatcgtcatgtactgcaccggcggcattcgttgtgaaaaggccagtgcttggatgaaacataacggattcaacaaagtctggcatatcgagggcggaattattgaatacgcccgtaaggcgcgcgagcagggcttgccggtgcgttttattggcaaaaattttgtttttgacgagcggatgggcgaacgtatatcggatgagattatcgcgcattgccaccagtgcggcgcgccgtgcgacagccataccaactgtaaaaatgatggctgccacctgctgtttattcagtgtccagtatgcgcggaaaaatacaaaggttgttgtagtgagatttgctgcgaagaaagcgcgttaccgccagaagaacagcgacgccgtcgggcaggacgtgaaaatggcaataagatctttaataagtctcgtggacgtctgaatacaacactgggcattcctgatccaacagaataa

SEQ ID NO: 458746 - DNA, 774 bp, Shigella boydii
atgtccgagaataaattaaacgttatcgatttgcacaaacgctacggcgaacatgaagtgctgaaaggggtctcactgcaagcgaatgccggagatgtaataagcatcatcggatcgtcgggatcggggaaaagtacctttctgcgctgcattaacttcctcgaaaaaccgagtgaagggtcgatcgtggtcaatggccagacgatcaatctggtgcgcgacaaagacggtcaactcaaagtcgccgataaaaatcaactgcgcttactgcgcacacgcctgacgatggtattccagcacttcaatctctggagccatatgacggtgctggaaaacgtcatggaagcgccgattcaggtgttgggcctgagcaagcaggaagcgcgcgagcgggcggtcaagtatctggcaaaagtcgggatagacgaacgtgcgcaggggaaatatccggtgcatctttccggcggtcagcaacagcgtgtttctatcgcgcgggcgctggcgatggaaccggaagttttactgtttgatgaacctacctcggcgctcgatcctgaactggtaggcgaagtgttgcgtattatgcagcaactggcagaagaggggaaaaccatggtggtagtgactcacgaaatgggctttgctcgccatgtttctactcatgtcattttcctccatcaggggaaaatagaagaagagggcgcgccggagcagttatttggcaacccgcaaagccctcgtctgcaacagttccttaagggatcgctgaaataa

SEQ ID NO: 458747 - DNA, 717 bp, Shigella boydii
gtgatcgaaatcttacatgaatactggaaaccgctgctgtggaccgacggttatcgctttactggtgtggcgatcactctgtggctgcttattttgtcggtagtgataggcggagtcctggcgctgtttctggcgattggtcgtgtctccagtaataaatacatccagtttccaatctggttatttacctatatttttcgcggtacgccgctgtatgttcagttgctggtgttctattccggcatgtacacgcttgagattgttaagggaaccgaattccttaacgctttcttccgcagtggcctgaactgtaccgtgctggcgctgacgcttaacacctgcgcttacactaccgagatttttgctggggcaatccgttcggttccgcatggggaaattgaagccgccagagcctatggcttctcgacttttaaaatgtatcgttgcattattttgccttctgcgctgcgtattgcgttaccggcatacagcaacgaagtgatcctgatgctgcactctactgcgctggcgtttacggccactgtgccggatctgctgaaaatagcccgcgatattaacgccgccacgtatcaaccttttaccgccttcggcattgccgcggtgctctatttaatcatctcttatgtcctgatcagcctctttcgcagagcggaaaaacgctggttgcagcatgtgaaaccttcttcaacgcactga

SEQ ID NO: 458748 - DNA, 687 bp, Shigella boydii
atgttgtatgggttttcaggtgttattttacagggtgcgctcgtcacgctggagctggctatcagctctgtagtgctcgctgtaatcatcggtttaattggcgctggcggtaagctctcgcaaaatcggctttcggagctgattttcgaagggtacaccacgctgattcgtggcgtgccggacttagtgttgatgctgctgattttcttcggtttgcagattgcgctaaacacggtgacggaggcgatgggcgtcgggcagattgatatcgatccgatggtcgctggtattatcactctcggttttatctacggtgcttattttaccgaaacgttccgtggtgcttttatggcagtgccgaaaggacatatagaggcggcgacggcgttcggttttactcgtgggcaagtgtttcggcggatcatgtttccggcgatgatgcgttacgccctgccaggcattggcaacaactggcaggtgatcctcaaatctaccgcactggtttcgttactcggcctggaagatgtggtcaaagccacccaactggcaggcaaaagtacctgggaaccgttctatttcgccatcgtctgtggcgtgatttacctggttttcaccactgtttccaatggtgtgctgctgttccttgagcgccgctactccgtgggtgtgaagagggctgacctgtga

SEQ ID NO: 458749 - DNA, 783 bp, Shigella boydii
atgaaaaaactggtgctatcgctctctctggttctggccttctccagcgcaactgcggcatttgctgcgattccgcaaaacatccgcatcggtaccgacccgacctatgcgccatttgaatcaaaaaattcacaaggcgaactggttggcttcgatatcgatctggcaaaggaattatgcaaacgcatcaatacgcaatgtacgtttgtcgaaaatccgctggatgcgttaatcccgtccttaaaagcgaagaagattgacgccatcatgtcatcgctttccattacggaaaaacgtcagcaagaaatagccttcaccgacaaactgtacgctgccgattctcgtttggtggtggcgaaaaattctgacattcagccgacagtcgagtcgctgaaaggcaaacgggtaggcgtattgcagggcaccacccaggagacgttcggtaatgaacattgggcaccaaaaggcattgaaatcgtctcgtatcaggggcaggacaacatttattctgacctgactgccggacgtattgatgccgcgttccaggatgaggtcgctgccagcgaaggtttcctcaaacaacctgtcggtaaagattacaaattcggtggcccgtctgttaaagatgaaaaactgtttggcgtagggaccggcatgggcctgcgtaaagaagataacgaactgcgcgaagcactgaacaaagcctttgccgaaatgcgcgctgacggtacttacgagaaattagcgaaaaagtacttcgattttgatgtttatggtggctaa

SEQ ID NO: 458750 - DNA, 783 bp, Shigella boydii
atgaagaagtcgattctcgctctgtctttgttagtcggtctctccgcagcggcttccagctatgcggcgctaccggagacggtacgtatcggaaccgataccacctatgcgccgttctcgtcgaaagatgctaaaggtgattttgttggctttgatatcgatctcggtaacgagatgtgcaaacggatgcaggtgaaatgtacctgggttgccagtgactttgacgcgctgatcccctcactgaaagcgaaaaaaatcgacgccattatttcgtcgctttccattaccgataaacgtcagcaggagattgccttctccgacaagctgtacgccgcagattctcgtttgattgctgccaaaggttcaccgattcagccaacgctggattcactgaaaggtaaacatgttggtgtgctgcagggatcaacccaggaagcttacgctaacgagacctggcgtagcaaaggcgtggatgtggtggcctatgccaaccaggatttggtctattccgatctggctgcaggacgtctggatgctgcgttacaagatgaagttgctgccagcgaaggattcctcaagcaacctgctggtaaagatttcgcctttgctggctcatcagtaaaagacaaaaaatacttcggtgatggcaccggtgtagggctacgtaaagatgatgctgaactgacggctgccttcaataaggcgcttggcgagctgcgtcaggacggcacctacgacaagatggcgaaaaagtatttcgactttaatgtctacggtgactga

SEQ ID NO: 458751 - DNA, 570 bp, Shigella boydii
atgaaacgactcattgtaggcatcagcggtgccagcggcgcgatttatggcgtgcgcttattacaggttctgcgcgatgtcacagatatcgaaacgcatctggtgatgagccaggcggcgcgccagaccttatccctcgaaacggatttttccctgcgcgaagtgcaggcattagctgatgtcacgcacgatgcgcgcgatatttccgccagcatctcttccggttctttccagacgctggggatggtgattttaccctgttcaatcaaaaccctttccggcattgtccatagctatactgatggcttactgacccgtgcggcagatgtggtgctgaaagagcgtcgcccgttggtgctctgcgtgcgtgaaacaccattgcacttaggccatctgcgtttaatgactcaggcggcagaaatcggtgcggtgattatgcctcctgttccggcgttttatcatcgcccgcaatcccttgatgatgtgataaatcagacggtcaatcgtgttcttgaccagtttgcaataacccttcctgaagatctctttgcccgctggcagggcgcataa

SEQ ID NO: 458752 - DNA, 1518 bp, Shigella boydii
atgtgcggtattgtcggtatcgccggtgttatgccggttaaccagtcgatttatgatgccttaacggtgcttcagcatcgcggtcaggatgccgccggcatcatcaccatagatgccaataactgcttccgtttgcgtaaagcgaacgggctggtgagcgatgtatttgaagctcgccatatgcagcgtttgcagggcaatatgggcattggtcatgtgcgttaccctacggctggcagctccagcgcctctgaagcgcagccgttttacgttaactccccgtatggcattacgcttgcccacaacggcaatctgaccaacgctcacgagttgcgtaaaaaactgtttgaagaaaaacgccgccacatcaacaccacttccgactcggaaattctgcttaatatcttcgctagcgagctggacaacttccgccactacccgctggaagccgacaatattttcgctgccattgctgccacaaaccgcttaatccgcggcgcatatgcctgtgtggcgatgattatcggccacggtatggttgctttccgcgatccaaacgggattcgtccgctggtactgggaaaacgtgatattgacgagaaccgtacagaatatatggtcgcttccgaaagcgtagcgctcgatacgctgggctttgatttcctgcgtgacgtcgcgccgggcgaagcgatttacatcactgaagaagggcagttgtttacccgtcaatgtgctgacaatccggtcagcaatccgtgcctgtttgagtatgtatactttgcccgcccggactcgtttatcgacaaaatttccgtttacagcgcgcgtgtgaatatgggcacgaaactgggtgagaaaattgcccgcgaatgggaagatctggatatcgacgtggtgatcccgatcccggaaacctcgtgtgatatcgcgctggaaattgctcgtattctgggcaagccgtaccgccagggcttcgttaaaaaccgctatgttggccgcaccttcatcatgccgggccagcagctgcgtcgtaagtccgtgcgccgtaaactgaacgccaaccgcgccgagttccgcgataaaaacgtcctgctggtcgacgactccatcgtccgtggcaccacttctgagcagattatcgagatggcacgcgaagccggagcgaagaaagtgtacctcgcttctgcggcaccggaaattcgcttcccgaacgtttatggtattgatatgccgagcgccacggaactgatcgctcacggtcgcgaagttgatgaaattcgccagatcatcggtgctgacgggttgattttccaggatctgaacgatctgatcgacgccgttcgcgctgaaaatccggatatccagcagtttgaatgctcggtgttcaacggcgtctacgtcaccaaagatgttgatcagggctacctcgatttcctcgatacgttacgtaatgatgacgccaaagcagtgcaacgtcagaacgaagtggaaaatctcgaaatgcataacgaaggatga

SEQ ID NO: 458753 - DNA, 489 bp, Shigella boydii
atggtctggattgattacgccataatcgcggtgattgctttttcctctctggttagcctgatccgcggctttgttcgtgaagcgttatcgctggtgacatggggttgtgctttctttgttgccagtcattactacacttacctgtcagtctggtttacgggctttgaagacgaactggttcgaaatggaattgccatcgcggtactgtttatcgctaccctgatcgttggtgctatcgtgaacttcgtgataggccagttggtggagaaaacggggttgtcaggcaccgatcgggtgctgggcgtctgtttcggtgcgttgcgcggtgtgttgattgttgccgccattctcttctttctcgactcctttaccggggtgtcgaaaagcgaagactggagcaaatcacagctgatcccgcagttcagttttatcatcagatgtttttttgattatctgcaaagctcgtcaagtttcttgcccagagcgtaa

SEQ ID NO: 458754 - DNA, 675 bp, Shigella boydii
gtggcaagtaagtttcagaatcggttagtgggcacgatcgtgctggtggcgctgggggtgattgtacttccagggctgctggacgggcagaaaaaacattatcaggatgagtttgcggctatcccgctggttccaaaagcgggcgatcgcgatgagcctgatatgatgccagccgccacccaggcgttgccgacgcagccgccggaaggcgcagcggaagaggtgcgggcaggtgatgccgcagcaccgtcgctcgatccggccactattgcagccaataacaccgagtttgaaccggaacctgcaccggtcgccccaccgaagccgaaaccggtggagccgcctaaaccgaaggttgaagcaccacctgcgccgaagccagaaccgaagccagaaccgaagccggtcgtggaagaaaaagcagcgccaacgggtaaagcctatgttgtgcaactgggtgcgctgaaaaatgccgataaagtgaatgagattgtcggtaagctgcgcggtgccggttatcgggtttatacgtcgccatccacgccagtgcagggtaaaattacccgtattctggttgggccggatgcctcgaaagataagctgaaaggttcgctgggtgagttgaagcaactttctggcttaagtggcgtggtaatgggctatacgccgaattaa

SEQ ID NO: 458755 - DNA, 1269 bp, Shigella boydii
atgattatcaaacgcactcctcaagccgcgtcgcctctggcttcgtggctttcttatctggaaaacctgcacagtaaaactatcgatctcggccttgagcgcgtgagccaggtcgcggctcgtcttggcgttctgaaaccagcgccatttgtgtttaccgttgcgggtacgaatggcaaaggcaccacctgccgtacgctggagtcgattctgatggcggcagggtacaaagtgggcgtctacagttcgccgcatctggtgcgttataccgagcgcgtacgtgtgcagggtcaggaattgccggaatcggcccacaccgcctcttttgcggagattgaatcggcacgcggtgatatttccctgacctatttcgagtacggtacgctgtcggcgttgtggctgttcaaacaggcacaacttgacgtggtgattctggaagtagggctgggcggtcgtctggacgcaaccaatattgtcgatgccgatgtcgcggtagtaaccagtattgcgctggatcataccgactggctggggccagatcgcgaaagtattggtcgcgagaaagcaggcatctttcgcagcgcaaaaccggcaattgtcggtgagccggaaatgccttctaccattgctgatgtggcgcaggaaaaaggtgcactgttacaacgtcggggcgttgagtggaactattccgtcaccgatcatgactgggcgtttagcgatgctcacggcacgctggaaaatctgccgttgccgcttgtcccgcaaccgaatgccgcaacagcgctggcggcactgcgtgccagcgggctggaagtcagtgaaaatgccattcgcgacgggattgccagcgcaattttgccgggacgtttccagattgtgagcgagtcgccacgcgttatttttgatgtcgcgcataatccacatgcggcggaatatctcaccgggcgtatgaaagcgctaccgaaaaacgggcgcgtgctggcggttatcggtatgctacatgataaagatattgccggaactctggcctggttgaaaagcgtggttgatgactggtattgtgcgccactggaagggccgcgcggtgccacggcagaacaactgcttgagcatttgggtaacggcaaatcatttgatagcgttgcgcaggcatgggatgccgcaatggcggacgctaaagcggaagacaccgtgctggtgtgtggttctttccacacggtcgcacatgtcatggaagtgattgacgcgaggagaagcggtggcaagtaa

SEQ ID NO: 458756 - DNA, 915 bp, Shigella boydii
atgagctggattgaacgaattaaaagcaacattactcccacccgcaaggcgagcattcctgaaggggtgtggactaagtgtgatagctgcggtcaggttttataccgcgctgagctggaacgtaatcttgaggtctgtccgaagtgtgaccatcacatgcgtatgacagcgcgtaatcgcctgcatagcctgttagatgaaggaagccttgtggagctgggtagcgagcttgagccgaaagatgtgctgaagtttcgtgactccaagaagtataaagaccgtctggcttctgcgcagaaagaaaccggcgaaaaagatgcgctggtggtgatgaaaggcactctgtatggaatgccggttgtcgctgcggcattcgagttcgcctttatgggcggttcaatggggtctgttgtgggtgcacgtttcgtgcgtgccgttgagcaggcgctggaagataactgcccgctgatctgcttctccgcctctggtggcgcacgtatgcaggaagcactgatgtcgctgatgcagatggcgaaaacctctgcggcactggcaaaaatgcaggagcgcggcttgccgtacatctccgtgctgaccgacccgacgatgggcggtgtttctgcaagtttcgccatgctgggcgatctcaacatcgctgaaccgaaagcgttaattggctttgccggtccgcgtgttatcgaacagaccgttcgcgaaaaactgccgctaggattccagcgcagtgaattcctgatcgagaaaggcgcgatcgacatgatcgtccgtcgtccggaaatgcgcctgaaactggcgagcattctggcgaagttgatgaatctgccagcgccgaatcctgaagcgccgcgtgaaggcgtagtggtacccccggtaccggatcaggaacctgaggcctga

SEQ ID NO: 458757 - DNA, 660 bp, Shigella boydii
atggacctgatttatttcctcatcgattttatcctgcacattgacgtgcatctggcagagctggtcgcggagtacggcgtctgggtttatgccattctgtttttgattctgttctgcgaaacggggctggtggtaacgccattcctgcctggtgattcgctgctgtttgttgctggtgcattggcgtcgctggaaactaacgatctcaatgtccatatgatggtggtgcttatgttgattgccgctattgtcggtgatgcagtgaactataccattggacggttatttggtgacaaactgttcagtaacccggattcgaaaatctttcgttgcagttatcttgataagactcatcagttttacgagagacatggcggcaaaacgattattctcgcccgttttgtaccgatcgtcagaacgttcgcgccgtttgttgcgggaatgggccacatgtcgtaccgtcatttcgtcgcttataacgtgatcggcgcactgttgtgggtactgatttttacctacgcgggttatttcttcggcacgctccccttcattcagagcaaccttaagctgatgattgttggcattatttttgtttcaatattgcctggggttttcgaatttattcgtcacaaacgcgctgcggcacgcgccgcaaaataa

SEQ ID NO: 458758 - DNA, 813 bp, Shigella boydii
atgtccgaccagcaacaactgccagtttataaaattgcgctgggcattgagtacgacggcagtaagtattacggctggcaacggcagaatgaagtccgcagtgtgcaggagaagctggaaaaggcgctctcccaggtggcgaacgaacccatcaccgtcttctgcgccgggcgtactgacgcaggggtacacggtaccgggcaggtggtgcatttcgaaacaaccgcgcagcgcaaagacgcggcgtggaccttgggcgtaaatgcgaatttacctggtgacatcgccgtgcgttgggttaaagctgtacctgatgattttcatgcccgatttagcgccacggctcgccgttatcgctacatcatctacaatcatcggctgcgcccggcggtactgagtaaaggggtaacccatttttacgaaccgctggacgctgaacggatgcatcgggctgcgcaatgcttgctgggcgagaatgatttcacctcgttccgtgcggtgcagtgccagtcccgaaccccgtggcgcaacgttatgcatattaatgtcacgcgtcacggtccttatgtggtggtagatatcaaagcgaatgcctttgtacatcatatggtcaggaatattgtcggcagcctgatggaagtcggtgcccacaaccagccggagagctggatagcagagttgctggcggcaaaggacagaacgctggcggcagcaacggcaaaagcggaagggctgtatctggtcgcggtggattaccctgaccggtatgatcttccaaaaccgccaatgggcccgctatttctggcggactaa

SEQ ID NO: 458759 - DNA, 1014 bp, Shigella boydii
atgtctgaaggctggaacattgccgtcctgggcgcaactggcgctgtgggcgaagccctgcttgaaacgctggctgaacgtcagttcccggttggggaaatttatgcactggcacgtaacgaaagcgcaggcgaacaactgcgctttggtggtaaaacaatcaccgtgcaggatgccgctgaattcgactggacgcaggcgcagctggcattttttgtcgcaggcaaagaagctaccgctgcctgggttgaagaagcgaccaactcaggttgcctggtgatcgacagcagcggactgtttgctctcgaacccgacgtaccgctggtggtgccggaagtaaacccgtttgtactgaccgattaccgcaaccggaatgtcatcgccgtaccagacagtctgaccagccagctgctggcggcactgaaaccgttaatcgatcagggcggtttgtcgcgtatcagtgttaccagcctgatttcagcctccgcccagggcaaaaaagcggtcgatgcgttagcggggcagagtgcgaaattgctcaacggcattccgattgacgaagaagatttcttcggtcgtcaactggcgttcaatatgctgccgttgttgccggatagcgaaggtagcgtgcgtgaagaacgtcgtatcgttgacgaagtacgcaaaatcctgcaggacgaagggctgatgatttcggcaagcgtcgtccaggcaccggtattctacggtcatgcccagatggtcaactttgaagcactgcgtccgctggcggcagaagaagcgcgtgatgcgtttgctcagggcgaagatattgtgctctctgaagagaacgaattcccgactcaggtaggggatgcttcgggtacgccgcatctttctgttggctgcgtgcgtaatgactacggtatgccggagcaagtccagttctggtcggtggccgataacgttcgctttggcggcgcgctgatggcagtaaaaatcgccgagaaactggtgcaggagtatctgtactaa

SEQ ID NO: 458760 - DNA, 1137 bp, Shigella boydii
gtgaaaatccttgttgatgaaaatatgccttatgcccgcgacttatttagccgtttgggtgaggtgaccgcggttcccgggcgtccaatccccgtcgctcaactggcagacgcggatgcgctgatggtgcgttcggtcacgaaagtgaatgaatctttgctggcaggaaaacccattaaatttgttggcactgccactgctgggaccgaccatgtcgatgaagcatggttgaagcaggcgggaattggtttttccgctgcacctggctgtaatgcgattgcggtggtggaatatgttttctcctcactactgatgcttgccgaacgcgatggattttcactgcacgaccgtacggtggggatcgtgggcgttggtaacgttggacgtcgattgcaggcgcgactggaagcgttagggattaaaacattgctttgcgatccgcctcgcgctgaccgtggggatgagggtgatttccgctcgctggatgaattagttcagcatgcggatattctgactttccatacgccactcttcaaagatgggccgtacaaaacgctgcatctggcggatgaaaaactgatccgtagcctgaagccgggagcgattctgattaacgcttgccgtggcgcagtcgtcgataatactgcgttgctgacctgcctgaatgaaggccagaagttaagcgtagtgctggatgtctgggaaggcgaaccggaacttaacgtggagttgctgacaaaagtggatatcggcacgccgcatatcgcaggttataccctggaaggtaaagcacgcggtactacgcaagtgtttgaagcctatagcaagtttattgggcatgaacagcacgttgcgctggatacattactgcccgcgccagagtttggtcgcattacgctgcatggcccgctcgatcaaccgacgctgaaaaggctggtgcatttggtgtatgatgtgcgccgcgatgacgcaccgctgcgtaaagtcgccgggataccgggtgagttcgataaactgcgcaaaaactatcttgagcgccgtgaatggtcatctctgtatgtaatttgtgatgacgccagtgcggcatcattgctgtgtaaactgggttttaacgccgttcatcatccggcacgttaa

SEQ ID NO: 458761 - DNA, 996 bp, Shigella boydii
atgatacaacctatttccggccctcctcctgggcaaccaccaggtcagggagataacctgccgtctggcgcgggcaatcagcctttatccagtcagcaacgtacttcgctggaaagcttaatgacgaaagtgacctcactgacgcaacagcaaagagcagaactgtgggcgggtatcaggcacgatattggtctgtcgggagattcaccgctgctttcgcgtcacttccctgccgctgagcataatctggcgcaacgtctgctggccgcgcaaaaaagccattctgcccgccagcttttagcgcaattaggggagtatttacgtctggggaataatcgtcaggcggtcacggattatatccgtcataactttggtcagacgccgctgaatcagctctcaccggagcaattaaaaaccattctcaccctattgcaggaagggaagatggttattccgcaaccgcagcagcgcgaggcgaccgaccgtcctttattaccggcggagcacaatgcgctaaaacagctggtgaccaaacttacggcggcaacgggggaacccagcaaacagatctggcaatcgatgctggaactttccggggtgaaagatggcgagttaattccagcgaaactgtttaaccatctggtgacctggctacaggcgcgtcagacgctaagccagcaaaatacgccgacgctggaatcactacagatggcgctaaaacaacctttagatgccagtgaactggcggcgttatcggcatatatccagcaaaaatatggcctttctgcgcaatcatcgctttcttctgcccaggccgaggatattcttaatcagctttatcaacggcgggttaaagggattgatccgcgtgatatgcaaccgctgcttaatccttttccaccgatgatggacacgttgcaaaatatggcaacgcgtcccgtgctgtggatactgttagtcgcgattatcctgatgctggtctggctggttcgttaa

SEQ ID NO: 458762 - DNA, 1179 bp, Shigella boydii
atgactgctgtaagccaaaccgaaacacgatcttctgccaatttttcgctcttccgcatcgcttttgcggtttttctcacctacatgaccgtagggctgccgttgccggttatcccgctgtttgttcatcatgatctgggctatggcaataccatggtcgggattgccgtcgggattcagtttctggctacggtgctgacgcgtggctatgccgggcgactggccgatcaatatggtgcaaaacgttcggcgcttcaggggatgttagcttgtggtctggctggcggcgcgttgctgctggcggcgattttgcctgtctccgcaccgttgaaatttgccctgttggtcgtcgggcgtttgattcttggctttggtgaaagccagttactgacaggcgctctgacctggggattaggcatcgtaggggcaaaacactctggcaaagtgatgtcatggaacggaatggcgatttacggtgccctcgctgttggtgcgccgcttggcctgttgattcatagccattacggttttgccgcactggcgatcaccacaatggtattacccttactggcgtgggcctgtaacggcacagtgcgcaaagtaccggccctggcgggagaacgtccatcgctgtggagcgttgtcgggcttatctggaaaccagggttagggctggcactacaaggcgttggttttgcggttatcgggactttcgtttcgctctactttgccagcaaaggatgggcgatggcgggctttactcttaccgcgtttggcggcgcatttgtcgtgatgcgcgtcatgtttggctggatgccggaccgttttggcggcgtgaaagtggcgattgtctctctgcttgtagaaacggtgggcttgttgctgctctggcaagccccaggtgcatgggtcgcattagcgggcgcggcgttaaccggagccggatgttcgcttatctttcctgcgctgggcgtggaggtggttaaacgcgtcccctcacaagttcgcggcaccgcactgggcggttacgccgcgtttcaggatatcgccctcggcgtctccgggccgctggcgggaatgctggcgaccacgtttggttactcttcggtatttcttgccggggcgatctctgcggtgctgggtattattgtcacgatactgtcatttcgtcggggttaa

SEQ ID NO: 458763 - DNA, 1221 bp, Shigella boydii
atgaaacgtgcagtgattactggcctgggcattgtttccagcatcggtaataaccagcaggaagtcctggcatctctgcgtgaaggacgttcagggatcactttctctcaggagctgaaggattccggcatgcgtagccacgtctggggcaacgtaaaactggataccactggcctcattgaccgcaaagttgtgcgctttatgagcgacgcatccatttatgcattcctttctatggagcaggcaatcgcagatacgggcctttctccggaagcttaccagaataacccacgcgttggcctgattgcaggttctggcggcggttccccgcgtttccaggtattcggcgctgacgcaatgcgcggcccgcgcggcctgaaagcggttggcccgtatgtggtcaccaaagcgatggcatccggcgtttctgcctgcctcgccacgccgtttaaaattcatggcgttaactactccatcagctccgcgtgtgcgacttccgcacactgtatcggtaacgcagtagagcagatccaactgggcaaacaggacatcgtgtttgctggcggcggcgaagagctgtgctgggaaatggcctgcgaattcgacgcgatgggtgcgctgtctactaaatacaacgacaccccggaaaaagcctcccgtacttacgacgctcaccgtgacggtttcgttatcgctggcggcggcggtatggtagtggttgaagagctggaacacgcgctggcgcgtggtgctcacatctatgctgaaatcgttggctacggcgcaacctctgatggtgcagacatggttgctccgtctggcgaaggcgcagtacgctgcatgaagatggcgatgcacggcgttgataccccaatcgattacctgaactctcatggtacttcgactccggttggcgacgtgaaagaactggcagctatccgtgaagtgttcggcgataagagcccggcgatttctgcaaccaaagccatgaccggtcactctctgggcgctgctggcgtacaggaagctatctactctctgctgatgctggaacacggctttatcgccccgagcatcaacattgaagagctggacgagcaggcggcaggtctgaacatcgtgaccgaaacgaccgatcgcgaactgaccaccgttatgtctaacagcttcggcttcggcggcaccaacgccacgctggtaatgcgcaagctgaaagattaa

SEQ ID NO: 458764 - DNA, 2007 bp, Shigella boydii
gtgaaacactactccatacaacctgccaacctcgaatttaatgctgagggtacacctgtttcccgagattttgacgatgtctatttttccaacgataacgggctggaagagacgcgttatgtttttctgggaggcaaccaattagaggtacgctttcctgagcatccacatcctctgtttgtggtagcagagagcggcttcggcaccggattaaacttcctgacgctatggcaggcatttgatcagtttcgcgaagcgcatccgcaagcgcaattacaacgcttacatttcattagttttgagaaatttcccctcacccgtgcggatttagccttagcgcatcaacactggccggaactggctccgtgggcagaacaacttcaggcgcagtggccaatgcccttgcccggttgccatcgtttattgctcgatgaaggccgcgtgacgctggatttatggtttggcgatattaacgaactgaccagccaactggacgattcgctaaatcaaaaagtagatgcctggtttctggacggctttgcgccagcgaaaaacccggatatgtggacgcaaaatctgtttaacgccatggcaaggttggcgcgtccgggcggcacgctggcgacatttacgtctgccggttttgtccgccgcggtttgcaggacgccggattcacgatgcaaaaacgtaagggctttgggcgcaaacgggaaatgctttgcggggtgatggaacagacattaccgctcccctgctccgcgccgtggtttaaccgcacgggcagcagcaaacgggaagcggcgattatcggcggtggtattgcctgcgcgttgttgtcgctggcgctattacggcgcggctggcaggtaacgctttattgcgcggatgaggcccccgcactgggtgcttccggcaatcgccagggggcgctgtatccgttattaagcaaacacgatgaggcgctaaaccgctttttctctaatgcgtttacttttgctcgtcggttttacgaccaattacccgttaaatttgatcatgactggtgcggcgtcacgcagttaggctgggatgagaaaagccagcataaaatcacacagatgttgtcaatggatttacccgcagaactggctgtagccgttgaggcaaatgcggttgaacaaattacgggcgttgcgacaaattgcagcggcattacttatccgcaaggtggttggctgtgcccagcagaactgacccgtaatgtgctggaactggcgcaacagcagggtttgcagatttattatcaatatcagttacagaatttatcccgtaaggatgactgttggttgttgaattttgcaggagatcagcaagcaacacacagcgtagtggtactggcgaacgggcatcaaatcagccgattcagccaaacgtcgactctcccggtgtattcggttgccgggcaggtcagccatattccgacaacgccggaattggcagagctgaagcaggtgctgtgctatgacggttatctcacgccacaaaatccggcgaatcaacatcattgtattggtgccagttatcatcgcggcagcgaagatacggcgtacagtgaggacgatcagcagcagaatcgccagcggttgattgattgtttcccgcaggcacagtgggcaaaagaggttgatgtcagtgataaagaggcgcgctgcggtgtgcgttgtgccacccgcgatcatctgccaatggtaggcaatgttcccgattatgaggcaacactcgtggaatatgcgtcgttggcggagcagaaagatgaggcggtaagcgcgccggtttttgacgatctctttatgtttgcggctttaggttctcgcggtttgtgttctgccccgctgtgtgccgagattctggcggcgcagatgagcgacgaaccgattccgatggatgccagtacgctggcggcgttaaacccgaatcggttatgggtgcggaaattgttgaagggtaaagcggttaaggcggggtaa

SEQ ID NO: 458765 - DNA, 279 bp, Shigella boydii
atgatcgcggagtttgaatcacgcattctggcattaatcgacggcatgattgaccatgccagtgatgatgagttgtttgccagtgggtatttgcgtggccacctgacattagccatcgcagaactggaaagtggtgatgaccactccgctcaggcggtgcatacgaccgttagccagagtctggaaaaagccattggtgccggtgaattgtcgccgcgtgaccaggcgctggtgaccgatatgtgggaaaacctgtttcagcaggcgtcacagcagtaa

SEQ ID NO: 458766 - DNA, 549 bp, Shigella boydii
atgaacagtacacaccactatgagcagttgattgaaatttttaatagctgctttgccgatgaatttaatacccgtctgattaaaggcgacgacgaaccgatctatcttcctgctgatgcggaagtaccgtataaccgaattgtctttgcccacggcttttatgccagcgcaattcatgagatttcgcactggtgtattgccggaaaagcgcgccgtgagctggttgatttcggctactggtattgcccggatgggcgtgatgcccaaacgcaaagccagtttgaagatgttgaagtgaagccgcaggcactcgactggttgttctgtgtggcggcgggatatccgtttaacgtcagttgcgacaatctggaaggcgacttcgaaccggatcgtgtggtgtttcaacggcgggtacatgcgcaggtgatggattatctgacaaatggcattcccgagcgtccggcacgcttcattaaagcactacaaaattattatcacacgctggaacttacggcggaacagttcccgtggccggaagcgctcaactga

SEQ ID NO: 458767 - DNA, 810 bp, Shigella boydii
atggaaacgtttaatagcctgtttatggtttccccgctgttgctgggagttctcttttttgtcgccatgctggcgggatttatcgactcgattgccggtggcggtgggttactcaccattccggcattgatggctgcgggaatgtctcccgctaacgcgctggcaaccaataaactgcaagcctgcggcggctctatttccgccactatctactttattcgccgcaaagtggttagtttaagcgatcagaaactcaatatcgccatgacctttgtcggctcaatgagcggcgcactgctggtgcaatacgttcaggctgatgtcttacggcagattttgcccattctggtaatttgtatcggcctctatttcttgctgatgccaaagctgggtgaagaagatcgccagcgccggatgtacggtttacccttcgcgttaattgccggtggctgcgtcggtttttatgacggattctttggcccggctgccggatcgttttacgcgctggccttcgttacgctgtgcggattcaacctcgccaaagccacggctcacgccaaattactcaacgcaacgtcaaacattggcggtctgctgctgtttattctcggcggcaaagtgatttgggcgacgggctttgtcatgctggtggggcagttcctcggcgcgcgcatgggttcaagactggtgctgagcaaaggacaaaaactgatccgcccgatgatcgttatcgtctcggcggtgatgagtgccaaattactttacgatagccacggacaggagatcctccactggttggggatgaactaa

SEQ ID NO: 458768 - DNA, 825 bp, Shigella boydii
atgaacaaaaccgcgattgcgctgctggctctgcttgccagtagcgctagcttggcagcgacgccgtggcaaaaaataacccaacctgtgccgggtagcgcacaatcgataggcagtttttctaatggctgtattgtcggcgctgacacgttgccgatacagtccgaacattatcaggtcatgcgtaccgatcagcgtcgctatttcggtcacccggatctggtgatgtttatccagcgtctgagtagccaggtgagcaatctgggcatgggtacggtgctgattggcgatatggggatgcccgctggtgggcgtttcaacggcggtcatgccagccaccagaccggactggatgtcgatatctttctgcaactgccgaaaactcgctggacctccgcgcagctcttgcgcccgcaagcactggacttagtttcccgcgacggtaaacacgttgtctccacgctgtggaagccagaaattttcagcttgatcaaactcgccgcccaggacaaagacgtcacgcgcatttttgttaatccggcgattaaacaacaactttgccttgatgcgggcaccgatcgcgactggttgcgcaaagtgcgaccctggttccagcatcgcgcgcatatgcatgtacgattacgttgccctgccgatagtctggagtgtgaagatcaacctttaccgccaccaggcgatggttgcggggcagaactgcaaagctggtttgcacctccaaaaccaggaacaacaaagcctgagaagaagacaccgcctccgttgccgccttcctgccaggcgctactggatgagcacgtgatctaa

SEQ ID NO: 458769 - DNA, 1086 bp, Shigella boydii
atggctggaaacacaattggacaactctttcgcgtaaccaccttcggcgaatcgcatgggctggcgctcggctgcatcgtcgatggtgttccgccaggcattctgctgacggaagcggacctgcaacatgacctcgaccgtcgtcgccctgggacatcgcgctataccacccagcgccgcgagccggatcaggtcaaaattctctccggtgtttttgaaggcgttactactggcaccagcattggcttgttgatcgaaaacactgaccagcgctctcaggattacagcgcaattaaagacgttttccgcccaggccatgctgattacacctacgaacaaaaatacggtctgcgcgattatcgcggcggtggacgttcttccgcccgcgaaactgccatgcgcgtggcggcaggggcgattgccaaaaaatatctcgccgagaaatttggtattgaaatccgcggctgcttgacccagatgggcgacattccgctggaaatcaaagactggtcgctggttgaacaaaatccgttcttctgcccggatccggacaaaatcgacgcgttagatgaactgatgcgcgcgctgaaaaaagagggcgactccatcggcgcgaaagtcaccgttgttgccagtggcgtccccgccggacttggcgagccggtatttgaccgcctggatgccgacatcgcccatgcgctgatgagcatcaacgcggtgaaaggcgtggaaattggcgacggctttgacgtagtggcgctgcgcggcagccagaaccgcgacgaaatcaccaaagacggtttccagagcaaccatgcgggcggcattctcggcggtatcagcagcgggcagcaaatcattgctcatatggcgctgaaaccgacctccagcattaccgtgccggggcgcactattaaccgctttggcgaagaagttgagatgatcaccaaaggccgtcacgatccctgtgtcgggatccgtgcagtgccgatcgctgaagcgatgctggcgatcgttttaatggatcacctgttacggcagcgggcgcaaaatgccgatgtgaagactgatattccacgctggtaa

SEQ ID NO: 458770 - DNA, 933 bp, Shigella boydii
gtggataaaattttcgttgatgaagcagtaaatgagctgcaaaccattcaggacatgttgcgctggtcagtgagccgcttcagcgcggcaaatatctggtacggtcacggcaccgataacccgtgggatgaagccgtacagctggtgttaccatcgctctacctgccgctggatatcccggaagatatgcgcaccgcgcgtctgacctccagcgaaaaacatcgtattgttgaacgcgtgatccgccgcgtcaacgagcgcattccggtggcttacctgaccaacaaagcctggttctgcggtcatgaattttacgtcgatgaacgcgtgctggtgccgcgctcgccgattggtgaactgatcaacaataaatttgccggactcatcagcaaacaaccgcagcatattttagatatgtgtaccggtagcggctgcatcgccattgcctgtgcttatgccttcccggatgcagaagtcgacgcggtggatatctctcccgacgcgctggcggttgctgaacagaacatcgaagaacacggtctgatccacaacgtcattccgattcgttccgatctgttccgcgacttgccgaaagtgcagtacgatctgattgtcactaacccgccgtatgtcgacgcggaagatatgtccgacctgccaaacgaataccgtcacgagccggaactgggcctggcatctggcaccgacggccttaaactgacgcgtcgcattcttggaaacgcggcagattaccttgctgatgatggcgtgttgatttgtgaagtcggcaacagcatggtacatcttatggaacaatatccggatgttccgttcacctggctggagtttgataacggcggcgatggtgtgtttatgctcaccaaagagcagctgctggcggcccgtgaatatttcgcgatttataaagattaa

SEQ ID NO: 458771 - DNA, 552 bp, Shigella boydii
atgaaaaagaaaacaacacttagcgaggaggaccaggctctgtttcgccagttgatggcggggactcgcaagattaagcaggacacgattgtccaccgaccgcagcgtaaaaaaatcagcgaagtgccggtgaaacgcttgatccaggagcaggctgatgccagccattatttctccgatgagtttcagccgttattaaataccgaaggtccggtgaaatatgttcgcccggatgtcagccatttcgaggcgaagaaactgcgccgcggcgattattcaccggaattgtttttggatttacacggtctgacgcagctgcaggccaagcaggaactgggcgcgttgattgccgcctgtcgccgcgaacatgtgttttgtgcctgcgtgatgcatgggcacgggaagcatattttgaagcaacaaacaccgctgtggctggcacaacatccgcatgtgatggcatttcaccaggcaccgaaagagtacggcggtgatgcggctttgttggtgttgattgaagtggaagagtggttgccgccggagttgccctga

SEQ ID NO: 458772 - DNA, 576 bp, Shigella boydii
atgtcagcctgtcctggattagagcagtatgatagccagaccaaaacgggatggacatgtaatgaattaaagatgtttgtttattacgatgggaatttacatggttgtccgtggattgtgtcgtcgtttgttaagagtagagatcccttcgctaaaacgtatgatgatgattttcctgactatattggcccaacgaaggtgagttcttcatgtccggcggtgcccctggcaccgtatgatgtttcctggaatgaaaattatgttgtacataacaaagtcgtcaggttgcagtcaacaggtggtgttattgagcaaacactgcccactttcctgatggaaaatggcaaactgtgtaacgggaataattttgatgagcgtggtgtctactgccgttttatcgcacagcagatgaccttctcgacttccggctgtgataatgccaaagtgacggtgacgcctgagccgcaaccgattacgtccaggcaactgcatgatatgaagctacgcgtggacacgacatctcgacagcccatagattctacctgccgattcacttacatactgaatatgtattag

SEQ ID NO: 458773 - DNA, 471 bp, Shigella boydii
atgaccgaaatacaacgcctgctgaccgaaacgattgagtctctgaatacccgcgaaaaacgcgacaacaaaccccgctttagtatcagttttatccgtaaacatccggggctgtttatcggtatgtacgttgctttttttgccaccctggcggtgatgttgcagtccgaaacgctgtcaggctctgtctggctactggttgtattatttatcctgcttaatggtttcttctttttcgatgtctacccacgctaccgctatgaagatatcgacgtgctggatttccgcgtttgctataacggcgaatggtacaacacgcgctttgtacctgccgcgctggttgaagccatcttgaactctccgcgtgtcgcggatgttcataaggaacaactgcaaaaaatgatcgtccgtaaaggtgaactgtctttttacgatatttttaccctcgctcgcgccgaatcaacatcttaa

SEQ ID NO: 458774 - DNA, 552 bp, Shigella boydii
atgagcacagaaaaagaaaagatgattgctggtgagttgtatcgctcggcagatgagacgttatctcgcgatcgcctgcgcgctcgtcagcttattcaccgatacaatcattccctggcggaagagcacacattacgccagcaaattctcgctgatttattcggtcaggtgacagaggcttatattgagccaacgtttcgctgtgattatggctataacatttttctcggcaataattttttcgccaacttcgattgcgtgatgcttgatgtctgccctattcgcatcggtgataactgtatgttggcaccaggcgttcatatctacacggcaacacatcccatcgaccctgtagcacgtaatagcggtgctgaactggggaaacccgtcaccatcggtaataacgtctggattggcggacgcgcggtcattaaccctggtgtgaccattggtgataacgtcgtggtagcttcaggtgcagttgtcacaaaaggtgtcccggacaacgttgtcgtgggcggtaatccagccagaataattaaaaaattgtaa

SEQ ID NO: 458775 - DNA, 231 bp, Shigella boydii
atgggtagaagtatgtccgaaaaacctttaacgaaaaccgattatttaatgcgtttacgtcgttgccagacaattgacacgctggagcgtgttatcgagaaaaataaatacgaattatcagataatgaactggcggtattttactcagccgcagatcaccgcctcgccgaattgaccatgaataaactatacgacaagatcccttcctcagtatggaaatttattcgctaa

SEQ ID NO: 458776 - DNA, 126 bp, Shigella boydii
atggatgaatactcacccaaaagacatgatatcgcacagcttaagtttctctgtgaaaccctgtatcatgactgccttgcaaaccttgaagaaagcaattatggctgggttaacgacccaacctag

SEQ ID NO: 458777 - DNA, 3150 bp, Shigella boydii
atgcctaatttctttatcgatcgcccgatttttgcgtgggtgatcgccattatcatcatgttggcaggggggctggcgatcctcaaactgccggtggcgcaatatcctacgattgcaccgccggcagtaacgatctccgcctcctaccccggcgctgatgcgaaaacagtgcaggacacggtgacacaggttatcgaacagaatatgaacggtatcgataacctgatgtacatgtcctctaacagtgactccacgggtaccgtgcagatcaccctgacctttgagtctggtactgatgcggatatcgcgcaggttcaggtgcagaacaaactgcagctggcgatgccgttgctgccgcaagaagttcagcagcaaggggtgagcgttgagaaatcatccagcagcttcctgatggttgtcggcgttatcaacaccgatggcaccatgacgcaggaggatatctctgactacgtagcggcgaatatgaaagatgccatcagccgtacgtcgggcgtgggtgatgttcagttgttcggttcacagtacgcgatgcgtatctggatgaacccgaatgagctgaacaaattccagctaacgccggttgatgtcattaccgccatcaaagcgcagaacgcccaggttgcggcgggtcagctcggtggtacgccgccggtgaaaggccaacagcttaacgcctctattattgctcagacgcgtctgacctctactgaagagttcggcaaaatcctgctgaaagtgaatcaggatggttcccgcgtcctgctgcgtgatgtggcgaagattgagctgggtggtgagaactacgacatcatcgcagagtttaacggccaaccggcttccggtctggggatcaagctggcgaccggtgcaaatgcgctggataccgctgcggcaatccgtgctgaactggcgaagatggaaccgttcttcccgtcgggtctgaaaattgtttacccgtacgacaccacgccgttcgtgaaaatctctattcacgaagtggttaaaacgctggtcgaagcgatcatcctcgtgttcctggttatgtatctgttcctgcagaacttccgcgcgacgttgattccgaccattgccgtaccggtggtattgctcgggacctttgccgtccttgccgcctttggcttctcgataaacacgctaacaatgttcgggatggtgctcgccatcggcttgttggtggatgacgctatcgttgtggtagaaaacgtggagcgtgttatggcggaagaaggtttaccgccaaaagaagctacccgtaagtcgatggggcagattcagggcgctctggtcggtatcgcgatggtactgtcagcggtattcgtaccgatggccttctttggcggttctactggtgctatctatcgtcagttctctattaccattgtttcagcaatggcgctgtcggtactggtagcgttgatcctgactccggctctttgtgccaccatgctgaaaccgattgccaaaggcgatcacggggaaggtaaaaaaggcttcttcggctggtttaaccgcatgttcgagaagagcacgcaccactacaccgacagcgtaggcggtattctgcgcagtacggggcgttacctggtgctgtatctgatcatcgtggtcggcatggcctatctgttcgtgcgtctgccaagctccttcttgccagatgaggaccagggcgtatttatgaccatggttcagctgccagcaggtgcaacgcaggaacgtacgcagaaagtgctcaatgaggtaacgcattactatctgaccaaagaaaagaacaacgttgagtcggtgttcgccgttaacggcttcggctttgcgggacgtggtcagaataccggtattgcgttcgtttccttgaaggactgggccgatcgtccgggcgaagaaaacaaagttgaagcgattaccatgcgtgcaacacgcgctttctcgcaaatcaaagatgcgatggttttcgcctttaacctgcccgcaatcgtggaactgggtactgcaaccggctttgactttgagctgattgaccaggctggccttggtcacgaaaaactgactcaggcgcgtaaccagctgcttgcagaagcagcaaagcatcctgatatgttgaccagcgtacgtccaaacggtctggaagataccccgcagtttaagattgatatcgaccaggaaaaagcgcaggcgctgggtgtttctatcaacgacattaacaccactctgggcgctgcatggggcggtagctatgtgaacgactttatcgaccgcggtcgtgtgaagaaagtttacgtcatgtcagaagcgaaataccgtatgctgccggatgatatcggcgactggtatgttcgtgctgctgatggtcagatggtgccgttctcggcattctcctcttctcgttgggagtacggttcgccgcgtctggaacgttacaatggcctgccatccatggaaatcttaggccaggcggcaccgggtaaaagtaccggtgaagcaatggagctaatggaacaactggcgagcaaactgcctaccggtgttggctatgactggacggggatgtcctatcaggaacgcctctccggcaaccaggcaccttcactgtacgcgatttcgttgattgtcgtattcctgtgtctggcggcgctgtacgagagctggtcgattccgttctccgttatgctggtcgttccgctgggggttatcggtgcgttgctggctgccaccttccgtggcctgaccaatgacgtttacttccaggtaggcctgctcacaaccattgggttgtcggcgaagaacgcgatacttatcgtcgaattcgccaaagacttgatggataaagaaggtaaaggtctgattgaagcgacgcttgatgcagtgcggatgcgtttacgtccgatcctgatgacctcgctggcgtttatcctcggcgttatgccgctggttatcagtactggtgctggttccggcgcgcagaacgcagtaggtaccggtgtaatgggcgggatggtgaccgcaacggtactggcaatcttcttcgttccggtattctttgtggtggttcgccgccgctttagccgcaagaatgaagatatcgagcacagccatactgtcgatcatcattga

SEQ ID NO: 458778 - DNA, 1194 bp, Shigella boydii
atgaacaaaaacagagggtttacgcctctggcggtcgttctgatgctctcaggcagcttagccctaacaggatgtgacgacaaacaggcccaacaaggtggccagcagatgcccgccgttggcgtagtaacagtcaaaactgaacctctgcagatcacaaccgagcttccgggtcgcaccagtgcctaccggatcgcagaagttcgtcctcaagttagcgggattatcctgaagcgtaatttcaaagaaggtagcgacatcgaagctggtgtctctctctatcagattgatcctgcgacctatcaggcgacatacgacagtgcgaaaggtgatctggcgaaagcccaggctgcagccaatatcgcgcaattgacggtgaatcgttatcagaaactgctcggtactcagtacatcagtaagcaagagtacgatcaggctctggctgatgcgcaacaggcgaatgctgcggtaactgcggcgaaagctgccgttgaaactgcgcggatcaatctggcttacaccaaagtcaccgctccgattagcggtcgcattggtaagtcgaacgtgacggaaggcgcattggtacagaacggtcaggcgactgcgctggcaaccgtgcagcaacttgatccgatctacgttgatgtgacccagtccagcaacgacttcctgcgcctgaaacaggaactggcgaatggcacgctgaaacaagagaacggcaaagccaaagtgtcgctgatcaccagtgacggcattaagttcccgcaggacggtacgctggaattctctgacgttaccgttgatcagaccactgggtctatcaccctacgcgctatcttcccgaacccggatcacactctgctgccgggtatgttcgtgcgcgcacgtctggaagaagggcttaatccaaacgctattttagtcccgcaacagggcgtaacccgtacgccgcgtggtgatgccaccgtactggtagttggcgcggatgacaaagtggaaacccgtccgatcgttgcaagccaggctattggcgataagtggctggtgacagaaggtctgaaagcaggcgatcgcgtagtaataagtgggctgcagaaagtgcgtcctggtgtccaggtaaaagcacaagaagttaccgctgataataaccagcaagccgcaagcggtgctcagcctgaacagtccaagtcttaa

SEQ ID NO: 458779 - DNA, 648 bp, Shigella boydii
atggcacgaaaaaccaaacaagaagcgcaagaaacgcgccaacacatcctcgatgtggctctacgtcttttctcacagcagggggtatcatccacctcgctgggtgagattgcaaaagcagctggcgttacgcgcggtgcaatctactggcattttaaagacaagtcggatttgttcagtgagatctgggaactgtcagaatccaatattggtgaactagagcttgagtatcaggcaaaattccctggcgatccactctcagtattaagagagatattaattcatgttcttgaatccacggtgacagaagaacgacgtcgattattgatggagattatattccacaaatgcgaatttgtcggagaaatggctgttgtgcaacaggcacaacgtaatctctgtctggaaagttatgaccgtatagaacaaacgttaaaacattgtattgaagcgaaaatgttgcctgcggatttaatgacgcgtcgggcagcaattattatgcgcggctatatttccggcctgatggaaaactggctctttgccccgcaatcttttgatcttaaaaaagaagcccgcgattacgtcgccatcttactggagatgtatctcctgtgccccacgcttcgtaatcctgccactaacgaataa

SEQ ID NO: 458780 - DNA, 3363 bp, Shigella boydii
atgactatgttccagtattacaaacgatcacggcattttgttttttcagcatttattgcttttgtttttgtcttgttatgccagaacacggcgtttgcgcgggcgtcatcgaatggtgatctgccgacaaaagcggacctgcaggcgcaacttgactcactaaataaacaaaaagatctttctgctcaggacaaactggagcagcaggatctgacagatacattagccaccctcgataaaatcgatcgcataaaagaagagacagttcagctacggcaaaaagtcgctgaagcgccggaaaaaatgcgccaggcgaccgcggcgttaacagcacttagcgatgtcgataacgacgaagaaacgcgcaaaattctgagtacgctttcgttgcgccagctggaaactcgcgttgcccaggcgctggacgatttgcaaaacgcacaaaacgatctggcgtcttataacagccagctggtttcgttacagacgcagcccgaacgcgtgcaaaatgcgatgtataacgcttcgcagcagctgcaacaaattcgcagtcgtctggatgggactgatgtcggcgagactgccttacgtcccagccagaaagtgttaatgcaggctcagcaggcgttgctgaatgcggagattgaccagcagcgtaaaagcctggaagggaacaccgtcttgcaggataccttgcaaaagcaacgtgattacgtgacggcgaacagcgcccgtctggagcaccagttgcagctgttgcaagaagcggtaaacagcaagcgcctgactttaactgaaaaaacggcgcaggaagccgtctccccggatgaagccgcgcgtattcaggctaatccgctggtgaaacaggaactggaaattaaccagcagttaagtcagcgtctgattaccgcgactgaaaacggtaatcagttgatgcagcaaaacattaaagtcaaaaactggctggagcgggcgctgcaatcggaacgcaatattaaagagcagattgccgtcctgaagggcagcctgctgttgtctcgtatcctttaccagcaacaacaaacgctgccctcggcggatgaactggaaaacatgaccaaccgcatcgcggatttgcgtctcgaacagtttgaagttaaccagcagcgtgatgcactcttccagagcgatgcgttcgtcaacaaactggaagaaggtcacaccaacgaagtcaacagcgaagttcacgatgcgttattgcaagtggttgatatgcgtcgcgaattgctggttcaactcaacaaacagttgggtaaccagctgatgatggccattaacctgcaaatcaaccagcagcagttaatgagcgtatcgaaaaacctgaaatccatcctgactcagcaaatcttttgggtgaacagtaaccgtccaatggactgggactggatcaaagcgttcccgcaaagcctgaaagatgaatttaagtcgatgaaaatcacggtgaactgggaaaaagcctggcctgccgtttttatcgctttcctcgccggtttgccgctgctgttgattgccgggctgatccactggcgtctgggctggctgaaagcgtatcaacaaaaactggcttccgctgtgggttccctgcgtaacgatagccagctcaacacaccaaaagcgatccttatcgacctgatccgcgcgctgccggtgtgcctgattattctcgcggttggcctgattctgttgaccatgcagctcaacatcagcgaactgctatggtcgttcagcaaaaaactggcgattttctggctggtgtttggcctgtgctggaaggtactggagaagaacggcgttgccgtgcgtcacttcggcatgccggaacagcagaccagccactggcgtcggcaaattgtccgcatcagtctcgcattgctgcctatccatttctggtctgtggtggcagaactttccccgctgcatctgatggatgatgtgctggggcaagcgatgattttcttcaacctgctgctgattgccttcctggtatggccaatgtgccgcgaaagctggcgtgataaagagtcgcacaccatgcgactggtcaccattaccgtgctgtcgattatcccgattgcattgatggtgctgactgccacgggttatttctacaccacgctgcgcctctccgggcgttggattgaaaccgtttatctggtgatcatctggaacttgctctaccagacggtattgcgcggcttaagcgtagcggcgcggcgtatcgcctggcgtcgtgcgctggcgcgtcggcagaatctggtgaaagagggcgcagaaggtgccgaaccgccggaagaacccaccattgcactggaacaggttaaccagcagacgctgcgtattaccatgttgctgatgtttgcgctgttcggtgtcatgttctgggcaatttggtccgatttgatcaccgtgttcagctatctcgacagcattacgctctggcattacaacggtactgaagctggcgctgcggtggtgaaaaacgtcaccatgggcagtctgttgtttgcgattatcgcctcaatggtggcctgggcgttgattcgcaacctgcctggtttgctggaagtgctggtgctctcgcgactgaatatgcgccagggcgcgtcgtatgccattactaccatccttaactacatcattattgccgttggtgcgatgacggtgttcggatcgctgggcgtctcttgggataaactccagtggctggcggcagcattatccgtaggtcttggttttggtttacaagaaattttcggtaacttcgtctccggtttgatcattctgttcgaacgtccggtgcgtattggcgatacggtaaccattggtagcttctcggggacggtaagtaagatccgtattcgtgcgacaacgattaccgatttcgatcgcaaagaagtgatcatcccgaacaaagcgtttgttaccgagcgtctgatcaactggtcgttgactgacactactacgcgtctggtgatccgtctcggcgtggcctatggctccgatctggaaaaagtgcgtaaagtgttactgaaggcggcgactgagcacccaagggtgatgcacgaaccaatgccggaagtcttctttacggcgtttggtgccagcacgttggatcatgagctgcgtctgtatgtgcgtgaactgcgtgaccgtagtcgtactgtcgatgagctgaaccgtactatcgatcagctgtgccgtgaaaacgacatcaacattgcctttaaccagcttgaagtgcatctgcacaacgagaagggcgatgaggtgacggaagtaaaacgcgactacaaaggcgatgacccgacgccagcggtagggtaa

SEQ ID NO: 458781 - DNA, 162 bp, Shigella boydii
atgtcactggaaaatgcccctgacgatgtcaaactggctgtcgatttgattgtgctgctggaagaaaatcagatcccagcccgcaccgtgctgcgcgcgctggatattgtaaaacgcgattatgaaaagaaattaacgcgcgatgatgaggcggaaaagtga

SEQ ID NO: 458782 - DNA, 528 bp, Shigella boydii
gtgaaaaccgccctgctgctggaaaaactggaaggacagctcgctacgctgcgtcagcgttgtgccccggtagcgcaatttgccacgctaagtgcccgttttgacagacacctttttcaaacccgtgcgacaacactgcaggcttgtctcgatgaggcgggcgataatctggctgcgcttcgtcatgcagttgagcagcaacagctgccgcaagtggcctggctggcggaacatctggcggcacaactggaagccatcgcgcgtgaagcctccgcctggtcattgcgcgagtgggacagtgcgccaccgaaaattgcccgctggcagcgtaaacgtattcagcatcaggattttgagcggcggctacgtgagatggttgccgaacgcagagcccgcctggcgcgggtgaccgatctcgtggaacagcaaacgctgcatcgtgaagtggaagcctatgaagcgcgcctggcacgctgccgccatgcgctggaaaaaatcgaaaacaggctagcgcgcttaacccgctag

SEQ ID NO: 458783 - DNA, 552 bp, Shigella boydii
atgaccgcgactgcacagcagcttgagtatctcaaaaatagcatcaaaagcattcaggactacccaaaacccggcattcttttccgcgatgtcaccagcttactggaagacccgaaagcttacgctctcagcatcgacttgctggttgagcgttacaaaaatgcgggcattaccaaagttgtcggcaccgaagcgcgtggcttcttgtttggcgctccggtagctctgggtctgggcgttggctttgtaccggtccgtaaaccgggcaaactgccgcgtgaaaccatcagtgaaacttacgacctggaatacggcaccgatcagctggagatccacgttgatgccatcaaaccgggcgacaaagttctggtggtggacgatctgctggcaaccggcggcactatcgaagcgaccgttaaactgatccgtcgtctgggtggtgaagtggctgacgctgcgttcattatcaacctgttcgatctcggcggcgaacagcgtctcgaaaaacagggcattaccagctacagccttgtcccgttcccgggccattaa

SEQ ID NO: 458784 - DNA, 1932 bp, Shigella boydii
atgagttatcaggtcttagcccgaaaatggcgcccacaaacctttgctgacgtcgtcggccaggaacatgtgctgaccgcactggcgaacggcttgtcgttagggcgtattcatcatgcttatcttttttccggtacccgtggcgtcggaaaaacctctatcgcccgactgctggcgaaggggctaaactgcgaaaccggcattaccgcgacgccgtgcggcgtgtgcgataactgtcgtgaaatcgagcaggggcgctttgtcgatctgattgaaatcgacgccgcctcgcgcaccaaagttgaagatacccgcgacctgctggataacgtccagtacgctccggcgcgtggtcgtttcaaagtttatctgatcgacgaagtgcatatgctgtcgcgccacagctttaacgcactgttaaaaacccttgaagagccgccggagcacgttaagtttctgctggcgacgaccgatccacagaaattgccggtgacgattttgtcgcgctgtttgcaatttcatctcaaggcgctggatgtcgagcaaattcgccatcaacttgagcacatcctcaacgaagaacatatcgctcacgagccgcgggcgttgcaattgctggcgcgcgccgctgaaggcagcctgcgagatgccttaagtctgaccgaccaggcgattgccagcggtgacggccaggtttcaacccaggcagtcagtgcgatgctgggtacgcttgatgacgatcaggcgctgtcgctggttgaagcgatggtcgaggccaacggcgagcgcgtaatggcgctgattaatgaagccgctgcccgtggtatcgagtgggaagcgttgctggtggaaatgctcggcctgttgcatcgtattgcgatggtacaactttcgcctgctgcacttggcaacgacatggccgccattgagctgcggatgcgtgaactggcgcgcaccataccgccgacggatattcagctttactatcagacgctgttgattggtcgcaaagaattaccgtatgcgccggaccgccgcatgggcgttgagatgacgctgctgcgcgcgctggcgttccatccacgtatgcctctgcctgagccagaagtgctgcgccagtcctttgcacccgtcgcgccaacggcagtaatgacgccaacccaggtgccgccgcaaccgcaatcagcgccgcagcaggcaccgactgtaccgctcccggaaaccaccagccaggtgctggcggcgcgccagcagttgcagcgcgtgcagggagcaaccaaagcaaaaaagagtgaaccggcagccgctacccgcgcgcggccggtgaataacgctgcgctggaaagactggcttcggtcaccgatcgcgttcaggcgcgtccggtgccatcggcgctggaaaaagcgccagccaaaaaagaagcgtatcgctggaaggcgaccactccggtgatgcagcaaaaagaagtggtcgccacgccgaaggcgctgaaaaaagcgctggaacatgaaaaaacgccggaactggcggcgaagctagcggcagaagccattgagcgcgacccgtgggcggcacaggtgagtcaactttcgctaccaaaactggtcgaacaggtggccttaaatgcctggaaagaggagagcgacaacgcagtatgtctgcatttgcgctcctctcagcggcatttgaacaaccgcggtgcacagcaaaaactggctgaagcgttgagcacgttaaaaggttcaacggttgaactgactatcgttgaagatgataatcccgcggtgcgtacgccgctggaatggcgtcaggcgatatacgaagaaaaacttgcgcaggcgcgcgagtccattattgcggataataatattcagaccctgcgtcggttcttcgatgcggagctggatgaagaaagtatccgccccatttga

SEQ ID NO: 458785 - DNA, 330 bp, Shigella boydii
atgtttggtaaaggcggtctgggtaacctgatgaagcaagcccagcagatgcaagaaaaaatgcagaaaatgcaggaagagatcgcgcagctggaagtcaccggcgaatctggcgcaggtctggtaaaagtgaccatcaacggtgcacacaactgccgtcgcgtagagatcgacccgagcctgctggaagacgacaaagagatgctggaagacctggtggctgcagcattcaacgacgcagcacgtcgtattgaagaaacgcagaaagaaaaaatggcctctgtatcctccggaatgcagctgccgcctggctttaagatgccgttctga

SEQ ID NO: 458786 - DNA, 606 bp, Shigella boydii
atgcaaaccagcccgctgttaacacagcttatggaagcactgcgctgtctgccgggcgttggcccgaagtcggcgcagcgtatggcgttcacgctgcttcagcgcgatcgtagcggcgggatgcgtctggcgcaggcgctcacccgggcgatgtcggaaatcggccactgcgccgattgccgcactttcaccgaacaggaagtctgtaacatctgttcgaatccgcgtcgtcaggaaaacggtcaaatctgtgtggtggagagtccggcggacatctacgccattgagcagacggggcagttttctggtcgttattttgtgttgatggggcatctgtcaccgctggacggcatcggtccggatgatatcgggcttgaccgtctggaacagcgtctggcagaggaaaaaatcactgaagtgatcctcgccaccaatcccacggttgaaggtgaagctaccgctaactacattgccgagctttgcgcgcaatatgacgtggaagccagccgaatcgctcatggcgtaccggttggcggcgaactggaaatggtcgatggcaccacgctgtcacactcccttgccgggcgtcataagattcgtttttaa

SEQ ID NO: 458787 - DNA, 1875 bp, Shigella boydii
atgaaaggacaagaaactcgtggttttcagtcagaagtgaaacagcttctgcacctgatgatccattctctctattccaataaagaaatcttcctgcgtgagcttatctctaacgcctccgatgcggcggacaagctgcgtttccgtgcgctatctaacccggacctgtacgaaggtgatggcgaactgtgcgttcgtgtctctttcgataaagacaagcgcacgctgaccatctccgataacggcgtggggatgacccgcgacgaagtgattgaccatctggggactatcgctaaatccggtaccaaatcattcctcgaatccctgggttctgaccaggcgaaagacagccagctgatcggtcagtttggtgttggtttctactctgcgtttatcgtggccgacaaagtgactgtgcgtactcgcgcggcaggcgaaaaaccagaaaacggcgtcttctgggaatcggctggcgaaggtgaatataccgttgccgacatcaccaaagaagatcgtggtactgaaatcaccctgcatctgcgtgaaggcgaagacgagttcctcgatgactggcgcgtgcgttccatcatcagcaaatactccgaccatatcgcgctgccggtagagatcgaaaaacgcgaagagaaagacggcgaaaccgttatctcctgggagaaaatcaacaaagcgcaggcgctgtggactcgtaacaagtcggaaatcaccgatgaagagtacaaagagttctacaaacacatcgcccacgactttaatgatccgctgacctggagccacaaccgcgttgaaggtaagcaggagtacaccagcctgctgtacatcccgtcccaggctccgtgggatatgtggaaccgtgatcataaacacggcctgaaactgtacgtccagcgtgtgttcatcatggacgacgcagaacagttcatgccgaactatctgcgcttcgtgcgtggtctgattgactccagcgatctgccgctgaacgtttcccgtgaaatcctccaggacagcacggtaacgcgtaacctgcgcaatgcgctgaccaagcgtgtgctgcaaatgctggaaaaactggcgaaagacgacgcggaaaaataccagaccttctggcaacagtttggcctggtactgaaagaaggtccggcggaagatttcgctaaccaggaagcgatcgccaaactgctgcgttttgcttctacccataccgattcttctgcgcagaccgtatctctggaagactacgtttcccgcatgaaagaagggcaggagaaaatctactacatcaccgcagacagctatgcggcagcgaagagcagcccgcacctggaactgctgcgtaagaaaggcatcgaagttctgctgctttccgaccgcatcgatgagtggatgatgaactatctgactgagttcgacggtaaaccgttccagtcggtgtctaaagttgacgagtcgctggaaaaactggctgacgaagttgatgagagcgcgaaagaagcggagaaagcactgactccgttcatcgaccgtgtgaaagccttgctcggcgagcgcgtgaaagatgtccgtctgactcaccgtctgaccgatacgccagcgatcgtttcgaccgacgcggacgaaatgagcactcagatggcgaaactgttcgctgcggcgggccagaaagtgccagaagtgaaatacatcttcgaactgaacccggatcacgtactggtgaaacgtgcggcagatactgaagatgaagcgaagttcagcgagtgggtagaactgctgctggatcaggcgctgctggcagaacgcggcacgctggaagatccgaacctgtttattcgtcgtatgaaccagctgctggtttcctga

SEQ ID NO: 458788 - DNA, 645 bp, Shigella boydii
atgcgtatcattctgcttggcgctccgggcgcggggaaagggactcaggctcagttcatcatggagaaatatggtattccgcaaatctccactggcgatatgctgcgtgctgcggtcaaatctggctccgagctgggtaaacaagcaaaagacattatggatgctggcaaactggtcaccgacgaactggtgatcgcgctggttaaagagcgcattgctcaggaagactgccgtaatggtttcctgttggacggcttcccgcgtaccattccgcaggcagacgcgatgaaagaagcgggcatcaatgttgattacgttctggaattcgacgtaccggacgaactgattgttgatcgtatcgtaggccgccgcgttcatgcgccgtctggtcgtgtttatcacgttaaattcaatccgccgaaagtagaaggcaaagacgacgttaccggtgaagaactgactacccgtaaagacgatcaggaagaaaccgtacgtaaacgtctggttgaataccatcagatgactgcaccgctgatcggctactactccaaagaagcggaagcgggtaacaccaaatacgcgaaagttgacggcaccaagccggttgctgaagttcgcgctgatctggaaaaaatcctcggctaa

SEQ ID NO: 458789 - DNA, 963 bp, Shigella boydii
atgcgtcagactaaaaccggtatcctgctggcaaacctgggtacgcccgatgcccccacacctgaagcggtaaaacgctatctgaaacaatttttaagcgacagacgcgtggttgatacctcacggttgttatggtggccattgctgcgcggcgttattttgccgctgcgctcgccgcgtgtggcgaagctgtatgcctctgtctggatggaaggtggctcgccgctgatggtttacagccgccagcaacagcaggcgctggcacaacgtttaccggagacgcccgtagcgctgggaatgagctacggctcgccatcactggaaagcgccgtcgatgaactcctggcagagcatgtagatcatattgtggtgctgccgctttatccgcaattctcctgttctacggtcggtgcggtatgggatgaactggcacgcattctggcgcgcaaacgtagcattccggggatatcgtttattcgtgattacgccgataaccacgattacattaatgcactggcgaacagcgtacgcgcttcttttgccaaacatggcgaaccggatctgctgctgctctcttatcatggcattccccagcgttatgcagatgaaggcgatgattacccgcaacgttgccgcacaacgactcgcgaactggcttccgcactggggatggcaccggaaaaagtgatgatgacctttcagtcgcgctttggccgggaaccctggctgatgccttataccgacgaaacgctgaaaatgctcggagaaaaaggcgtaggttatatacaggtgatgtgcccgggctttgctgcggattgtctggagacgctggaagagattgccgagcaaaaccgtgaggtcttcctcggtgccggtgggaaaaaatatgaatatattccagcgcttaatgccacgccagaacatatcgaaatgatggctaatcttgttgccgcgtatcgctaa

SEQ ID NO: 458790 - DNA, 960 bp, Shigella boydii
atgaagccggaaaacaaactacctgttctggaccttatttctgctgaaatgaagaccgttgtgaatactcttcagccggatttaccgtcctggcccgcaacgggaacgattgctgagcaacgacagtattacacgcttgagcgccgattctggaatgcgggcgctccagaaatggcaaccagagcttacatggttccaacaaaatatgggcaggtggaaacacgtctcttttgtccgcagccagatagcccggcgacgctattttatttgcatggaggcggttttattctcggcaatctcgatacccacgatcgcatcatgcgcctgctggcaagctacagccaatgtacggtgattggtattgattaccccctttcacctgaagcgcgttttccgcaagcgatagaggaaattgtggctgcttgttgttatttccaccagcaggcggaggattatcaaatcaatatgtcccgcattggctttgccggtgattccgcaggtgccatgctggcgctcgccagtgcgttgtggttgcgtgataaacagatcgattgcggtaaaattgcgggtgttttgctgtggtatgggctttacggattacgggattccgtgactcgtcgtctgttgggcggtgtctgggatggcttaacgcaacaggatttgcagatgtatgaagaggcgtatttaagcaacgacgcggaccgcgagtcaccgtattactgtctgtttaataatgatctcactcgcgaagttccgccctgttttattgccggggcggagttcgatccgctgctggatgacagccgtctgctttaccagacgttagcggcgcatcagcagccctgtgagttcaaactctacccaggtacgctgcatgtctttttgcattattcacgaatgatgaaaaccgccgacgaggctcttcgcgacggcgctcagttctttaccgctcagctttag

SEQ ID NO: 458791 - DNA, 1305 bp, Shigella boydii
atgaaatttcccggtaaacgtaaatccaaacattacttccctgtaaatgcacgcgatccgctgcttcagcaattccagccagaaaacgaaaccagcgccgcctgggtcgtaggtattgaccagacgctggtcgatattgaagcgaaagtggatgatgaattcattgagcgttatggattaagcgccgggcattcactggtgattgaggatgacgtagccgaagcgctttatcaggagctaaaacagaaaaacctgattacccatcagtttgcgggtggcaccattggtaacaccatgcacaactactcggtgctcgcggacgaccgttcggtgctgctgggcgtcatgtgcagcaatattgaaattggcagttatgcctatcgttacctgtgtaacacttccagccgtaccgatcttaactatctacaaggcgtggatggcccgattggtcgttgctttacgctgattggcgagtccggggaacgtacctttgctatcagtccaggccacatgaaccagctgcgggctgaaagcattccggaagatgtgattgccggagcctcggcactggttctcacctcttatctggtgcgttgcaaaccgggtgaacccatgccggaagcaaccatgaaagccattgagtacgcgaagaaatataacgtaccggtggtgctgacgctgggcaccaagtttgtcattgccgagaatccgcagtggtggcagcaattcctcaaagatcacgtctctatccttgcgatgaacgaagatgaagccgaagcgttgaccggagaaagcgatccgttgttggcatctgacaaggcgctggactgggtagatctggtgctgtgcaccgccgggccaatcggcttgtatatggcgggctttaccgaagacgaagcgaaacgtaaaacccagcatccgctgctgccgggcgctatagcggaattcaaccagtatgagtttagccgcgccatgcgccacaaggattgccagaatccgctgcgtgtatattcgcacattgcgccgtacatgggagggccggaaaaaatcatgaacactaatggagcgggggatggcgcattggcagcgttgctgcatgacattaccgccaacagctaccatcgtagcaacgtaccaaactccagcaaacataaattcacctggttaacttattcatcgttagcgcaggtgtgtaaatatgctaaccgtgtgagctatcaggtactgaaccagcattcacctcgtttaacgcgcggcttgccggagcgtgaagacagcctggaagagtcttactgggatcgttaa

SEQ ID NO: 458792 - DNA, 1677 bp, Shigella boydii
atgcatcacgccaccccgcttatcaccaccattgttggcggccttgtgctcgcctttatcctcggcatgctggccaataaactacgtatttctcctctggtgggatatctgttagcgggtgtgctggcaggaccattcactccgggctttgttgccgataccaagcttgcgccggaactggctgaactgggcgtcattctgttgatgtttggcgtcggtttgcacttttcgctgaaggatttgatggcggtaaaggccatcgccattcccggtgcgatcgcccagatagccgtggcgacgctgctgggtatggcgctctctgccgtgctgggctggtcgttaatgcccggtatcgtgttcggtttatgtctttccaccgccagtaccgtggtgttactgcgcgcacttgaagaacggcaattaattgacagtcagcgtgggcaaatcgccatcggttggttgattgtggaagacctggtaatggttctgacgctggtgttgctgcccgcagtggcaggaatgatggaacagggcgatgtgggctttgccactcttgcagtcgatatggggatcaccatcggcaaagtgatcgcatttatcgccattatgatgctggtaggtcgccgtctggtgccgtggattatggcacgcagcgcggcaaccggttctcgcgagctgtttaccctgtcggtgctggcgctggcgttagggattgcctttggtgcggtagagctgtttgatgtctcctttgcactcggtgcgttctttgccgggatggtactgaacgagtctgaactgagtcaccgtgccgcccacgatacgctgccattgcgcgacgcgtttgcggtgctgttttttgtctccgtcgggatgttgtttgatccgttaattctgattcagcaaccgctggcagtgctggcgacgctggcgattattctgtttggtaagtcgttagccgcatttttcctggtgcgactgtttggtcactcccaacgtacggcattaaccatcgccgccagcctggcgcagattggtgagttcgcgtttatcctggcgggactgggaatggcattgaatttactgccgcaggccggacaaaacctggtactggcaggggcgatcctgtcgattatgctcaacccggtactgttcgcactactggagaaatatctggcgaagaccaaaacgctggaagagcagacgctggaagaggcaatcgaagaagagaagcagatcccagtggatatttgcaaccatgcgctactggtgggttacggtcgtgtaggcagcctgctgggggagaaattgctcgcctctgatattccgctggtggtgattgagacgtcacgaacccgtgttgatgagctgcgagagcgcggggtccgcgcagtattgggcaatgcggcgaacgaagaaattatgcaactggcgcatctggaatgtgcaaaatggctgatcctgacgattcccaacggttatgaagcgggtgagattgtggcatctgcccgcgcgaaaaatccggatattgagattattgcccgcgcccattatgacgatgaagtggcgtatatcaccgaacgtggtgcgaatcaggtagtgatgggcgagcgtgaaatcgcccgtaccatgctggaactgctggaaacgccaccggcgggtgaggtggtgacggggtaa

SEQ ID NO: 458793 - DNA, 459 bp, Shigella boydii
atgcaaaaattcggattatctatccagaatgcccagcttcatctgtttgccttcctgtttgccgttgcggcaggtacagtgatcggcgggcctgtaggggataaaattggacggaaatatgtgatttggggctctatcctcggcgttgcgccgtttacgctgattttaccctacgccagcctgcactggacgggggttttaacggtgattattggatttatcctcgcttcggcattatctgccattctggtctacgctcaggagctacttccgggacgtatcggtatggtttctggactctttttcggttttgcttttggcatgggaggtctgggagcggcagttctggggcttatcgccgatcacaccagcatcgagttagtctataaaatctgtgctttcctgccactattggggatgttgaccatattcctgcctgataaccggcataaagactga

SEQ ID NO: 458794 - DNA, 411 bp, Shigella boydii
atggacactacccttccctttctgattttgtacgcttgtttatcagccctactttttttctgggatgcaaagcatggcttgttacctgacagatttacgtgcccgttactctggtcaggtcttttgttctatcaagtttgtcatcctgatggtttagccgatgcgttatgggggacaattgttggttacggcacattcgctgtcatttactgggggtatcgcatactgcgacataaagaaggattaggctatggtgatgtgaagtttctcgccgcccttggcgcctggcattcatgggccttcttaccacgactggttttccttgctgcctcattcgcttgcggagccgtagttattggtctgctcatgagaggaaaagaatcattaaaaaacccgctgccttttgggtaa

SEQ ID NO: 458795 - DNA, 312 bp, Shigella boydii
atgcagaaccaaagaatccgtatccgcctgaaagcgtttgatcatcgtctgatcgatcaagcaaccgcggaaatcgtcgagactgccaagcgcactggtgcgcaggtccgtggtccgatcccgctgccgacacgcaaagagcgcttcactgttctgatctccccgcacgtcaacaaagacgcgcgcgatcagtacgaaatccgtactcacttgcgtctggttgacatcgttgagccaaccgagaaaaccgttgatgctctgatgcgtctggatctggctgccggtgtagacgtgcagatcagcctgggttaa

SEQ ID NO: 458796 - DNA, 630 bp, Shigella boydii
atgattggtttagtcggtaaaaaagtgggtatgacccgtatcttcacagaagacggcgtttctatcccagtaaccgtaatcgaagttgaagcaaaccgcgttactcaggttaaagacctggctaacgatggctaccgtgctattcaggtgaccaccggtgctaaaaaagctaaccgtgtgaccaagcctgaagctggccacttcgctaaagctggcgtagaagctggccgtggtctgtgggaattccgcctggctgaaggcgaagagttcactgtaggtcagagcattagcgttgaactgtttgctgacgttaaaaaagttgacgtaactggcacctctaaaggtaaaggtttcgcaggtaccgttaagcgctggaacttccgtacccaggacgctactcacggtaactccttgtctcaccgcgttccgggttctatcggtcagaaccagactccgggcaaagtgttcaaaggcaagaaaatggcaggtcagatgggtaacgaacgtgtaaccgttcagagccttgacgtagtacgcgttgacgctgagcgcaacctgctgctggttaaaggtgctgtcccgggtgcaaccggtagcgacctgatcgttaaaccagctgtgaaggcgtaa

SEQ ID NO: 458797 - DNA, 606 bp, Shigella boydii
atggaattagtattgaaagacgcgcagagcgcgctgactgtttccgaaactaccttcggtcgtgatttcaacgaagcgctggttcaccaggttgttgttgcttatgcagctggtgctcgtcagggtactcgtgctcagaagactcgtgctgaagtaactggttccggtaaaaaaccgtggcgccagaaaggcaccggccgtgcgcgttctggttctatcaagagcccgatctggcgttctggtggcgtgacctttgctgctcgtccgcaggaccacagtcaaaaagttaacaagaagatgtaccgcggcgcgctgaaaagcatcctgtccgaactggtacgtcaggatcgtctgatcgttgtcgagaagttctctgtagaagcgccgaaaactaagctgctggcacagaaactgaaagacatggctctggaagatgtgctgatcatcaccggtgagctggacgaaaacctgttcctggctgcgcgcaacctgcacaaggttgacgtacgcgatgcaactggtatcgacccggttagcctgatcgccttcgacaaagtcgtaatgactgctgatgctgttaagcaagttgaggagatgctggcatga

SEQ ID NO: 458798 - DNA, 303 bp, Shigella boydii; identical to SEQ ID NO: 4257

SEQ ID NO: 458799 - DNA, 822 bp, Shigella boydii; identical to SEQ ID NO: 4256

SEQ ID NO: 458800 - DNA, 279 bp, Shigella boydii; identical to SEQ ID NO: 4255

SEQ ID NO: 458801 - DNA, 333 bp, Shigella boydii; identical to SEQ ID NO: 4254

SEQ ID NO: 458802 - DNA, 702 bp, Shigella boydii; identical to SEQ ID NO: 4253

SEQ ID NO: 458803 - DNA, 411 bp, Shigella boydii
atgttacaaccaaagcgtacaaaattccgtaaaatgcacaaaggccgtaaccgcggtctggcgcagggtacggatgttagcttcggcagcttcggtctgaaagctgttggccgtggtcgtctgactgcccgtcagatcgaagcagcacgtcgtgctatgacccgtgcagttaagcgtcaaggtaagatctggatccgtgtgttcccggacaaaccgatcactgaaaagccgctggcagtgcgtatgggtaaaggtaaaggtaacgtggagtattgggttgccttgattcagccgggtaaagtcctgtatgaaatggacggtgttccggaagagctggcccgtgaagcattcaagctggcagcagcgaaactgccgattaaaaccacctttgtaactaagacggtgatgtaa

SEQ ID NO: 458804 - DNA, 192 bp, Shigella boydii; identical to SEQ ID NO: 4251

SEQ ID NO: 458805 - DNA, 255 bp, Shigella boydii; identical to SEQ ID NO: 4250

SEQ ID NO: 458806 - DNA, 372 bp, Shigella boydii; identical to SEQ ID NO: 4249

SEQ ID NO: 458807 - DNA, 315 bp, Shigella boydii
atggcagcgaaaatccgtcgtgatgacgaagttatcgtgttaaccggtaaagataaaggtaaacgcggtaaagttaagaatgtcctgtcttccggcaaggtcattgttgaaggtatcaacctggttaagaaacatcagaagccggttccggccctgaaccaaccgggtggcatcgttgaaaaagaagccgctattcaggtttccaacgtagcaatcttcaatgcggcaaccggcaaggctgaccgtgtaggctttagattcgaagacggcaaaaaagtccgtttcttcaagtctaacagcgaaactatcaagtaa

SEQ ID NO: 458808 - DNA, 540 bp, Shigella boydii
atggcgaaactgcatgattactacaaagacgaagtagttaaaaaactcatgactgagtttaactacaattctgtcatgcaagtccctcgggtcgagaagatcaccctgaacatgggtgttggtgaagcgatcgctgacaaaaaactgctggataacgcagcagcagacctggcagcaatctccggtcaaaaaccgctgatcaccaaagcacgcaaatctgttgcaggcttcaaaatccgtcagggctatccgatcggctgtaaagtaactctgcgtggcgaacgcatgtgggagttctttgagcgcctgatcactattgctgtacctcgtatccgtgacttccgtggcctgtccgctaagtctttcgacggtcgtggtaactacagcatgggtgtccgtgagcagatcatcttcccagaaatcgactacgataaagtcgaccgcgttcgtggtttggatattaccattaccactactgcgaaatctgacgaagaaggccgcgctctgctggctgcctttgacttcccgttccgcaagtaa

SEQ ID NO: 458809 - DNA, 306 bp, Shigella boydii; identical to SEQ ID NO: 4246

SEQ ID NO: 458810 - DNA, 393 bp, Shigella boydii; identical to SEQ ID NO: 4245

SEQ ID NO: 458811 - DNA, 534 bp, Shigella boydii
atgtctcgtgttgctaaagcaccggtcgttgttcctgccggcgttgacgtaaaaatcaacggtcaggttattacgatcaaaggtaaaaacggcgagctgactcgtactctcaacgatgctgttgaagttaaacatgcagataataccctgaccttcggtccgcgtgatggttacgcagacggttgggcacaggctggtaccgcgcgtgccctgctgaactcaatggttatcggtgttaccgaaggcttcactaagaagctgcagctggttggtgtaggttaccgtgcagcggttaaaggtaatgtgattaacctgtctctgggtctctctcatcctgttgaccatcagctgcctgcgggtatcactgctgaatgtccgactcagactgaaatcgtgctgaaaggcgctgataagcaggtgatcggccaggttgcagcggatctgcgcgcctaccgtcgtcctgagccttataaaggcaagggtgttcgttacgccgacgaagtcgtgcgtaccaaagaggctaagaagaagtaa

SEQ ID NO: 458812 - DNA, 354 bp, Shigella boydii; identical to SEQ ID NO: 4243

SEQ ID NO: 458813 - DNA, 504 bp, Shigella boydii
atggctcacatcgaaaaacaagctggcgaactgcaggaaaagctgatcgcggtaaaccgcgtatctaaaaccgttaaaggtggtcgtattttctccttcacagctctgactgtagttggcgatggtaacggtcgcgttggttttggttacggtaaagcgcgtgaagttccagcagcgatccagaaagcgatggaaaaagcccgtcgcaatatgattaacgtcgcgctgaataacggcactctgcaacaccctgttaaaggtgttcacacgggttctcgcgtattcatgcagccggcttccgaaggtaccggtatcatcgccggtggtgcaatgcgcgccgttctggaagtcgctggggttcataacgttctggctaaagcatatggttccaccaacccgatcaacgtggttcgtgcaactattgatggcctggaaaatatgaattctccagaaatggtcgctgccaagcgtggtaaatccgttgaagaaattctggggaaataa

SEQ ID NO: 458814 - DNA, 180 bp, Shigella boydii; identical to SEQ ID NO: 4241

SEQ ID NO: 458815 - DNA, 435 bp, Shigella boydii
atgcgtttaaatactctgtctccggccgaaggctccaaaaaggcgggtaaacgcttgggtcgtggtatcggttctggcctcggtaaaaccggtggtcgtggtcacaaaggtcagaagtctcgttctggcggtggcgtacgtcgcggtttcgagggtggtcagatgcctctgtaccgtcgtctgccgaaattcggcttcacttctcgtaaagcagcgattacagccgaagttcgtctgtctgacctggctaaagtagaaggcggtgttgtagacctgaacacgctgaaagcggctaacattatcggtatccagatcgagttcgcgaaagtgatcctggctggcgaagtaacgactccggtaactgttcgtggcctgcgtgttactaaaggcgctcgtgctgctatcgaagctgctggcggtaaaatcgaggaataa

SEQ ID NO: 458816 - DNA, 1332 bp, Shigella boydii
atggctaaacaaccgggattagattttcaaagtgccaaaggtggcttaggcgagctgaaacgcagactgctgtttgttatcggtgcgctgattgtgttccgtattggctcttttattccgatccctggtattgatgccgctgtacttgccaaactgcttgagcaacagcgaggcaccatcattgagatgtttaacatgttctctggtggtgctctcagccgtgcttctatctttgctctggggatcatgccgtatatttcggcgtcgatcattatccagctgctgacggtggttcacccaacgttggcggaaattaagaaagaaggggagtctggtcgtcgtaagatcagccagtacacccgctacggtactctggtgctggcaatattccagtcgatcggtattgctaccggtctgccgaatatgcctggtatgcaaggcctggtgattaacccgggctttgcattctacttcaccgctgttgtaagtctggtcacaggaacgatgttcctgatgtggttgggcgaacagatcactgaacgaggtatcggcaacggtatttcaatcattatcttcgccggtattgtcgcgggactcccgccagccattgcccatactatcgagcaagcgcgtcaaggcgacctgcacttcctcgtgttgctgttggttgcagtattagtatttgcagtgacgttctttgtcgtatttgttgagcgtggtcaacgccgcattgtggtaaactacgcgaaacgtcagcaaggtcgtcgtgtctatgctgcacagagcacacatttaccgctgaaagtgaatatggcgggggtaatcccggcaatcttcgcttccagtattattctgttcccggcgaccatcgcgtcatggttcgggggcggtactggttggaactggctgacaacaatttcgctgtatttgcagcctgggcaaccgctttatgtgttactctatgcgtctgcaatcatcttcttctgtttcttctacacggcgttggttttcaacccgcgtgaaacagcagataacctgaagaagtccggtgcatttgtaccaggaattcgtccgggagagcaaacggcgaagtatatcgataaagtaatgacccgcctgaccctggttggtgcgctgtatattacctttatctgcctgatcccggagttcatgcgtgatgcaatgaaagtaccgttctacttcggtgggacctcactgcttatcgttgttgtcgtgattatggactttatggctcaagtgcaaactctgatgatgtccagtcagtatgagtctgcattgaagaaggcgaacctgaaaggctacggccgataa

SEQ ID NO: 458817 - DNA, 357 bp, Shigella boydii
gtggcccgtatagcaggcattaacattcctgatcataagcatgccgtaatcgcattaacttcgatttatggcgtcggcaagacccgttctaaagccatcttggctgcagcgggtatcgctgaagatgttaagatcagtgagctgtctgaaggacaaatcgacacgctgcgtgacgaagttgccaaatttgtcgttgaaggtgatctgcgccgtgaaatcagcatgagcatcaagcgcctgatggatcttggttgctatcgcggtttgcgtcatcgtcgtggtctcccggttcgcggtcagcgtaccaagaccaacgcacgtacccgtaagggtccgcgcaaaccgatcaagaaataa

SEQ ID NO: 458818 - DNA, 390 bp, Shigella boydii
atggcaaaggcaccaattcgtgcacgtaaacgtgtaagaaaacaagtctctgacggcgtggctcatatccatgcttctttcaacaacaccatcgtgactatcactgatcgtcagggtaacgcgttgggttgggcaacagccggtggttccggtttccgtggttctcgcaaatccactccgtttgcagctcaggttgcagcagagcgttgcgctgacgccgtgaaagaatacggcatcaagaatctggaagttatggttaaaggtccgggtccaggccgcgaatctactattcgtgctctgaacgccgcaggtttccgcatcactaacattactgatgtgactccgatccctcataacggttgtcgtccgccgaaaaaacgtcgcgtataa

SEQ ID NO: 458819 - DNA, 621 bp, Shigella boydii
atggcaagatatttgggtcctaagctcaagctgagccgtcgtgagggcaccgacttattccttaagtctggcgttcgcgcgatcgataccaagtgtaaaattgaacaagctcctggccagcacggtgcgcgtaaaccgcgtctgtctgactatggtgtgcagttgcgtgaaaagcaaaaagttcgccgtatctatggtgtgctggagcgtcagttccgtaactactacaaagaagcagcacgtctgaaaggcaacaccggtgaaaacctgttggctctgctggaaggtcgtctggacaacgttgtataccgtatgggcttcggtgccactcgtgcagaagcacgtcagctggttagccataaagcaattatggtaaacggtcgtgttgttaacatcgcttcttatcaggttagtccgaatgacgttgtaagcattcgtgagaaagcgaagaagcagtctcgcgtgaaagccgctctggagctggctgagcagcgtgaaaagccaacttggctggaagttgatgctggcaagatggaaggtacgtttaagcgtaagccggagcgttctgatctgtctgcggacattaacgaacacctgatcgtcgagctttactccaagtaa

SEQ ID NO: 458820 - DNA, 990 bp, Shigella boydii
atgcagggttctgtgacagagtttctaaaaccgcgcctggttgatatcgagcaagtgagttcgacgcacgccaaggtgacccttgagcctttagagcgtggctttggccatactctgggtaacgcactgcgccgtattctgctctcatcgatgccgggttgcgcggtgaccgaggttgagattgatggtgtactacatgagtacagcaccaaagaaggcgttcaggaagatatcctggaaatcctgctcaacctgaaagggctggcggtgagagttcagggcaaagatgaagttattcttaccttgaataaatctggcattggccctgtgactgcagccgatatcacccacgacggtgatgtcgaaatcgtcaagccgcagcacgtgatctgccacctgaccgatgagaacgcgtctattagcatgcgtatcaaagttcagcgcggtcgtggttatgtgccggcttctacccgaattcattcggaagaagatgagcgcccaatcggccgtctgctggtcgacgcatgctacagccctgtggagcgtattgcctacaatgttgaagcagcgcgtgtagaacagcgtaccgacctggacaagctggtcatcgaaatggaaaccaacggcacaatcgatcctgaagaggcgattcgtcgtgcggcaaccattctggctgaacaactggaagctttcgttgacttacgtgatgtacgtcagcctgaagtgaaagaagagaaaccagagttcgatccgatcctgctgcgccctgttgacgatctggaattgactgtccgctctgctaactgccttaaagcagaagctatccactatatcggtgatctggtacaacgtaccgaggttgagctccttaaaacgcctaaccttggtaaaaaatctcttactgagattaaagacgtgctggcttcccgtggactgtctctgggcatgcgcctggaaaactggccaccggcaagcatcgctgacgagtaa

SEQ ID NO: 458821 - DNA, 384 bp, Shigella boydii
atgcgccatcgtaagagtggtcgtcaactgaaccgcaacagcagccatcgccaggctatgttccgcaatatggcaggttcactggttcgtcatgaaatcatcaagacgactctgcctaaagcgaaagagctgcgccgcgtagttgagccgctgattactcttgccaagactgatagcgttgctaatcgtcgtctggcattcgcccgtactcgtgataacgagatcgtggcaaaactgtttaacgaactgggcccgcgtttcgcgagccgtgccggtggttacactcgtattctgaagtgtggcttccgtgcaggcgacaacgcgccgatggcttacatcgagctggttgatcgttcagagaaagcagaagctgctgcagagtaa

SEQ ID NO: 458822 - DNA, 369 bp, Shigella boydii
atgtggttacttgaccagtgggcagagcgtcatatagcagaagcgcaagcgaaaggtgagtttgataacctggcaggtagcggcgaaccattgatactggatgatgattctcatgtgccaccggaattacgtgcggggtatcgcttgctgaagaatgccggttgcttaccgccagaacttgagcagcggagggaagcaattcagcttctggatatcctgagaggtatccgtcacgatgatccgcaatatcaagaggttagccgtcgattgtcattactggaattgaagctgcgacaagctggattgagtaccgattttttacgcggcgattatgctgacaagttgttggacaaaatcaacgataactag

SEQ ID NO: 458823 - DNA, 426 bp, Shigella boydii
atgtatcgcattggtgagctggcaaaaatggcggaagtaacacctgacacgattcgttattacgaaaaacagcagatgatggagcatgaagtgcgtactgaaggcgggtttcgcctgtataccgaaagcgatctccagcgattgaaatttatccgccatgccagacaactaggtttcagtctggagtcgatccgcgagttgctgtcgatccgcatcgatcctgaacaccatacctgtcaggagtcaaaaggcattgtgcaggaaagattgcaggaagtcgaagcacggatagccgagttgcagagtatgcagcgttccttgcaacgccttaacgatgcctgttgtgggaccgcccatagcagtgtttattgttcgattcttgaagctcttgaacaaggggcgagtggcgttaagagtggctgttga

SEQ ID NO: 458824 - DNA, 219 bp, Shigella boydii
atgagccgatatcagcatactaaagggcagataagggataatgcgatagaagcattactacatgatcccttattccgacagcgcgtagagaaaaataagaaggggaaaggcagttacatgcgaaaaggaaaacatggcaatcgggggaactgggaggccagtggcaagaaagtaaatcacttttttaccactggtcttctgctttcaggcgcttgttaa

SEQ ID NO: 458825 - DNA, 411 bp, Shigella boydii
atgagcattattaaagaatttcgcgaatttgcgatgcgcgggaacgtggtggatttggcggtgggtgtcattatcggtgcggcattcgggaagattgtatcttcactggttgccgatatcatcatgccacctctgggcttattaattggcgggatcgactttaaacagtttgctgtcacgctacgcgatgcgcagggggatatccctgctgttgtgatgcattacggtgtcttcattcaaaacgtctttgattttctgattgtggcctttgccatctttatggcgattaagctaatcaacaaactgaatcggaaaaaagaagaaccagctgccgcacctgcaccaactaaagaagaagtattactggcagaaattcgtgatttgctgaaagagcagaataaccgctcttaa

SEQ ID NO: 458826 - DNA, 1377 bp, Shigella boydii
atgaaaattatcattctgggtgccggccaggttggcggcacactggcggaaaacctggttggcgagaacaacgatattactgttgtcgataccaacggtgagcgtctgcggaccttgcaggataaatttgacctgcgagtcgtgcaggggcatggctctcatccacgcgtattgcgggaggcaggtgccgacgacgccgatatgctggttgctgtaaccagttcagatgaaaccaatatggttgcctgccaggtagcctactcacttttcaacacccctaatcgcatcgctcgcatccgctcaccagactacgtacgcgatgccgataagctatttcattcagatgctgtaccgattgatcatctgatcgcaccagagcagttggttatcgataatatttaccgactgattgagtatccaggcgcattgcaggtggtgaacttcgctgagggtaaagtcagcctcgctgtagttaaagcctattatggcggcccgctgattggtaatgcactttcgaccatgcgcgaacatatgccacatatcgatactcgtgtggcagcaattttccgccacgatcgccccattcgtccacaaggttcgaccattgttgaagctggtgatgaagtgttctttattgccgcttcacagcatatccgcgcggtgatgagtgaattacagcgactggaaaaaccgtataagcggatcatgctggttggtggcggtaatatcggtgcagggctggcgcgtcgtctggaaaaagattacagcgttaaactcatcgaacgtaatcagcagcgcgctgccgaactggcggaaaagttgcagaatacgatcgtcttttttggtgatgcgtcggatcaagaactgctggccgaagaacatatcgatcaagttgatctgtttattgccgtcaccaacgatgacgaggccaatatcatgtccgccatgcttgccaaacgtatgggtgcgaaaaaggtgatggtattgatccagcgtcgcgcttatgtggatctggttcaggggagcgtgatcgatattgcaatttcaccacaacaagcaactatttctgcgttgcttagccatgtgcgaaaagcagatattgttggtgtttcctcattgcgccgcggcgtagcagaagctattgaagccgttgctcacggtgatgaaagcacctcacgcgttgtcggcagagtcattgacgaaatcaagctaccgccaggaacgattattggagcggtggtacgtggaaacgacgtgatgattgccaatgacaatctgcgcattgagcaaggcgatcacgtaattatgttcctcacagataaaaagtttattaccgacgtcgaaagactcttccagccaagccctttcttcttgtaa

SEQ ID NO: 458827 - DNA, 1290 bp, Shigella boydii
atgaaaaaacaacgtaatttacgtagcatggcggcccaggccgttgaacaagtcgtcgagcaagggcaatcattaagcaacattctgccaccgctccagcaaaaagtttctgataaagacaaagcacttcttcaagagttgtgctttggcgtactgcgtacgctttcgcagttagactggctgattaataagttaatggcccgtccgatgaccggcaaacagcgcactgtgcattacctgattatggttggtttgtatcaactgctttatacccgcattccacctcatgctgcgctggctgaaacggttgaaggcgctatcgcaattaagcgtccgcaacttaaagggttgattaacggtgtattacgccagttccagcgtcagcaagaagagttattagccaagtttaatgccagtgatgcacgttatctgcatccttcctggttgctgaagcgtctgcaaaaagcgtatccagagcagtggcaatccatcgtcgaagccaataaccagcgtccgccaatgtggctgcgcgttaatcgtacgcatcattcccgcgacagctggcttgcattgctggatgaagcaggaatgaaaggtttcccgcatgcggattaccctgatgctgtacgtctggaaacacctgcacctgttcatgcgctacctggttttgaagacggatgggttaccgttcaggatgcatcagcacaaggttgcatgacctggcttgcgccacaaaacggtgaacacattctggatctttgtgccgcccccggcggtaaaacaacgcatatccttgaggtggcaccagaagcgcaggttgttgcggttgatattgacgaacagcgcctctctcgcgtttacgacaatttaaaacgccttggtatgaaggcaaccgtgaaacaaggtgatggccgttacccttcccaatggtgtggcgagcaacagtttgatcgcattttattagatgcgccttgttcagcaacgggggtgattcgtcaccatccggatattaaatggttacgtcgcgatcgcgatatcccggaactcgcgcaattgcagtctgaaattctcgacgccatttggccgcatttaaaatccggtggaaccctggtctatgccacctgttcggtgttaccggaagagaatagcctgcagattaaagcttttttgcaacgtaccgctgatgccgaactttgcgaaacaggagcaccagagcaaccgggtaaacaaaatctgcctggtgccgaagagggcgacggcttcttttacgctaagctaatcaaaaagtga

SEQ ID NO: 458828 - DNA, 948 bp, Shigella boydii
gtgtcagaatcactacgtattatttttgcgggtacacctgactttgcagcgcgtcatctcgacgcgctgttgtcttctggtcataacgtcgttggcgtgttcacccagccagaccgaccggcaggacgcggtaaaaaactgatgcccagcccggttaaagttctggctgaggaaaaaggtctgcccgtttttcaacctgtttccctgcgtccacaagaaaaccagcaactggtcgccgatctgcaggctgatgttatggtcgtcgtcgcctatggcttaattctgcctaaagcagtgctggagatgccgcgtcttggctgtatcaacgttcatggttcactgctgccacgctggcgcggtgctgcaccaatccaacgctcactatgggcgggtgatgcagaaactggtgtgaccattatgcaaatggatgtcggtttagacaccggtgacatgctctataagctctcctgcccgattactgcagaagataccagtggtacgctgtacgacaagctggcagagcttggcccacaagggcttatcaccacgttgaaacaactagcagacggcacggcgaaaccagaagttcaggacaaaactcttgtcacttacgccgaaaagttgagtaaagaagaagcgcgtattgactggtcactttcggcagcacagcttgaacgctgcattcgcgctttcaatccatggccaatgagctggctggaaattgaaagacagccggttaaagtctggaaagcgtcggtcattgatacggcaaccaacgctgcaccaggaacgatccttgaagccaacaaacaaggcattcaggttgcaactggtgatggaatcctgaatctgctctcgttacaacctgcgggtaagaaagcgatgagcgcgcaagacctcctgaattctcgtcgggaatggtttgttccgggcaaccgtctggcctga

SEQ ID NO: 458829 - DNA, 510 bp, Shigella boydii
atgtcagttttgcaagtgttacatattccggacgagcggcttcgcaaagttgctaaaccggtagaagaagtgaatgcagaaattcagcgtatcgtcgatgatatgttcgagacgatgtacgcagaagaaggtattggcctggcggcaacccaggttgatatccatcaacgtatcattgttattgatgtttcggaaaaccgtgacgaacggctggtgttaatcaatccggagcttttagaaaaaagcggcgaaacaggcattgaagaaggttgcctgtcgatccctaaacaacgtgctttagtgccacgcgcagagaaagttaaaattcgcgccctggaccgcgacggtaaaccatttgaattggaagcagacggtctgttagccatctgtattcagcatgagatggatcacctggtcggcaaactgtttatggattatctgtcaccgttgaaacaacaacgtattcgtcagaaagttgaaaaactggatcgtctgaaagcccgggcttaa

SEQ ID NO: 458830 - DNA, 1125 bp, Shigella boydii
atggtcgatacagatatttggctgcgtttaatgagcatcagcagcttgtacggcgatgatatggtccgtatagctcactggctggcaaaacagtcgcatattgatgcggttgtattgcagcaaacagggcttacattgcggcaggcacaacgctttctttcatttccgcgaaagagtatcgaaagctcactttgttggttggagcaacccaatcatcatttaatccctgcggacagcgaattttatcctcctcaacttctggcgacgacagattaccccggcgcactgtttgttgaaggagaactgcacgcgctgcattcatttcagcttgccgtagtggggagtcgggcgcattcatggtatggcgagcgatggggacgattattttgcgaaactctggccacgcgtggagtgacaattacgagtggactggcgcgtggaatcgatggtgtggcgcataaagcggccttacaggtaaatggcgtcagcattgctgtattggggaacggacttaataccattcatccgcgccgccatgcccgactggctaccagtttgcttgaacatggtggggcacttgtctcggaatttcccctcgatgttccaccccttgcttacaatttcccacgaagaaatcgcattatcagtggtctaagtaaaggtgtactggtggtggaagcggctttgcgcagtggttcgttggtgacagcacgttgtgcgcttgagcaggggcgtgaagtttttgccttgccaggaccaatagggaatccgggaagcgaagggcctcactggttaataaaacaaggtgcgattcttgtgacggaaccggaagaaattctggaaaacttgcaatttggattgcactggttgccagacgcccctgaaaattcattttattcaccagatcagcaagacgtggcattgccatttcctgagctcctggctaacgtaggagatgaggtaacacctgttgacgtcgtcgctgaacgtgccggccaacctgtgccagaggtagttactcaactactcgaactggagttagcaggatggatcgcagctgtacccggcggctatgtccgattgaggagggcatgccatgttcgacgtactaatgtatttgtttga

SEQ ID NO: 458831 - DNA, 474 bp, Shigella boydii
atgttcgacgtactaatgtatttgtttgaaacctatattcacacagaagctgagttgcgtgtggatcaagacaaacttgaacaggatcttaccgacgcaggatttgatcgagaagatatctacaatgccctgctttggctggaaaagcttgcggattatcaggaaggactgacagaaccgatgcaactggcctctgatccactctccatgcgtatttatacccctgaggagtgtgaaagactggatgccagctgtcgtggttttctgcttttccttgagcaaattcaggtgcttaaccttgaaatccgtgaaatggtgatagagcgagtgctcgcgctggataccgcagagttcgacctggaagacctgaaatgggtaatcctgatggtgttgttcaatattccgggctgcgaaaatgcgtaccagcaaatggaagaattactctttgaagtgaatgaaggtatgctgcattaa

SEQ ID NO: 458832 - DNA, 543 bp, Shigella boydii
atggcgaaatcagcactgttcacggtgcgtaataatgagtcctgcccaaagtgcggggctgaactggttattcgatccgggaaacacggtccgtttcttggatgctcacagtatccggcgtgtgactacgtccgtcctctgaaatcttcagcggatggacatattgtcaaagttctggaggggcaggtttgccctgcatgtggcgcaaatctggtattacgccagggacgctttggtatgtttattggttgcagtaactaccctgaatgcgaacataccgaacttatcgataaaccggacgaaacagcaattacatgcccccaatgtcggacgggccatctggtccagcgccgctcccgttatggcaaaacatttcactcctgtgatcgctacccggagtgtcaatttgccattaacttcaaacccatagctggagaatgccctgagtgtcattatccactactcatcgaaaagaaaaccgcgcagggtgtaaaacacttttgtgccagtaaacaatgtggaaagccggtttcggcggaataa

SEQ ID NO: 458833 - DNA, 573 bp, Shigella boydii
gtgaataataacctgcaaggagacgctatcgcagctgcgatagatgtcctcaatgaagaacgtgtcatcgcctatccaacggaagccgttttcggtgttgggtgcgatcctgatagcgaaacagcagtgatgagactgttggagttaaaacagcgtccggttgataaggggctgattttaatcgcggcaaattacgagcagcttaaaccctatattgatgacaccatgctgactgatgcgcagcgtgaaaccattttttcccgctggccaggtcctgtcacctttgtctttcccgcgcctgcgacaacaccgcgctggttgacgggccgctttgattcgcttgctgtacgagtcaccgaccatccgttggtggttgctttgtgccaggcttatggtaaaccgctggtttctaccagtgccaacttgagtggattgccaccttgtcgaacagtagacgaagttcgcgcacaatttggcgcggcgttcccggttgtgcctggtgaaacgggggggcgtttaaatccttcagaaatccgcgatgccctgacgggtgaactgtttcgacaggggtaa

SEQ ID NO: 458834 - DNA, 819 bp, Shigella boydii
atggaaacctatgctgtttttggtaatccgatagcccacagcaaatcgccattcattcatcagcaatttgctcagcaactgaatattgaacatccctatgggcgcgtgttggcacccatcaatgatttcatcaacacactgaacgctttctttagtgctggtggtaaaggtgcgaatgtgacggtaccttttaaagaagaggcttttgccagagcggatgagcttactgaacgggcagcgttggctggtgctgttaataccctcaagcggttagaagatggacgcttgcagggtgacaataccgatggtataggtttgttaagcgatctggaacgtctgtcttttatccgtccgggtttacgtattctgcttatcggcgctggtggagcatctcgcggcgtactactaccactcctttccctggactgtgcggtgacaatcactaatcggacggtatcccgtgcggaagagttggctaaattgtttgcgcacactggcagtattcaggcgttgggtatggacgaactggaaggtcatgagtttgatctcattattaatgcaacatccagtggcatcagtggtgatattccggcgatcccgtcatcgctcattcatctaggcatttattgctatgacatgttctatcagaaaggaaaaactccttttctggcatggtgtgagcagcgaggctcaaagcgtaatgttgatggtttaggaatgctggtggcacaggcggctcatgcctttcttctctggcacggtgttctgcctgacgtagaaccagttataaagcaattgcaggaggaattgtccgcgtga

SEQ ID NO: 458835 - DNA, 258 bp, Shigella boydii
gtgaatcaggccatccagtttccggacagggaagagtgggacgagaataaaaaatgtgtatgttttcccgctctcgtgaatggtatgcaactgacatgcgcgatctctggcgagagtctggcgtatcgctttactggagatacgccagaacagtggttagcgagttttcgtcagcatcgctgggacctggaagaagaagcggaaaacttaattcaggaacaaagtgaagatgatcaaggctgggtctggttaccctga

SEQ ID NO: 458836 - DNA, 555 bp, Shigella boydii
atgtctgatgttttacgcccataccgcgatctttttccacaaatcggtcagcgcgtaatgatcgacgatagcagtgtcgtgattggtgacgttcgtctggctgatgatgtggggatctggccgctcgttgtgattcgtggagatgtacattatgtacagatcggagcacgcaccaatatccaggatggcagtatgttgcatgtcactcataaatcctcgtacaacccagatggcaacccattaaccattggcgaagatgtcactgttggtcacaaggtgatgctccacggctgcaccattggcaatcgagttttggttgggatgggctcaattttacttgatggcgcaatagtagaagatgatgtgatgattggtgcgggtagtctggtcccacaaaataaacggctggagagcggatatctgtatctcggtagccccgtcaaacagatccgcccgttaagtgatgaagagaaggctgggttactctattccgcgaataattacgtgaaatggaaggacgaatatctggatcagggtaaccagacccagccttga

SEQ ID NO: 458837 - DNA, 657 bp, Shigella boydii
atgcctgcgatcaatgccaaacgtgtttaccggatcatgcgccagaatgcgctgttgcttgagcgaaaacctgctgtaccgccatcgaaacgggcacatacaggcagagtggccgtgaaagaaagcaatcagcgatggtgctctgacgggttcgagttctgctgtgataacggagagagactgcgtgtcacgttcgcgctggactgctgtgatcgtgaggcactgcactgggcggtgactaccggtggcttcaacagtgaaacagtacaggacgtcatgctgggagcggtggaacgccgcttcggcaacgatcttccgtcgtctccagtggagtggctgacggataatggttcatgctaccgggctaatgaaacacgccagttcgcccggatgttgggacttgaaccgaagaacacggcggtgcggagtccggagagtaacggaatagcagagagcttcgtgaaaacgataaagcgtgactacatcagtatcatgcccaaaccagacgggttaacggcagcaaagaaccttgcagaggcgttcgagcattataacgaatggcatccgcatagtgcgctgggttatcgctcgccacgggaatatctgcggcagcgggcttgtaatgggttaagtgataacagatgtctggaaatatag

SEQ ID NO: 458838 - DNA, 2022 bp, Shigella boydii
atgcgtctaaaccccggccaacaacaagctgtcgaattcgttaccggcccctgcctggtgctggcgggcgcgggttccggtaaaactcgtgtgatcaccaataaaatcgcccatctgatccgcggttgcggttatcaggcgcgacatatcgcggcggtgacctttaccaataaggcggcgcgcgagatgaaagagcgtgtcggacagacgctgggtcgcaaagaggcgcgtgggctgatgatctcaaccttccacacgctggggctggatatcatcaagcgtgagtatgcggcgctggggatgaaggcgaacttttcgctgtttgacgataccgatcagctggcgttgctcaaagagttgaccgaagggctgattgaagatgacaaagttctcctgcaacagttgatttcgactatctctaactggaagaacgatctcaaaacaccgtcccaggcggcagccagtgcgattggcgagcgggaccgtatttttgcccattgttatgggctgtatgatgcacacctgaaagcgtgcaatgttctcgacttcgatgatctgattttattgccgacgttgctgctgcaacgcaatgaagaagtccgcgagcgctggcagaacaaaattcgctatctgctggtggatgagtatcaggacaccaacaccagccagtatgaactggtgaaactgctggtgggcagccgcgcgcgctttaccgtggtgggcgatgacgaccagtcgatctactcctggcgcggcgcacgtccacaaaacctggtgctgctgagtcaggattttccggcgctgaaggtgattaagcttgagcagaactaccgctcttccggacgtattttgaaagcggcgaacatcctgatcgccaataacccgcacgtctttgagaagcgtctgttctccgaactgggttacggcacagagcttaaagttttaagcgcgaataacgaagaacatgaagccgagcgcgtcactggtgaactgattgcgcatcacttcgtcaataaaacgcagtacaaatattacgctattctttatcgcggtaaccatcagtcgcgagtgtttgaaaaattcctgatgcaaaaccgcatcccgtacaaaatttctggtggtacgtcgtttttctctcgtcctgaaatcaaggacttgctggcttatctgcgcgtgctgactaacccggacgatgacagcgcatttctgcgtatcgttaacacgccgaagagagagattggcccggcgacgctgaaaaagctgggtgagtgggcgatgacgcgcaataaaagcatgtttaccgccagctttgatatgggcctgagtcagacgcttagcggacgtggttatgaagcattgacccgctttactcactggttggcagaaatccagcgtctggcggagcgggagccgattgccgcggtgcgcgatctgatccacggcatggattatgaatcctggctgtacgaaacatcgcccagcccgaaagccgccgaaatgcgcatgaagaacgtcaaccaactgtttagctggatgacggagatgctggaaggcagcgaactggatgagccgatgacgctcacccaggtggtgacgcgctttactttgcgcgacatgatggagcgtggtgagagtgaagaagagctggatcaggtgcaactgatgactctgcacgcgtcaaaagggctggagtttccttatgtctacatggtcggtatggaagaagggtttttgccgcaccagagtagcatcgatgaagataatatcgatgaggagcggcggctggcctatgtcggcattacccgcgcccagaaagaattgacctttacgctgtgtaaagaacgccgtcagtacggcgagctggtgcgcccggagccgagccgctttttgctggagctgccgcaggatgatctgatttgggaacaggagcgcaaagtggtcagcgccgaagaacggatgcagaaagggcaaagccatctggcgaatctgaaagcgatgatggcggcaaaacgagggaaataa

SEQ ID NO: 458839 - DNA, 1485 bp, Shigella boydii
atgggttccacctcgtcgctgtatgcagccattgatctcggttcgaatagttttcatatgctggttgtgcgcgaggtggctggaagcatccagacgctgacgcgaataaaacgcaaagtgcgtctggctgctggcctgaatagcgaaaatgccctgtctaatgaagcaatggagcgcggttggcaatgtctgcgcctgtttgctgaacgtctgcaagatatccctccctcgcaaattcgcgttgtcgctacggcgacattacgtcttgccgtcaatgcgggtgattttattgccaaagcgcaggaaatcctcggttgtccggtacaggtgatcagcggtgaagaggaagcacgtctgatttatcagggcgttgctcacacaactggcggtgccgatcagcgcctggtggtggatataggcggtgccagtactgaactggtaaccggcacgggtgcacaaaccacctcgttgttcagcctgtcgatgggctgcgtcacctggctggaacgctattttgccgatcgtaatctggggcaggaaaattttgatgctgcagaaaaagcggcacgcgaagtgttacgtccggttgccgatgaattacggtatcacggctggaaagtgtgcgttggtgcttccggcaccgtgcaggcgttacaggaaatcatgatggcacaggggatggatgaacgcattaccctggaaaagttgcagcaattgaaacagcgagccattcattgcggtcggctggaggaactggagattgacgggctgacgctggaacgtgcgttagtgttcccgagtggtctggcgatcctgatcgccatttttaccgaactgaatattcagtgtatgaccctggcgggcggtgcgctgcgtgaaggcctggtctacggcatgttgcatctggccgtcgagcaggatattcgcagccgtacgctgcgtaatattcagcgccgctttatgatcgatattgatcaggcgcagcgcgtagccaaagttgcggctaacttcttcgatcaggtggaaaaggaatggcatcttgaagcaataagccgcgatttgctcatcagcgcctgtcagcttcatgaaatcggcctgagcgttgactttaaacaagcgccgcaacacgctgcttatctggtgcgtaatctggatcttcccggttttacccccgcacagaaaaaattgctggcgacgctactgctcaaccagactaatccggtcgatctctcatcgctgcatcagcaaaatgccgtaccgccgcgcgtcgcagaacaactctgccgtttactccgcctggccatcatttttgccagccgtcgccgtgacgatctcgtgccagagatgacattacaggctaaccatgaactgttgaccttgacgcttccgcaaggttggctaacccaacatccgctgggtaaagagattattgctcaggaaagccagtggcagagctatgtccactggccgctggaagtgcattaa

SEQ ID NO: 458840 - DNA, 1266 bp, Shigella boydii
atgagcaaaacacatttaacagaacagaagttttccgacttcgccctgcatccgaaggttgtagaagtccttgaaaaaaaagggtttcataactgtacgcccattcaggcactggcccttccgctgacgctggcgggtcgtgacgtagccgggcaggcgcaaaccggtaccgggaaaacgatggcgtttcttacgtcaacgtttcattatcttctctctcatcctgcgattgccgatcgcaaggtgaatcaaccacgtgccttaattatggcaccaacgcgtgaacttgccgtgcagatccatgccgacgcagaaccgctggcggaagctaccggcctgaagctgggtctggcttacggtggtgatggctacgacaaacagctgaaagtgctggaaagcggcgttgacattctgattggcactacggggcgtttaattgactacgccaagcagaaccacattaacctcggtgccattcaggtggtggtactggacgaagccgatcgcatgtacgatctgggctttattaaagatatccgctggctgttccgccgtatgccgcctgcaaaccagcgcctcaacatgctgttctccgccacgctttcgtaccgggtacgtgaactggcgttcgagcagatgaacaatgccgaatatattgaagtggaaccggaacagaaaacgggccaccgtattaaagaagagcttttctacccttctaacgaagaaaaaatgcgtttgctgcaaacgctgatcgaagaagagtggccagacagagcgattattttcgccaataccaaacaccgttgtgaagagatctggggccacctggcggcagatggtcatcgtgtcggtttgttgacaggcgatgtcgcgcagaaaaaacgtctgcgtattcttgatgaatttacccgtggcgatctggatattctggttgccaccgacgttgccgcgcgtggtttgcatattccggcagtgacgcacgtctttaactacgatttacccgatgactgtgaagattacgttcaccgtattggtcgtacaggtcgcgcaggcgcaagcggtcactctatcagcctggcgtgtgaagagtatgcattgaatttgcctgctattgagacctatattggtcactcaattccggtaagcaaatacaatccggacgcattgatgaccgatctgccaaaaccgctgcgcctcacgcgcccacgtacaggcaatggtccgcgtcgtactggcgctccgcgtaatcgtcgtcgttcaggttaa

SEQ ID NO: 458841 - DNA, 330 bp, Shigella boydii
atgagcgataaaattattcacctgactgacgacagttttgacacggatgtactcaaagcggacggggcgatcctcgtcgatttctgggcagagtggtgcggtccgtgcaaaatgatcgccccgattctggatgaaatcgctgacgaatatcagggcaaactgaccgttgcaaaactgaacatcgatcaaaaccctggcactgcgccgaaatatggcatccgtggtatcccgactctgctgctgttcaaaaacggtgaagtggcggcaaccaaagtgggtgcactgtctaaaggtcagttgaaagagttcctcgacgctaacctggcgtaa

SEQ ID NO: 458842 - DNA, 1260 bp, Shigella boydii
atgaatcttaccgaattaaagaatacgccggtttctgagctgatcactctcggcgaaaatatggggctggaaaacctggctcgtatgcgtaagcaggacattatttttgccatcctgaagcagcacgcaaagagtggcgaagatatctttggtgatggcgtactggagatattgcaggatggatttggtttcctccgttccgcagacagctcctacctcgccggtcctgatgacatctacgtttcccctagccaaatccgccgtttcaacctccgcactggtgataccatctctggtaagattcgcccgccgaaagaaggtgaacgctattttgcgctgctgaaagttaacgaagttaacttcgacaaacctgaaaacgcccgcaacaaaatcctctttgagaacttaaccccgctgcacgcaaactctcgtctgcgtatggaacgtggtaacggttctacggaagatttaaccgctcgcgtactggatctggcatcacctatcggtcgtggtcagcgtggtctgattgtggcaccgccgaaagccggtaaaactatgctgctgcagaacattgctcagagcattgcttacaaccacccggattgtgtgctgatggttctgctgatcgacgaacgtccggaagaagtaaccgagatgcagcgtctggtaaaaggtgaagttgttgcttctacctttgacgaacccgcatctcgccacgttcaggttgcggaaatggtgatcgagaaggccaaacgcctggttgagcacaagaaagacgttatcattctgctcgactccatcactcgtctggcgcgcgcttacaacactgttgttccggcgtcaggtaaagtgttgaccggtggtgtggacgccaatgcccttcatcgtccgaaacgcttcttcggtgcggcgcgtaacgtggaagagggcggcagcctgaccattatcgcgacggcgcttatcgataccggttctaaaatggacgaagttatttacgaagagtttaaaggtacaggcaacatggaactgcacctctctcgtaagatcgctgaaaaacgcgtcttcccggctatcgactacaaccgttccggtacccgtaaagaagagctgctcacgactcaggaagaactgcagaaaatgtggatcctgcgcaaaatcattcacccgatgggcgaaatcgatgcaatggaattcctcattaataaactggccatgaccaagaccaatgacgatttcttcgaaatgatgaaacgctcataa

SEQ ID NO: 458843 - DNA, 219 bp, Shigella boydii
atgccaaaaacgccacgtgtttacgtggcgttttgcttttatatctgtaatcttaatgccgcgctggcgatgttaggaaaattcctggaatttgctggcatgttatgcaatttgcatatcaaatggttaatttttgcacagggctggtgggttcggaacggactttcccttctgaataaaggtcttcgtggttatacttctgctaataattttctctga

SEQ ID NO: 458844 - DNA, 1104 bp, Shigella boydii
gtgaatttactgacagtgagtactgatctcatcagtatttttttattcacgacactgtttctgttttttgcccgtaaggtggcaaaaaaagtcggtttagtggataaaccaaacttccgcaaacgtcaccagggattgatacctctcgttggggggatttcggtttacgcagggatttgcttcacgttcggaattgtcgattactatattccgcatgcatctctctatctcgcttgtgccggtgtgcttgttttcattggcgcgctggatgaccgttttgatatcagcgtaaaaatccgtgccaccatacaggccgctgttggcattgttatgatggtgttcggcaaactttatctcagtagcctgggttatatctttggctcctgggagatggtgctcggaccgtttggttacttcctgacgctatttgccgtctgggcggccattaatgcgttcaacatggttgatggcattgatggcttgctgggcgggttgtcctgcgtctcgtttgcagcaatcggtatgattttgtggttcgacgggcaaaccagcctcgcaatctggtgctttgcgatgatcgccgccatcctgccatacatcatgcttaaccttggtatcctgggtcgccgctacaaagtctttatgggtgatgcgggcagtacgctgattggttttaccgttatctggatcctgctcgaaacgacccagggcaaaacccatcccatcagcccggttaccgctttgtggataatcgccattccgctaatggatatggtggcgattatgtaccgtcgcctgcgtaaaggcatgagcccattctctcctgaccgtcagcatattcaccatttgatcatgcgtgccgggtttacttcccgtcaggcgtttgtgctgattacccttgccgcagcactgctcgcttccattggcgtgctggcagaatattctcattttgtcccggagtgggtcatgctggtgctctttttgctagcattcttcctctatggatattgcattaagcgtgcctggaaagttgctcgctttattaagcgcgtaaaacgcagactgcgtagaaatcgtggtggcagccccaatttaaccaaataa

SEQ ID NO: 458845 - DNA, 1047 bp, Shigella boydii
atgacacaaccaatgcctgggaaaccggccgaagacgctgaaaatgaactggatattcgtgggttgtttcgtaccttgtgggctgggaagctatggattattggcatggggctggcgtttgcgttaatcgcgctggcgtatactttttttgctcgtcaggagtggagctcgacggcgattaccgatcgtccaacggtgaatatgctggggggatattactcgcagcagcaatttttgcgtaacctggatgtccgttcaaacatggcttctgccgatcaaccatcggtcatggacgaagcctataaagagtttgttatgcaactggcctcgtgggatacccgcagagagttctggctgcaaaccgactattacaaacagcggatggtgggcaacagcaaagccgatgcggcgttgctggatgaaatgattaacaacatccagtttatccccggagactttacccgcgcggtcaatgacagcgtgaagcttattgccgaaaccgcgcctgacgctaataacctgttacgtcagtatgttgcttttgccagccagcgtgcagccagccatctgaatgatgagctgaaaggcgcatgggcggcacgcaccatccagatgaaagctcaggtgaagcgtcaggaagaggtggcgaaagccatctacgaccgccggatgaacagcattgagcaggcgctgaaaattgctgagcagcataatatttcgcgcagtgcgacagatgtgcctgccgaggaattacctgattcagaaatgttcctgcttgggcgtccaatgctccaggctcgactggaaaatttacaggccgtcggtccggcctttgatctcgactatgatcagaatcgggccatgttaaacaccctgaatgttggtccaaccctggatccgcgttttcagacctatcgctatttgcgtacgccggaagaaccggtaaaacgcgatagcccacgtcgtgccttcctgatgattatgtggggcattgtcggggggctgatcggggctggtgtcgcattaacccgccgttgctcgaaatag

SEQ ID NO: 458846 - DNA, 1131 bp, Shigella boydii
gtgaaagtactgactgtatttggtacgcgcccggaagccatcaagatggctccgttggtgcatgcgttggcaaaagctcctttttttgaggctaaagtttgcgtcactgcgcagcatcgggagatgctcgatcaggtgctgaaactcttttccattgtacctgactacgatctcaacataatgcagccaggacagggcctgacagagataacctgtcggattctggaagggctaaaacctattcttgccgagttcaaaccagacgtcgtgctggttcacggcgacacaacaacgacgctggcaaccagcctggcggcgttttatcagcgtattcctgttggtcacgttgaggctggtttacgcacgggcgatctctattcgccgtggccggaagaggctaaccgtacattgaccgggcatctggcgatgtatcacttctctccaaccgaaacttcccggcaaaacttgctgcgtgaaaacgttgcggatagccgaatcttcattactggtaatacagtcattgatgcactgttatgggtgcgtgatcaggtgatgagcagcgacacgctgcgttcagaactggcggcaaattacccgtttatcgaccccgataaaaagatgattctggtgaccggtcacaggcgtgagagtttcggtcgtggttttgaagaaatctgccacgcgttggcagacattgccaccacgcaccaggacatccagattgtctatccggtgcatctcaacccgaacgtcagagagccggtcaatcgcattctggggcatgtgaaaaatgtcattctgatcgatccccaggagtatttaccgtttgtctggttgatgaaccacgcctggctgattttgaccgactcaggcggcattcaggaagaagcgccttcgctggggaaaccggtgctggtgatgcgcgataccactgagcgtccggaagcggtgacggcgggtacggtgcgtctggtaggcacggataagcagcgaattgtcgaggaagtgacgcgtcttttaaaagacgaaaacgaatatcaaactatgagccgcgcccataacccgtatggtgatggtcaggcatgctctcgcattctggaagcgttaaaaaataatcggatatcactatga

SEQ ID NO: 458847 - DNA, 1263 bp, Shigella boydii
atgagttttgcgaccatttctgttatcggactgggttacatcgggctgcctacagcagcagcgtttgcctcacggcaaaaacaggtgattggtgtcgatatcaaccaatacgcggttgataccatcaatcgtggcgaaatccatatcgtcgagcctgatttggcgagcgtagtaaaaactgccgtagaaggcggttttttacgagcgagcacgacgccagttgaagcggatgcctggctgattgctgtacccacgccgtttaaaggcgatcatgagccagatatgacctacgttgaatcggctgctcgctccattgcgccagtgctgaaaaaaggcgcgctggtgatccttgaatccacctcgccggtggggtcaaccgagaagatggcagaatggttagcagagatgcgtccggatctcactttcccacagcaggtgggcgagcaggcggacgtcaacattgcttactgcccggaacgcgtgttaccgggccaggttatggtcgagctgattaaaaacgatcgcgtgattggtggtatgacgccggtttgttcgacccgcgccagcgaactgtacaaaattttcctcgaaggtgagtgtgtcgtcactaactcgcggacggcggaaatgtgtaagctcaccgaaaacagcttccgcgatgtgaatatcgcttttgctaatgaattgtcgctgatttgtgccgatcaggggattaacgtctgggaactgattcgcctggcgaatcgtcaccctcgcgttaatattcttcagcctggccctggcgtgggcggtcactgcattgctgttgatccgtggtttatcgtggcacagaacccccagcaggcgcggcttatccgtaccgcgcgcgaagtgaacgatcacaaaccgttctgggttatcgatcaggtgaaagcggcggtggctgattgcctggcggctaccgataaacgcgccagtgaactgaaaatcgcctgctttggtctggcgtttaaaccgaatattgatgacctgcgcgaaagcccggcgatggaaatcgctgaactgattgcccagtggcatagcggcgaaactctggttgttgagcctaacatccaccagttgccgaaaaaactgaccgggctttgtactctggcgcagcttgacgaggcgctggcaacggcagacgtgctggtgatgctggtcgatcatagtcagtttaaagttatcaatggcgacaatgtccatcagcagtatgtcgtcgatgccaaaggagtctggcgctga

SEQ ID NO: 458848 - DNA, 1020 bp, Shigella boydii
atgagaaaaattctgataacaggtggtgccgggtttattggctcggcgctggtgcgttatatcatcaacgaaacgagcgacgcggtggtagtggtcgataagctgacctacgccggaaacctgatgtcgctggcaccggtcgcgcaaagcgatcgctttgcctttgagaaagttgatatctgcgatcgggcagaactggcacgcgtattcactgagcatcagccagactgtgtcatgcatctggcagccgaaagccatgttgaccgttctattgacggcccggcagcgtttattgaaaccaacattgtcgggacttatacattgcttgaagcggcgcgggcttactggaatacgctgacggaagataaaaaatcagcgttccgttttcatcatatctccaccgacgaagtatatggtgacctgcactcgacggatgatttcttcaccgaaaccacgccgtatgcgccgagcagcccttattccgcgtcaaaagccagcagcgaccatctggtgcgcgcctggctgcggacctacggtctgccgacgcttatcaccaactgctcgaataactacggtccttaccactttccggaaaaactgatcccgctgatgatcctcaacgcgctggcgggtaaaccgctgccggtatatggcaacgggcagcaaatccgtgactggctgtatgtggaagatcacgcccgcgcgctgtattgcgtggcgaccaccgggaaagtcggtgaaacctataatattggtggtcacaacgagcgtaagaatctcgatgttgtggaaaccatttgcgagctgctggaagaactggctccgaacaagccgcacggcgtggtgcactatcgtgacttgatcacctttgtcgctgaccgtccggggcatgatctgcgttatgccattgatgcttcgaaaattgcccgtgaacttggctggctgccacaggaaacctttgaaagtggaatgcgtaaaacggtgcagtggtatctggctaatgaaagctggtggaagtag

SEQ ID NO: 458849 - DNA, 882 bp, Shigella boydii
atgaaaggtattatcctggcgggcggttccggcacccgattgcatccgattacgcgcggcgtatcgaagcaactgttgccgatttacgataagccaatgatttactatccgctgtcggtgctgatgttggccggtatccgcgaaattctcatcatcactacgccggaagataaaggttatttccagcgcctgctgggcgatggtagtgagttcggtatccagctggaatacgccgaacagcccagcccggacggtctggcgcaggcctttatcatcggtgaaaccttcctcaacggtgaaccttcttgtctggtgctgggcgataacatcttcttcggtcagggcttcagtccgaagctgcgtcatgttgcggcgcgcacggaaggggcgacggtatttggctatcaggtgatggacccggaacgctttggcgtggtggagtttgacgacaatttccgcgctatctcgctggaagaaaagccaaaacagccgaagtcaaactgggcggtgaccgggctttatttctacgacagtaaagtcgtggagtacgcaaagcaggtgaagccgtcggagcgtggtgaactggagattacctccatcaaccagatgtacctcgaggcgggcaacctgaccgttgaactgctcgggcgcggatttgcctggctggacactggcactcacgacagcctgattgaagccagtacctttgtgcagacagtagaaaaacgccagggctttaagattgcctgcctggaagagatcgcctggcgtaacggctggctcgatgacgagggtgtgaagcgtgctgccagttcattagcgaaaactggctatggccaatatctgctggagttacttcgtgcccgtccgcgccagtattga

SEQ ID NO: 458850 - DNA, 675 bp, Shigella boydii
gtgcccgtccgcgccagtattgagccactaacctgggaaaacgccttctttggtgttaacagcgccatcgtgcgcattacgtctgaagcaccgctcctgacgccagacgcgttagcgccgtggtcacgggtgcaggccaaaattgtggcatcaaatacgggtgaactggatgccctgcaacagctgggattctccctggtagaaggtgaagttgatttggcgctacccgtgaacaatgtcagtgatagcggtgctgtcgtggcacaagagaccgatattcccgcattacgtcagttagctagcgccgcatttgcgcaaagccgttttcgtgcgccgtggtatgcgcctgacgccagcggtcgcttttatgcacagtggattgaaaatgccgtgcgcggcacctttgatcatcaatgtctgattctacgtgcggcgtccggcgatattcgcggctatgtctctttacgggaactcaatgcgacagatgcgcgaattggcctgctggctggacgcggtgcaggtgctgagctgatgcaaacggcgctaaactgggcgtatgctcgcggtaaaacaactttgcgggtggcgacccaaatgggcaacaccgccgcgcttaaacgatacatacaaagtggtgcgaatgtagaaagcaccgcgtactggttatacaggtga

SEQ ID NO: 458851 - DNA, 1131 bp, Shigella boydii
atgattccatttaacgcaccgccggtggtgggaaccgaactcgactatatgcagtcggcaatgggtagcggcaaactgtgtggcgatggcggttttacccgtcgctgccagcagtggctggagcaacgttttggcagcgccaaagtgttactgacgccgtcctgcaccgcttcgctggagatggcggcgctgctgctcgatatccagcctggcgatgaagtgatcatgccgagctacacctttgtctccaccgccaatgcctttgtgctgcgtggcgcgaaaatcgtctttgtggatgttcgcccggacaccatgaacatcgacgaaacgttgattgaagcagcgatcaccgacaaaacgcgcgttatcgtgccggtccattacgcgggtgtggcctgcgaaatggacaccattatggcgttggcgaaaaagcataatttgtttgtggtggaagatgccgctcagggcgtgatgtccacttacaaagggcgtgcactgggaaccattggtcatattggctgctttagcttccatgaaaccaaaaactacacggcgggtggtgaaggcggcgcgacgctgattaacgataaagcgttaatcgaacgagccgagatcatccgtgaaaagggcactaaccgcagccagttcttccgtggtcaggtcgataaatatacctggcgcgatattggctccagctatttgatgtccgatctgcaagctgcatacctgtgggcgcaactggaagcagcggatcgtatcaaccagcaacgtctggcgctgtggcaaaactactacgatgcgttagcgcctctggcgaaagccgggcgtatcgagctgccgtcgattcccgatggctgcgtgcagaacgcgcatatgttctacattaaactgcgggatattgatgaccggagcgcgttgattaactttctgaaagaagcggaaatcatggcggtgtttcattacattccgctgcacggttgccctgcgggggaacactttggtgagttccacggtgaagatcgctgcaccaccaaagagagcgagcgcctgctgcgcctgccgctgttctacaacctgtcgcccgtcaatcagcgtacggtaattgcgactttgttgaactacttctcctga

SEQ ID NO: 458852 - DNA, 1251 bp, Shigella boydii
atgtcgttggcaaaagcgtccttgtggacggcggccagtacactggtcaagattggtgccgggttactggtcggtaagttgctggcggtgtcatttggtccggcggggcttgggctggcggcaaatttccgccagttgattaccgtgctcggcgtgcttgccggggctggcatctttaacggtgtaaccaaatacgttgcccagtaccatgataatccgcaacagctgcgccgcgtggtcggcacttcatcagcgatggtacttggtttctctacgctgatggcgctggtttttgtgctggcagctgcgccaatcagccagggattgtttggtaataccgactatcaggggctggtgcgtttagtggcgctggtgcaaatggggatcgcctggggcaacctgttactggcgctgatgaaaggctttcgcgatgccgcaggtaatgcgttatcgctgattgtcggcagcttgattggcgttctcgcgtactacgtcagttaccgtttgggcggttatgaaggggcgttgctgggtctggcgctgattcccgcgctggtggtaattcctgccgccatcatgttgatcaaacgtggtgtcatcccgttaagctatctgaaacccagctgggataacggtctggcagggcagttgagcaaatttacgctcatggcgttgattacgtcggtgaccttgcctgttgcttacatcatgatgcgtaaactgctggcggcgcagtatagctgggatgaagtggggatctggcaaggggtgagcagtatttccgatgcctacctgcaattcattacggcatcgttcagcgtatatttgctgcccacgttgtcgcggctaacggaaaagcgcgatatcacccgggaagtggttaaatcgctaaaattcgtcttaccggcagtggcggcggcgagttttaccgtctggttgctgcgtgattttgctatctggttgctgttgtcgaataaatttaccgctatgcgcgatctctttgcctggcagttagtgggtgatgtgttaaaagtgggcgcttatgtctttggttatctggtgatcgccaaagcgtcactgcggttttatattctggcggaagtcagccagttcactttattgatggtatttgcccactggctaatccctgcgcatggtgcactgggcgcggcgcaggcatatatggcaacttatatcgtctatttttctctttgttgtggcgtgtttttactctggcgtaggcgggcatga

SEQ ID NO: 458853 - DNA, 1080 bp, Shigella boydii
atgactgtactgattcacgtactgggatcggatatccctcaccataaccgaaccgttttgcggtttttcaatgacgcgctggccgcgacgagcgagcacgcgcgcgagtttatggttgttggcaaggacgacggcttaagtgatagctgtccggcgctttctgtgcaatttttccctgggaaaaaatcgctggcggaagcggtcatcgcgaaagcaaaagctaaccgtcagcagcgattttttttccacggtcagttcaatcccacactgtggctggctctgctgagtggtggcattaagcccagccagtttttctggcatatctggggggcagacctgtatgagctttccagtggcttgagatataagcttttttacccgctacgtcgcctggcgcaaaagcgagtcggctgtgtatttgccacccgcggtgatttgagcttttttgccaaaacgcatccaaaggtgcggggcgaactgctgtacttcccgacgcggatggacccttctctcaatacgatggcgaacgatcggcaacgtgaagggaaaatgaccattctggtggggaactccggtgaccgcagcaatgaccatattgctgccttgcgcgccgttcatcagcaatttggcgatacggtaaaagtggtggtgccgatgggatatccgcctaataacgaagcgtacattgaggaagttcgtcaggcggggctggagttattcagcgaagaaaatctgcaaattttgagcgaaaaactggaatttgacgcctatctggcgctacttcgtcagtgcgatcttagttactttatttttgcccgccagcagggcattggtacgctttgcttactgattcaggcgggcattccttgtgtgcttaaccgggaaaatccgttctggcaggatatgacggaacagcatttgccggtgctgtttactaccgacgatctcaacgaggatattgtgcgtgaagcgcagcgccagttggcgtcggtggataaaaacaccattgccttctttagccctaactatctacaaggctggcagcgggcgttggcgattgccgccggggaggtcgcatga

SEQ ID NO: 458854 - DNA, 1353 bp, Shigella boydii
atgagtctgctgcaattcagtggcctgtttgtggtctggctgctctgcacgctgtttattgccacgctgacttggtttgagtttcgccgtgtgcgctttaacttcaatgtcttcttttcattgctgtttttgctcacctttttcttcggcttcccgctgaccagcgtgctggtatttcgctttgatgttggtgtcgcgccgccagaaatcttgttgcaggcgttgctttctgcgggctgcttctacgcggtttactatgtcacctacaaaacccgcctacgcaaacgcgttgctgatgtaccgcgccgtccgctgtttaccatgaaccgcgtggagaccaatcttacgtgggtgatcctgatgggcatcgcgctggtaagcgtcggcatcttcttcatgcacaacggctttttgctgttccggcttaactcctacagtcagatcttctccagtgaagtctccggcgtggcgttaaaacgcttcttttactttttcatcccggcgatgctggtggtctactttctgcgccaggatagcaaagcgtggctgtttttcctcgtcagcacggtcgcctttggcttgctgacttatatgattgtcggcggcactcgcgccaatatcatcatcgcattcgctatcttcctgtttattggcattattcgcggctggatttcgttgtggatgctggcggcggcgggcgtgctggggattgtgggcatgttctggctggcgctaaaacgctatggaatgaatgtgagcggcgatgaagcgttctatacgtttctctatctcactcgcgacaccttctcgccgtgggagaatctggcgttgctgttgcagaactacgacaacatcgacttccagggcctggctccaattgtccgcgatttctatgtctttatcccttcctggctgtggccgggtcgcccgagtatggtgctgaactcagccaactactttaccagggaagtgctgaataaccactccggactggcgatctcgcctacgcttataggctcactggtggtgatgggcggcgcgttgttcatcccgctcggggcgatcgtggttggtctgatcatcaaatggttcgactggctgtatgagctgggcaaccgcgagcctaatcgctataaggctgcgatattgcacagtttctgctttggggcgatcttcaatatgatcgtgctggcacgtgaagggctggattcgtttgtctcacgcgtagtcttttttatcgtggtcttcggcgcatgtctgatgatcgcaaaactgttgtactggctttttgaaagcgccggactcattcataaacgtacaaaatcatcgctccggacgcaggttgaaggataa

SEQ ID NO: 458855 - DNA, 741 bp, Shigella boydii
atgaataacaacaccacggcaccgacctatacgctgcgtggcttacagttgattggttggcgtgatatgcagcacgccctcgattatctgtttgctgacgggcagcttaagcagggaacactggttgccattaatgctgaaaaaatgctgaccattgaagataacgccgaggttagggagttaattaacgctgccgaatttaaatatgcggatggcatcagcgttgtacgttcagtacgtaaaaagtacccgcaggcgcaggtttcccgcgttgccggtgccgatctctgggaagagctgatggcgcgcgcaggcaaagaagggacgccggtatttcttgtgggcggtaaacctgaagtgctggcgcaaactgaagctaaactgcgcaaccagtggaatgtgaatatcgttggcagtcaggatggttattttaaacccgagcagcgtcaggcgctgtttgaacgcattcatgccagcggagcgcaaatcgtcaccgttgcgatgggatcgccaaagcaggagatcttcatgcgcgactgccgtctggtgcatccagatgcgctgtatatgggcgttggcgggacttacgatgttttcaccggtcacgtaaaacgcgcaccgaaaatctggcaaacgctgggactggagtggctctaccgcctgctttcgcagccgagccgcattaagcgtcagcttcgtttgctgcgttatttacgctggcactacaccggcaacctctga

SEQ ID NO: 458856 - DNA, 1386 bp, Shigella boydii
atggcagataacaaaccagagctacagcgtgggctggaagctcgacatatcgaactcatcgccctggggggcaccattggcgtcggcctgtttatgggggccgccagtaccttgaaatgggccgggccatccgtattgttggcctatatcatcgccgggctattcgtctttttcatcatgcgttcaatgggcgaaatgttgttcctcgaaccggttaccggttcgttcgccgtttatgcgcatcgttatatgagcccgttctttggttatctcaccgcctggtcttattggtttatgtggatggcggtggggatctcagaaatcaccgccattggcgtttatgtccagttctggttcccggagatggcgcagtggatacccgcattgatcgcagtggcgctggtggcgttggcgaatctggcggcggtgcggttgtacggcgaaatcgagttctggttcgcgatgatcaaagtcaccacgattatcgtgatgattgtcattggcctgggcgtgattttctttggctttggcaatggcgggcagtcgattggttttagcaatctcacagagcatggcggtttctttgcgggtggctggaaagggttcctgaccgcgctgtgtattgtggtggcgtcctaccagggcgtggagctgattggcattactgccggtgaagcgaagaatccgcaggtgacgttgcgcagtgccgtaggcaaagtgctgtggcggatcctgattttctacgtaggcgcgattttcgttatcgtcaccatcttcccgtggaatgaaagtggcagcaacggcagcccgttcgtactgacttttgccaaaatcggtattaccgcagcggcgggcattatcaactttgtggtgctgacggctgcgctctctggctgtaacagcggcatgtacagttgcggacgtatgctctacgcactggcgaaaaaccgtcagttaccggcggcgatggcgaaagtttcccgtcacggcgtaccagttgcgggtgtggcagtatctattgctattctgctaattggctcatgcctgaactacatcattcccaatccgcagcgtgtgtttgtctacgtctacagtgccagcgtgcttccggggatggtgccatggtttgtgatattgataagccagctgcgttttcggcgtgcacataaagcggcgattgccagccatccgttccgctcaatcctgttcccgtgggccaactacgtaacaatggcattcctgatttgcgttttgatcggcatgtactttaatgaagatacgcgtatgtcgctgtttgttggcatcatctttatgctggcggtgacggcgatttataaagtttttggccttaatcgccacgggaaagcgcataaactggaggaataa

SEQ ID NO: 458857 - DNA, 1236 bp, Shigella boydii
atgctgcaacaggttccaacgcgtgcttttcatgtgatggcgaaaccgagtggttccgattgtaatctgaactgtgactactgtttttatctcgaaaaacaatccctttaccgcgaaaagccagtcacgcatatggacgatgacacgctggaagcgtatgtccgtcactatatcgctgccagcgaaccgcaaaacgaagtggcttttacctggcagggcggcgaaccaacgttactcgggctggatttttaccgccgtgccgtaaagttacaggcgaaatacggtgctggcaggaagataagtaacagcttccagactaacggcgtgctgctcgatgataaatggtgtgcatttctggcagaaaatcattttcttgttgggttatcgctggacggtccggctgagatccacaatcaatatcgcgtgaccaaaggtggcagaccaacgcataagctggtgatgcgtgccctgacgctgctgcaaaaacatcatgtcgactataacgtgctggtctgcgtcaaccgcaccagcgcgcagcaaccgttgcaggtttatgattttttgtgcgatgcgggagtcgaattcatccagtttattccggtggtcgagcgcctggctgatgaaacagctgccagcgatggactgaaactacatgcgcctggtgatattcagggggaactgacggaatggtctgtgcaccccgatgaatttggtgaatttctggtggcgatttttgaccactggatcaaacgcgacgtcggcaagattttcgtgatgaatatcgaatgggcgtttgccaattttgtcggtgcgccgggtgcggtttgccatcatcagccaacctgtgggcgctcggtgattgttgagcacaacggcgacgtttacgcctgcgatcactatgtttatccgcaatatcggctggggaatatgcatcagcaaacaattgcagaaatgatcgattccccgcaacagcaggtgtttggtgaagataaatttaagcaattaccggcgcagtgtcgcagttgtaacgtgttaaaagcgtgctggggaggctgcccgaaacaccgcttcatgctcgatgccagcggcaaaccggggctgaattatttgtgtgccgggtatcagcgttatttccgccatctaccgccatatcttaaagcaatggctgatttgctggcgcacggtcgcccggccagtgacattatgcaggcacatttgctggtggtgaataagtaa

SEQ ID NO: 458858 - DNA, 162 bp, Shigella boydii
atggagttttcgttttcacccaaacttcttgttgttgctgtcgccgccgctcttcctctcatggccagcgcagcagataccccgtcaactgccaccgcacgcaaaggctttgccggatacgatcacccaaaccagtatccacagaacgctgcaatttattga

SEQ ID NO: 458859 - DNA, 276 bp, Shigella boydii
gtggcttctgtttctatcagctgtccctcctgttcagctactgacggggtggtgcgtaacggcaaaagcactgccggacatcagcgctatctctgctctcactgccgtaaaacatggcaactgcagttcacttacaccgcttctcaacccggtacgcaccagaaaattattgatatggccatgaatggcgttggatgccgggcaactgcacgcattatgggcgttagcctcaacacgattttacgtcacttaaaaaactcaggccgcagtcggtaa

SEQ ID NO: 458860 - DNA, 891 bp, Shigella boydii
atgccattacccgattttcatgtttctgaaccttttacactcggtattgaactggaaatgcaggtggttaatccgccgggctatgacttaagccaggactcttcaatactgattgacgcggttaaaaataagatcacggccggagaggtaaagcacgatatcaccgaaagtatgctggagctggcgacggatgtttgccgtgatatcaaccaggctgccgggcaattttcagcgatgcagaaagtcgtattgcaggcagccgcagaccatcatctggaaatttgcggcggtggcacacacccgtttcagaaatggcagcgacaggaggtatgcgataacgagcgctatcaacgaacactggaaaactttggttatctcattcaacaggcgaccgtttttggtcagcatgttcatgttggctgcgccagtggcgatgacgccatttatttgctgcacggcctgtcacggtttgtgccgcacttcatcgccctttccgccgcgtcgccatatatgcaaggaacggatacgcgttttgcctcctcacgaccgaatattttttccgcctttcctgataatggtccgatgccgtgggtcagtaactggcaacaatttgaagccctgtttcgctgtctgagttacaccacgatgatcgacagcattaaagatctgcactgggatattcgccccagtcctcattttggcacggtggaggttcgggtgatggataccccgttaacccttagccacgcggtaaatatggcgggattaattcaggctaccgcccactggttactgacagaacgcccgttcggtaatgactccaacttattgatagtgttttatgttcagataatgcccgatgactttgtcatgcagctccaccgattttga

SEQ ID NO: 458861 - DNA, 153 bp, Shigella boydii
atgctgacgaaatatgcccttgcggcagtcatagttctgtgtttaacggtgctgggatttacgcttctggtcggggattcgctgtgtgagttcaccgtaaaggaacgtaatattgagtttaaggctgttctcgcttacgaaccgaagaagtag

SEQ ID NO: 458862 - DNA, 153 bp, Shigella boydii
atgctgacgaaatatgcccttgtggcagtcatagtgctgtgtttgacggtactgggatttacgcttctggtcggagactcgctgtgtgagttcaccgtaaaggaacgtaatattgagtttaaggctgttctcgcttacgaaccgaagaagtag

SEQ ID NO: 458863 - DNA, 630 bp, Shigella boydii
atggtcgacatgaaaactacgcatacctccctcccctttgccggacatacgctgcattttgttgagttcgatccggcgaatttttgtgagcaggatttactctggctgccgcattacgcgcaactgcaacacgctggacggaagcgcaaagccgaacatttagccgggcggatcgctgcaatttatgcgctgcgggaatatggctataaatgtgtgcccgcaatcggcgagctacgccaaccggtgtggcctgcggaggtatacggcagtattagccactgcggggctacggcattggccgtggtttcccgtcaaccgattggcgttgatatcgaagaaattttttctgcgcaaacagcgaccgaattgacagacaacattattacaccagcagaacacgagcgactcgcagactgcggtttagccttttctctggcgctgacactggcattttccgccaaagagagcgcatttaaggcaagtgagatccaaactgatgcaggttttctggactatcagataattagctggaataaacagcaggtcatcattcatcgtgagaatgagatgtttgctgtgcactggcagataaaagaaaaaatagccataactctgtgccaacacgattaa

SEQ ID NO: 458864 - DNA, 2241 bp, Shigella boydii
atgaacaagaagattcattccctggccttgttggtcaatctggggatttatggggtagcgcaggcacaagagccgaccgatactcctgtttcacatgacgataccattgtcgttaccgccgccgagcagaacttgcaggcacctggcgtttcgaccatcaccgcagatgaaatccgcaaaaacccggttgcccgcgatgtgtcggagatcatccgtaccatgccaggcgttaacctgaccggtaactccaccagtggtcagcgtgggaataaccgacagattgatattcgcggtataggtccggaaaacacgctgattttaattgacggcaaaccggtcagcagccgtaactcggtgcgtcagggctggcgtggcgagcgcgatacccgtggtgatacttcctgggtgccgcctgaaatgattgaacgtattgaagttctgcgtggtccggctgcagcgcgttatggcaacggcgcggcgggtggcgtagttaacatcattaccaaaaaaggcagcggtgagtggcacggttcctgggacgcttatttcaatgcgccagaacataaagaggaaggtgccactaaacgcaccaacttcagtctgaccggcccgctgggcgacgaattcagcttccgcttgtatggcaacctcgacaaaacccaggctgacgcgtgggatatcaaccagggccatcagtccgcgcgtgccggaacgtatgccacgacgttaccagccgggcgcgaaggggtgatcaacaaagatattaatggcgtggtgcgctgggacttcgcgcctctgcaatcactcgaactggaagcgggttacagccgccagggtaacctgtatgcgggcgatacccagaacaccaactctgacgcttacactcgctcgaaatatggcgatgaaaccaaccgcctgtatcgccagaactactcgctgacctggaacggtggctgggataacggagtgaccaccagcaactgggtgcagtatgaacacacccgtaactcgcgtattccggaaggtctggcgggcggtaccgaagggaaatttaacgaaaaagcgacacaggatttcgtcgatatcgatcttgatgacgtgatgctgcacagcgaagttaacctgccgattgatttcctcgttaaccaaacgctgacgctgggtacggagtggaatcagcaacggatgaaggacttgagttccaatacccaggcgctgaccggggcgaacaccggcggcgctattgatggtgtgagtgccaccgaccgtagcccgtattcaaaagcagaaattttctcgctatttgccgaaaacaacatggagctgactgacagcaccatcgtaacgccggggctgcgtttcgatcatcacagtattgtcggcaataactggagcccggcgctgaacatatcgcaaggtttaggcgatgacttcacgctgaaaatgggcattgcccgcgcctataaagcgccgagcctgtaccagactaacccgaactacattctctacagtaaaggtcagggctgctatgccagcgcgggcggctgctatctgcaaggtaacgatgacctgaaagcagaaaccagcatcaacaaagagattggtctggagttcaaacgcgacggctggctggcgggcgtcacctggttccgtaacgattatcgcaataagattgaagcgggctatgtggctgtagggcaaaacgcagtcggcaccgatctctatcagtgggataacgtgccgaaagcagtggttgaaggtctggaaggatcgttaaacgtaccagttagcgaaacggtgatgtggaccaataacatcacttatatgctgaagagtgaaaacaaaaccacgggcgaccgtttgtcgatcatcccggagtacacgttgaactcaacgctgagctggcaggcgcgggaagatttgtcgatgcaaacgaccttcacctggtacggtaagcagcagccgaaaaaatacaactacaaaggtcagccagcggttggcccggaaaccaaagaaatcagtccttacagcattgtgggtctgagcgcgacctgggatgtgacgaagaatgtcagtctgaccggcggcgtggacaacctgttcgacaaacgtttgtggcgtgcgggtaatgcccagaccacgggcgatctggcaggggccaactatatcgcgggtgccggggcgtatacctataacgagccgggacgtacgtggtacatgagcgtaaacactcacttctga

SEQ ID NO: 458865 - DNA, 1203 bp, Shigella boydii
gtgacggcgttaaaagtaggaagtgagagctggtggcagtcgaaacatggcccggaatggcagcgtctgaatgacgaaatgtttgaggtcactttctggtggcgtgatccccaaggttctgaagaatactcgccgataaagcgcgtatgggtctacatcactggtgtgaccgatcatcatcagaacagccagccccagtcgatgcagcgcattgcaggtactgatgtctggcagtggacgacacaactcaatgccaactggcgcggcagctactgctttattcccaccgaacgcgatgacattttttctgcaccatcccccgatcgcctcgaattacgtgaaggctggcgaaaactattaccccaggcaatagccgatccgctgaatccacaaagctggaaaggcgggcgagggcacgctgtttctgcactcgaaatgccgcaagcgcctctgcaaccgggatgggattgtccgcaagcgccagaaataccagccaaagaaattatctggaaaagtgaacggttgaaaaattcacgtcgtgtatggatttttaccaccggcgatgcaacagcagaagaacgcccgctggcagttttgctcgatggcgaattttgggcgcaaagtatgcccgtctggccagtgctgacttcgctgacccatcgtcagcaacttcctcccgccgtgtatgtgttgatcgacgctatcgacaccacgcaccgcgctcacgaactgccgtgtaatgcggatttctggctcgcagtacagcaagagttattacccctggtgaaagctattgccccttttagcgatcgcgccgatcgcaccgtggttgccgggcagagttttggtggactttccgcgctgtatgccggactgcactggcctgaacgttttggttgtgtattaagccagtcaggatcgtactggtggccgcatcggggcgggcagcaagagggcgtgttacttgaaaagcttaaagctggtgaagttagcgccgaaggtctgcgcattgtgctggaagcgggtattcgcgagccgatgattatgcgggccaatcaggcgctgtatgcgcaattacaccccataaaagaatccattttctggcgtcaggttgacggcggacatgatgcgctttgttggcgcggtggcttgatgcaggggctaatcgacctctggcaaccacttttccatgacaggagttga

SEQ ID NO: 458866 - DNA, 219 bp, Shigella boydii
atggcattcagtaatcccttcgatgatccacagggagcgttttacattttgcgcaatgcgcaggggcaattcagtctgtggccgcaacaatgcgccttaccggcaggctgggacattgtgtgtcagccgcagtcacaagagtcctgccagcagtggcttgaagcccactggcgtactctgacaccggcgaatttcacccagttgcaggaggcgcaatga

SEQ ID NO: 458867 - DNA, 3882 bp, Shigella boydii
atgagccagcatttacctttggtcgccgcacagcccggcatctggatggcagaaaaactgtcggatttaccctccgcctggagcgtagcgcattacgttgagttaaccggagaggttgatgcgccattactggcccgcgcggtggttgacggactagcgcaagcagatacgctgcggatgcgttttacggaagataacggcgaagtctggcagtgggtcgatgatgcgctgacgttcgaactgccagaaattatcgacctgcgaaccaacattgatccgcacggtactgcgcaggcattaatgcaggcggatttgcaacaagatctgcgcgtcgatagcggtaaaccactggtctttcatcagctgatacaggtggcggataaccgctggtactggtatcagcgttatcaccatttgctggtcgatggcttcagtttcccggccattacccgccagatcgccaatatttactgcacatggctgcgtggcgaaccaacgcctgcttcgccgtttacgcctttcgctgatgtagtggaagagtaccagcaataccgcgaaagcgaagcctggcagcgtgatgcggcattctgggcagaacagcgtcgtcaactgccgccgcccgcgtcactttctccggcacctttaccggggcgcagcgcttcggcagatattttacgtctgaaaatggaatttaccgacggggaattccgccagttggctacgcaactttcaggtgtgcagcgtaccgatttagcccttgcgctgacggctttgtggctggggcgattgtgcaatcgcatggactacgccgctggatttatctttatgcgtcgactgggctcggcggcgctgacggctaccggacccgtgctcaacgttttgccgttgggtattcacattgcggcgcaagaaacgctgccggaactggcaacccgactggcagcacaactgaaaaaaatgcgtcgtcatcaacgttacgatgccgaacaaattgtccgtgacagcgggcgagcggcaggtgatgaaccgctgtttggtccggtactcaatatcaaggtatttgattaccaactggatattcctggtgttcaggcgcaaacccataccttggcaaccggtccggttaatgaccttgaactggccctgttcccggatgaacacggtgatttgagtattgagatcctcgccaataaacagcgttacgatgagccaacgttaatccagcatgctgaacgcctgaaaatgctgattgcccagttcgccgcggatccggcgctgttgtgcggcgatgtcgatattatgctgccaggtgagtatgcgcagctggcgcagatcaacgccactcaggttgagattccagaaaccacgctgagcgcgctggtggcagaacaagcggcaaaaacaccggatgctccggcgctggcagatgcgcgttaccagttcagctatcgggaaatgcgcgagcaggtggtggcgctggcgaatctgctgcgtgagcgtggcgttaaaccgggcgacagcgtggcggtggcgctaccgcgctcggtctttttgaccctggcgctacatgcgatagttgaagctggcgcggcctggctaccgctggataccggctatccggacgatcgcctgaaaatgatgctggaagatgcgcgtccgtcgctgttaatcaccaccgacgatcaactgccgcgctttgccgatgttccagatttaaccaacctttgctataacgccccgcttaaaccgcagggcagtgcgccgctgcaactttcacaaccgcatcacacggcttatatcatctttacctctggctccaccggtaggccgaaaggggtaatggtcgggcagacggctatcgttaaccgcctgttgtggatgcaaaatcattatctgcttacaggcgaagatgtcgttgcccaaaaaacgccgtgcagttttgatgtctcggtgtgggagtttttctggccgtttattgccggggctaaactggtgatggctgaaccggaagcgcaccgcgacccgctcgctatgcagcaattctttgccgaatatggcgtaacgaccacgcactttgtgccgtcgatgctggcagcatttgttgcatcgctgacgccgcaaaccgctcgccagagttgcgcgacgttgaaacaggttttctgtagtggtgaggccttaccggctgatttatgccgcgaatggcaacagttaaccagcgtgccgttgcataatctatatggcccgacggaagcggcggtagatgtcagctggtatccggcttttggcgaggaactggcacaggtgcgcggcagcagtgtgccgattggttatccggtatggaatacgggtctgcgtattcttgatgcgatgatgcatccggtgccgccgggtgtggcgggtgatctctatctcaccggcattcaactggcgcaggggtatcttggacgacccgatctgaccgccagccgctttattgccgatccttttgtccctggtgaacggatgtaccgtaccggagacgttgcccgctggctggataacggcgcggtggagtacctcgggcgcagtgacgatcagctaaaaattcgcgggcagcgtattgaactgggcgaaatcgatcgcgtgatgcaggcgctgccggatgtcgaacaagccgttacccacgcctgtgtgattaaccaggcggcagccaccggtggtgatgcgcgtcagttggtgggctatctggtgtcgcaatcaggtctgccgttggataccagcgcattacaggcgcagcttcgcgaaacattgccaccacatatggtgcccgtggttctgctgcaacttccactgttacctcttagcgccaacggcaagctggatcgcaaagccttaccgttgcctgaactgaaggcacaagcgccggggcgtgcgccaaaagcgggcagtgaaacgattattgccgcggcattcgcgtcgttgctgggttgtgaggtgcaggatgccgatgctgatttctttgcgcttggcggtcattcgctactggcaatgaaactggcagcgcagttaagtcggcaggttgcccgccaggtgacgccggggcaagtgatggtcgcgtcaaccgtcgctaaactggcaacgattattgatgctgaagaagacagcacccggcgtatgggattcgaaaccattctgccgttgcgtgaaggtaatggcccgacgctgttttgtttccatccggcatccggttttgcctggcagtttagcgtgctctcgcgttatatcgatccacaatggtcgattatcggcattcagtcgccgcgccccaatggccccatgcataccgcggcaaatctggatgaagtctgtgaagcgcatctggcaacgttacttgaacaacaaccgcacggcccttattacctgctggggtattcccttggcggtacgctggcgcagggcattgcggcgcgactgcgtgcccgtggcgaacaggtggcatttcttggtttgctggatacctggccgccagaaacgcaaaactggcaggaaaaagaggctaatggtctggacccggaagtgctggcggagattaaccgcgaacgcgaggccttcctggcggcacagcagggaagtacttcaacggagttgtttaccaccattgaaggcaactacgctgatgctgtgcgtctgctgacgactgctcatagcgtaccgtttgatggtaaagcgacgctgtttgttgctgaacgcacgcttcaggaaggtatgagccccgaacgcgcttggtcgccctggattgccgagctggatatctatcgtcaggattgtgcgcatgtggatattatctctccaggggcgtttgtaaaaattgggccgattattcgcgcaacgctaaacaggtaa

SEQ ID NO: 458868 - DNA, 1134 bp, Shigella boydii
atgtcatcactgaatattaaacagggaagtgacgctcatttttccgagtatcctctggcgtcgcccagtagtaatgaaattgatttacttaatctaatcgaagttttatggcgggccaaaaaaacggtcatggcggtcgtttttgcatttgcctgcgcaggtttactgatctctttcatcctgccgcaaaaatggaccagctcagccgttattactcccgccgaagccattcagtggcaggacctggagaaaacctttaccaaactccgcgttcttgatctcgatgttaatatcgaccgtggcggtgcatttaacctgtttatcaagaagtttcagtccgttagcttgctggaagagtacctgcgttcatcaccttatgtgatggaccaattaaaagaggcgaaaatcgatgaactggatttgcatcgcgctattgttgcattgagcgaaaaaatgaaagcggttgatgacaatgccagtaagaaaaaagatgaaccgtcactgtatacctcctggacgctaagttttaccgcgccaaccagtaaagaggcgcagaccgttttgagcgggtatatcgattatatctctgcgttggtggtgaaagagtcgatagaaaacatccgtaataaactggagatcaaaacccagtttgaaaaagaaaaactggctcaggatcgcattaaaacgaaaaatcaacttgatgcaaacattcagcgcctcaattattctctcgacattgccaacgcggcaggaattaaaaagcccgtatacagtaatggtcaggccgttaaagatgaccccgatttctctatttctctcggcgcagacggtattgaacgcaaactggaaattgaaaaagcggttactgacgttgcggaactgaacggtgaattacgtaatcggcagtatcttgtcgagcaattaacaaaagcaaatgtcaacgatgtgaattttacgccgtttaaatatcagttaagcccgtcattgccagtgaaaaaagacggtccgggtaaggcgattattgtgatcctttccgcgctgatcggcgggatggtggcttgtggtagcgtgttattgcgctatgcgatggcatccagaaaacaggatgccatgatggcagaccacttagtttaa

SEQ ID NO: 458869 - DNA, 816 bp, Shigella boydii
atgaccgaatcagtagcccgtttgcgcggcgaacagttaaccctgggatatggcaaatataccgttgcggaaaatctgactgtagaaattcctgatggtcacttcacggcaattatcggaccaaatggctgtggtaaatccacgttactgcgtaccttaagccgcctgatgacgcctgctcacgggcatgtctggctggatggcgagcacattcaacattacgccagtaaagaagttgcacgccggattggtctgttggcgcaaaatgctaccacgccgggcgatatcaccgtgcaggagctggtggcgcgtggacgttatccgcatcaaccgctgtttacccactggcgcaaagaggatgaagaagcggtaacgaaagcgatgcaggccacgggaataactcatctggcagatcaaagcgtggataccctttctggcggacaacgccagcgagcgtggatcgcgatggtgctggcccaggaaacggcaattatgctgctcgacgaacccacgacctggctggatatcagtcatcagattgatctactggaactgttaagcgaactgaaccgcgagaaaggctataccctggcggcggtgctgcacgatcttaatcaggcctgtcgttacgccagccatttgattgcattgcgggaagggaaaattgttgctcagggagcgccgaaggagattgtcactgctgaactgattgagcgcatttatggtctgcgatgcatgatcattgacgatccggtagccggaacgccgcttgtggtgccgctcgaacgaacggcaccttcaaccgcaaatagttaa

SEQ ID NO: 458870 - DNA, 993 bp, Shigella boydii
atgatttacgtctctcgccgattactcatcacctgtttgctgcttatttccgcctgtgtggttgcaggtatctggggattacgcagcggtgccgtcacgctggaaacctcgcaggtattcgccgcgctgatgggcgatgcgccgcgcagtatgacgatggtggtcaccgaatggcgtttaccacgcgtgctgatggcgctgttgattggcgcggcactgggcgtcagcggtgcgatttttcagtcgctgatgcgtaacccgctcggcagccctgacgtaatgggctttaacaccggggcgtggagcggcgtgctggtggcgatggtgctgtttggtcaggacctgacggctatcgcgctggcagcaatggtgggcggcattgtcacttctctgttggtctggctgctcgcctggcgtaacggtatcgacacctttcggttgattattatcggcatcggcgttcgcgccatgctggtggcctttaatacttggctgttgctgaaagcgtctttagaaacggcgctaacagcgggtttgtggaatgccggatcgctcaatggcctgacgtgggcaaaaacttcgccttccgcacccatcattatattgatgctcattgccgccgccttgctggtgcggcgaatgcgcttgctggagatgggcgatgataccgcctgcgcgctgggcgtcagcgtcgagcgttcgcgtctgttaatgatgctggttgcagtggtgcttaccgctgcggcaacggcgcttgccgggccgatttcctttattgctttagtcgcgccgcacattgcccgacgcattagcggcaccgctcgctgggggctgacccaggcggcgctgtgcggagcgctgttactgctggcggccgatctctgcgcccaacaactgtttatgccgtatcaacttccggttggcgtcgttaccgtcagcctcggcggtatttaccttatcgtcttgttaattcaggagtctcgcaaaaaatga

SEQ ID NO: 458871 - DNA, 1005 bp, Shigella boydii
atgtctggttctgttgccgtgacacgcgccattgccgtgcccggattgctgttattactgattatcgcgacggcattaagcctgctcattggagcaaaatcactccccgcttccgtagtgctggaggccttctccggcacctgccagagcgccgactgcaccatcgtgctcgacgcgcgactgccgcgcacccttgccggtttactggcaggcggcgcgcttggccttgccggggcgttgatgcaaaccctcacccgaaatccacttgccgaccccggcttgcttggcgtgaacgccggagccagctttgccattgtgctgggtgcggcgctgtttggttactcatccgcgcaggaacaactggcgatggccttcgccggggcgctggtggcctcattgattgttgcctttaccggcagtcagggcggcgggcagttaagtccggtgcgtttaaccctggcgggcgtggcgctggcggcagtgctggaagggctgaccagcggcatcgccctgcttaatcctgacgtctacgatcaactgcgtttctggcaagccggttcgctggatattcgcaatctacataccttaaaagtggtgctgatcccggtgctgatcgccggagcaaccgcgctattactgagccgcgcgctgaacagtttaagcctcggcagcgacaccgcgacggcgctgggcagtcgcgtggcgcgcacacagttaattggtctgctggcgattaccgtgctttgtggtagtgcgacagcggtagttggcccgattgcctttattggcctgatgatgccgcatatggcgcgttggctggtgggtgccgatcatcgctggtcgctgcccgtaacgctgcttgctacccctgccctgctgctgtttgccgatatcatcgggcgggtgattgtgcccggtgaactgcgcgtttctgtggtcagtgcctttattggtgcaccggtgctgatcttcctcgtgcgacgtaaaacgcgaggtggtgcatga

SEQ ID NO: 458872 - DNA, 1251 bp, Shigella boydii
atgaataaacaatcctggctgcttaacctcagcctgttgaaaacgcacccggcgtttcgcgcagtattcctcgctcgttttatctcaattgtgtctctgggtttgctcggcgtcgcggtgccggtgcagatccagatgatgacgcattctacctggcaggtggggctttcggtgacgctgaccggcggcgcgatgtttgttggcctgatggttggcggtgtgctggcggatcgctatgagcgcaaaaaagtgattttgctggcgcgcggcacctgtggcattggcttcattggactgtgccttaatgcactgctgccggagccgtcattgctggcaatctatttacttggtttatgggatggttttttcgcatcgcttggcgttacggcgctattggcggcgacaccagcactggtagggcgtgaaaacttaatgcaggccggggcgctcaccatgttgaccgtgcgtctggggtcggtgatttcgcccatgattggcggtttattgctggcgaccggtggcgtagcctggaactacgggctggcggcggcgggcacgtttattaccttgctaccgttgttaagccttccggcgttgccaccgccaccgcagccgcgcgagcatccgttgaaatcattactggcaggatttcgttttctgctcgccagcccgctggtgggcgggattgcgttgctgggtggtttattgacgatggcgagcgcggtgcgggtactgtatccggcgctggctgacaactggcagatgtcggcggcagagattggttttctctatgcggcgatcccgctcggtgcggctattggcgcattaaccagtgggaaactggcgcatagcgcgcgaccaggattgttgatgttgctctccacgttgggatcgttcctcgccattggtttatttggcctgatgccgatgtggattttaggcgtggtttgtctggcgctgttcggctggctgagtgcggtcagttcgttgctgcaatatacaatgctgcaaacgcaaacgccggaagcaatgttagggcgaattaacggtttgtggacggcacaaaacgtgacgggcgatgccataggcgcggcgctgttaggcggtctgggagcgatgatgacaccggttgcttccgcaagcgcgagcggttttggtttgttgattatcggcgtgttgttattgctggtgctggtggagttgcgacgttttcgccagacgccgccgcaggtgacagcgtccgacagttaa

SEQ ID NO: 458873 - DNA, 957 bp, Shigella boydii
gtgagactcgccccgctctaccgcaacgcccttctattaacaggacttttgctttccggaatagccgcagttcaggccgccgactggccgcgtcagattactgacagccggggcactcataccctggaaagccagccgcagcgtattgtttccaccagcgtcaccctgaccggctcactgctggcgattgatgctccggtgattgccagcggcgcgaccacgccaaataaccgcgtcgcggatgaccagggctttttacgccagtggagcaaggtggcgaaagaacgcaaactacaacggctctatatcggcgaaccgagcgccgaagccgttgccgcgcaaatgccggatctgattttaattagcgcaaccggcggggattcggcgctggcgctgtatgatcagctttccaccatcgccccgacattaatcatcaattacgacgacaaaagctggcagtcgctgttaacgcagcttggcgaaattaccgggcatgagaaacaagcggcagagcggattgcacagtttgataagcaactggcagcggcgaaagagcaaatcaaattaccgccgcagccggtcactgctattgtctataccgccgctgcacacagtgccaatctctggacgccggaatcagcacaagggcagatgctggaacaactcggctttacgctggcgaaattgcccacagggttaaacgccagccaaagccagggcaaacgccatgacatcattcagcttggtggagaaaatctggctgcagggttaaatggcgagtcactattcctgttcgccggtgatcagaaagacgccgatgcgatttatgccaatccactgctcgcgcacctgcccgcagtacaaaacaagcaggtttatgcgctgggaaccgagacgttccgcctggattactacagcgccatgcaagtgctggaacgacttaaggcgctgttttaa

SEQ ID NO: 458874 - DNA, 1176 bp, Shigella boydii
atggatacgtcactggctgaggaagtacagcagaccatggcaacacttgcgcccaatcgctttttctttatgtcgccgtaccgcagttttacgacgtcaggatgtttcgcccgctttgatgaaccggctgtgaacggggattcgcccgacagtcccttccagcaaaaactcgccgcgctgtttgccgatgccaaagtgcagggcatcaaaaatccggtgatggtcggggcgattcccttcgatccacgtcagccttcgtcgctgtatattcctgaatcctggcagtcgttctcccgtcaggaaaaacaagcttccgcccgccgtttcacccgcagccagtcgctgaatgtggtggaacgccaggcaattccggaacaaaccacgtttgaacagatggttgcccgcgctgccgcacttaccgccacgccgcaggtcgacaaagtggtgttgtcacggttgattgatatcaccactgacgccgccattgatagtggcgtattgctggaacggttgattgcgcaaaacccggttagttacaacttccatgtcccgctggctgatggtggcgtcctgctgggggccagcccggaactgctgctacgtaaagacggcgagcgttttagctccattccgttagccggttccgcgcgtcgtcagccggatgaagtgctcgatcgcgaagcgggtaatcgtctgctggcgtcagaaaaagatcgccatgaacatgaactggtgactcaggcgatgaaagaggtactgcgcgaacgcagtagtgagttacacgttccctcctctccacaattgattaccacgccgacgctgtggcatctcgcaactccctttgaaggtaaagcgaattcgcaagaaaacgcactgactctggcctgtctgctgcatccgacccccgcgctgagcggtttcccgcatcaggccgcgactcaggttattgctgaactggagccgttcgaccgcgaactgtttggcggcattgtgggttggtgtgacagcgaaggtaacggcgaatgggtggtgaccatccgctgcgcgaagctgcgggaaaatcaggtgcgtctgtttgccggagcggggattgtgcctgcgtcgtcaccgttgggtgagtggcgcgaaacaggcgtcaaactttctaccatgttgaatgtttttggattgcattaa

SEQ ID NO: 458875 - DNA, 1611 bp, Shigella boydii
atgagcattccattcacccgctggccggaagagtttgcccgtcgctatcgggaaaaaggctactggcaggatttgccgctgaccgacattctgactcgccacgctgcgagtgacagcatcgcggttatcgacggcgagctacagttgagttaccgggagctgaatcaggcggcggataacctcgcgtgtactttacgccgtcagggcattaaacctggtgaaaccgcgctggtacaactgggtaacgtcgctgaattgtatattacctttttcgcgctgctgaaactgggcgttgcgccggtgctggcgttgttcagccatcagcgtagtgaactgaacgcctatgccagccagattgaacccgcattgctgattgccgatcgccaacatgcgttgtttagcggggatgatttcctcaatactttcgtcacagaacattcctccattcgcgtggtgcaactgcacaacgacagcggtgagcataacttgcaggatgcgattaaccatccggcagacggttttactgccacgccatcacctgctgatgaagtggcctatttccagctttccggcggcaccaccggtacaccgaagctgatcccgcgcactcataacgactactactacagcgtgcgtcgtagcgtcgagatttgtcagttcacacaacagacgcgctacctgtgcgcgatcccggcggctcataactacgccatgagttcgccaggatcgctgggcgtctttcttgccggaggaacggttgttctggcggccgatcccagcgctacgctttgcttcccattgattgaaaaacatcaggtgaacgtcaccgcgctggtgccgccggcagtcagcctgtggttgcaggcgctggctgaaggcgaaagccgggcgcagcttgcctcgctgaaactgttacaggtcggcggcgcacgtctttctgccacccttgcggcgcgtattcccgctgagattggctgccagttgcagcaggtgtttggcatggcggaagggctggtgaactacacccgtcttgatgatagcgcggagaaaattatccatacccagggttacccaatgtgtccggacgatgaagtgtgggttgccgatgccgaaggaaatccactgccgcaaggggaagtcggacgcctgatgacgcgcgggccgtacaccttccgcggttattacaaaagtccgcagcacaatgccagcgcctttgatgccaacggtttttactgttccggcgatctgatctctattgatccagagggttacatcaccgtgcaggggcgcgagaaagatcagatcaaccgtggcggcgagaagatcgctgccgaagagatcgaaaacctgctgctgcgccatccggcggtgatctatgccgcactggtgagcatggaagatgagctgatgggcgaaaaaagctgtgcttatctggtggtaaaagagccgctgcgcgcggtgcaggtgcgtcgtttcctgcgtgaacagggtattgccgaatttaaattaccggatcgcgtggagtgtgtagattcacttccgctgacggcggtcgggaaagtcgataaaaaacaattaagtcagtggctggcgtcacgcgcatcagcctga

SEQ ID NO: 458876 - DNA, 858 bp, Shigella boydii
atggctattccaaaattacaggcttacgcactgccggagtctcacgatattccgcagaataaagttgactgggcctttgaactgcaacgtgccgcgttgttaatccatgatatgcaggactattttgtcagcttctggggcgagaactgcccgatgatggagcaggtgatcgcgaatattgctgcgctgcgcgactactgcaaacagcacaatatcccggtttattacaccgtccagccgaaagagcagagcgatgaagatcgggcgctgttgaatgatatgtgggggccgggcctgacccgttcgccggaacagcaaaaggtggtggatcgcctgacgccagatgccgacgacacggtgctggtgaagtggcgctacagcgcgtttcatcgttctccgctggagcaaatgctcaaagagagtggacgtaaccagctgattattaccggggtatatgcccacattggctgtatgaccaccgcaaccgacgcatttatgcgcgatattaaaccgtttatggtggcggatgcgctggccgatttcagccgtgacgagcatttgatgtcgctgaaatatgtggccgggcggtctggccgggtggtgatgactgaagaattactgccagcacctgtccccgccagcaaagcggcgctgcgtgaggttatcctgccgttgctggacgagtccgatgaaccgttcgatgacgacaacctgatcgactacggtctggattcggtgcgcatgatggcgctggcggcgcgctggcgcaaagtgcatggtgatatcgactttgtcatgctggcgaaaaacccgaccatcgacgcctggtggaagctactctcccgcgaggttaaataa

SEQ ID NO: 458877 - DNA, 747 bp, Shigella boydii
atggatttcagcggtaaaaatgtctgggtaaccggcgcaggtaaaggtatcggctacgccacggcgctggcgtttgttgaggcgggagcgaaagttacaggttttgatcaagcgttcactcaggagcaatatccctttgcgaccgaagtaatggatgttgccgacgccgggcaggtggcgcaggtatgtcagcgactgttagctgaaacggagcgactggacgtgctgatcaatgcggcgggaattttgcgcatgggcgcgaccgatcagctcagtaaagaggactggcagcagacttttgcggttaacgtcggcggtgcgtttaacctgttccagcaaaccatgaaccagtttcgccgtcagcggggcggggcgattgtcactgtggcgtccgacgccgcacacacgccgcgtattggtatgagtgcttatggcgcatcgaaagcggcgctgaaaagcctggcgttgagcgtcgggctggaactggcgggtagcggcgtgcgctgtaatgtggtttcgcctggctccaccgacaccgatatgcaacgcacgctgtgggtgagcgatgacgccgaagaacagcgtattcgcggctttggcgagcagtttaaactcggcattccgctggggaaaatcgcccgtccacaagagatcgccaacacgattttgttcctcgcctctgacctcgccagccatatcaccctacaggatattgtggtcgatggcggctcaacgctgggggcataa

SEQ ID NO: 458878 - DNA, 414 bp, Shigella boydii
atgatctggaaacgccatttaacgctcgacgaactgaacgccaccagcgataacacaatggtggcgcatctgggaattgtgtatacccgtctgggagatgatgtgctggaagccgaaatgccggttgatacccgtactcatcagccgtttggcctgctgcatggcggcgcgtcggcggcgctggctgaaacgctgggatcgatggccggatttatgatgacccgtgacgggcagtgtgtggtgggcacggaacttaacgccacccatcatcgcccggtgtctgaaggcaaggtacgcggcgtctgccagccgctgcatcttgggcggcaaaatcagagctgggaaatcgtcgttttcgatgaacaggggcggcgttgctgcacttgtcggctgggtacggcagttttgggatga

SEQ ID NO: 458879 - DNA, 2106 bp, Shigella boydii
atgaacaaatcagggaaatacctcgtctggacagtgctctctgtaatgggagcatttgctctgggatacattgctttaaatcgtggggaacagatcaacgcgctgtggattgtggtggcgtcggtctgtatctatctgatcgcttaccgtttttatgggttgtatatcgccaaaaatgtgctggcggttgacccgaagcgtatgacgccagcggtgcgccataacgacgggctggactatgtgccgacggacaagaaagtgctgttcggtcaccattttgcggccatcgccggagcaggtccgttggttgggccggtgctggcagcgcaaatgggctacctgccggggatgatctggctactcgccggggtggttctcgccggtgcggtgcaggatttcatggtgctgtttgtttctacgcgccgtgacggtcgatcgctgggtgagctggtcaaagaagagatggggccaaccgccggggtgatagcgctggtggcctgctttatgatcatggtcattatccttgcagtactggcgatgatcgtggtgaaagccctgactcatagcccgtggggaacgtataccgttgcgttcaccattccgctggcgctgtttatggggatctacctgcgctatctgcgtccggggcgtattggtgaagtgtcggtcatcggtctggtattcctgattttcgccattatctctggcggcagggtggcagaaagtccgacctgggcaccgtactttgactttaccggcgtgcagctgacctggatgctggtgggttacggttttgtggcggcggtgctgccggtgtggttgctgctggccccgcgtgactacctctctaccttcctgaaaatcgggacgatcgtcggtctggcggtaggcattttgattatgcgcccgacgctgaccatgcctgcgctgaccaaatttgtcgatggcactggcccggtatggaccggtaacctgttcccgttcctgtttatcaccatcgcctgtggcgcggtgtctggcttccatgcgctgatctcttccggcaccacgccgaagatgctggcgaacgaagggcaggcttgttttatcggctacggtggaatgttaatggaatccttcgtggcgattatggcgctggtttccgcctgtatcatcgatccgggcgtttactttgccatgaacagcccaatggcggtgctggctccggcagggacggcggatgtggtcgcttctgtcgcgcaggtggtgagtagctggggctttagcattacaccagatacgctcaaccagattgccagcgaagtgggtgaacagtcgatcatttcccgtgcgggcggtgcgccgacgttggcggtggggatggcttacatcctgcacggtgcgctgggtggtatgatggatgtggcgttctggtatcacttcgccattctgtttgaagctctgtttattctgacggcggtagatgcgggtacgcgtgctgcgcgctttatgttgcaggatctgctgggcgtggtgtctcctggcctgaagcggaccgattcactgcctgctaacctgctggcaacggcgctgtgcgtactggcgtggggctacttcctccatcagggcgtggtcgatccgctgggcggtattaacactctgtggccgctgtttggtattgccaaccagatgctggcagggatggcgctgatgctctgtgccgtggtgttgttcaagatgaaacgtcaacgttacgcctgggcggcgctggtaccaacggcctggctgctgatttgtaccctgaccgctggctggcagaaagcgtttagcccggatgcgaaagtcggcttcctagccattgctaacaagttccaggcaatgatcgacagcggcaatattccgtcgcagtatactgagtcacagctggcgcaactggtgttcaacaaccgtctggatgccgggttaaccatcttctttatggtggtcgtggtggttctggcactgttctcgattaagacggcacttgcggcattgaaagatccgaagccaacggcgaaagaaacgccgtatgagccgatgccggaaaatgtcgaggagatcgtagcgcaggcgaaaggcgcgcactaa

SEQ ID NO: 458880 - DNA, 528 bp, Shigella boydii
atggcaggaaaaacgatgataccgttactcgcctttgccgcgtggagtggtaccggaaaaactacgcttttgaaaaaactgatcccggcattatgcgccagagggatccgtccagggctgattaagcatacgcaccatgatatggatgttgataagccaggcaaagatagctatgagctgcgcaaggctggcgcggcacaaaccatcgttgccagccagcaacgatgggccttgatgacggaaacaccagacgaagaagagctggatctacagtttctcgcaagtcgaatggatacctcaaagctggatttgattctggtcgaagggtttaagcatgaagagatcgcaaagattgtgctgtttcgcgatggagccggacatcgacctgaagaattagtgatagacaggcatgttattgctgtagccagtgatgtgccgcttaatcttgatgtcgcattactggatattaatgatgttgaggggctggctgattttgtagtggagtggatgcaaaagcagaacggataa

SEQ ID NO: 458881 - DNA, 585 bp, Shigella boydii
gtgaatctgatgacgacgataacaggcgttgtgctggcaggcggtaaagccagacgaatgggcggcgtagataaaggattgcttgaattaaacggcaaaccattatggcaacatgtcgctgacgcgcttatgacgcagctctctcacgtcgtggttaatgccaatcgtcatcaggaaatctatcaggcaagcggtctgaaagtgattgaagattcactggcggattacccaggccctctggcaggaatgctttcagtaatgcagcaggaagctggtgagtggtttttgttttgcccgtgcgatacgccttacattccccctgatttagcagcccggcttaatcatcagcgcaaagatgcgcctgtcgtgtgggtccatgacggtgaacgcgatcacccgactattgctctggtaaaccgcgctattgagcctttattactggaatatctgcaagcaggagaacgccgggtaatggcatttatgcgtctggctggcggtcatgcggttgatttcagcgatcataaagatgcatttgttaacgtgaatacgccagaggagcttgcccgatggcaggaaaaacgatga

SEQ ID NO: 458882 - DNA, 270 bp, Shigella boydii
atgaaatgtaaacgtctgaatgaagttattgaattcctccagccagcctggcaaaaagagccagaccttaacctgttgcaatttttgcagaaactggcgaaagagtcaggttttgacggcgaactggcggatttgacggatgacattctgatctatcacctgaaaatgcgtgattccgcgaaagatgcggtgatcccgggtttgcagaaagattatgaagaagacttcaaaacggcgctgttacgcgctcgcggcgtaattaaagagtaa

SEQ ID NO: 458883 - DNA, 987 bp, Shigella boydii
atgaacaacagcgcttttactttccagacactacacccggataccatcatggatgctctatttgagcaagggatccgggtggattccggtcttaccccgcttaacagctatgaaaaccgtgtctatcaatttcaggacgaagatcgtcgacgtattgtcgtcaaattttatcgccctgaacgttggacagccgatcaaatcctcggagaacatcaatttgcgttgcagttggtaaatgatgaagttccggtcgcagcacctgtggcctttaacggtcagactttattgaatcatcagggattttatttcgctgtttttccaagcgtcggtggtcgccagttcgaagctgataatatcgatcagatggaagcggttgggcgttatttagggcgtatgcaccagacggggcgcaaacagctttttatccatcgcccgaccatcggtctgaatgaatatctcattgagccacgcaagctgtttgaggacgctacactgataccttccgggttgaaagcggcattcctgaaagcgacagatgagctgatcgccgccgttacagcgcactggcgggaagattccaccgttctgcgcttacatggagactgccacgccgggaatattctctggcgcgatggtccaatgtttgttgatctggatgatgcacgtaatggtccagctattcaggatttgtggatgttgctcaatggcgataaagccgagcagcggatgcaactggaaactattattgaagcttatgaagaatttagcgagttcgacaccgctgaaatcggactgattgaacctttacgcgccatgcgtttggtttattatcttgcctggctaatgcggcgttgggctgatcccgcgttcccgaaaaatttcccgtggttaaccggggaagattactggctgcgacaaacggcgacttttatagaacaggcaaaagttctacaagaaccccctttacaattaacacctatgtattaa

SEQ ID NO: 458884 - DNA, 627 bp, Shigella boydii
atgaaaaagatttggctggcgctggctggtttagttttagcgtttagcgcatcggcggcgcagtatgaagatggtaaacagtacactaccctggaaaaaccggtagctggcgcgccgcaagtgctggagtttttctctttcttctgtccgcactgctatcagtttgaagaagttctgcatatttctgataatgtgaagaaaaaactgccggaaggcgtgaagatgactaaataccacgtcaacttcatgggtggtgacctgggcaaagatctgactcaggcatgggctgtggcgatggcgctgggcgtggaagacaaagtgactgttccgctgtttgaaggcgtacagaaaacccagaccattcgttctgcttctgatatccgcgatgtatttatcaacgcaggtattaaaggtgaagagtacgacgcggcgtggaacagcttcgtggtgaaatctctggtagctcagcaggaaaaagctgcagctgacgtgcaattgcgcggtgttccggcgatgtttgttaacggtaaatatcagctgaatccgcagggtatggataccagcaatatggatgtttttgttcagcagtatgctgatacagtgaaatatctgtccgagaaaaaataa

SEQ ID NO: 458885 - DNA, 1431 bp, Shigella boydii
atgatacgtaagtcagctacaggtgttattgttgcgttagccgtaatctggggtggtggcacatggtacacaggtacgcaaattcagcctggtgtcgaaaaatttattaaagattttaacgatgctaaaaagaaaggtgaacatgcctacgatatgacgttaagttataaaaactttgacaaaggcttttttaattcccattttcaaatgcaaatttcatttgataacggtgcacccgatctcaatatcaagccaggccagaaggttgcatttgatgtggatgttgagcacggtccgttgcccatcacaatgttaatgcatggtaatgtcatcccagcactggcagcggcaaaagtgaacttagtgaataatgaactgacacaaccgctatttatcgccgcgaaaaataaatcgcccgtggaagcgacattgcgattcgcgtttggtggctcattctctacgacattagatgttgcccctgcagagtatggaaagttttcttttggtgagggccagtttacttttaatggtgatggtagttcattgtctaacctggatattgaaggcaaagtcgaagatattgttctgcaattatcaccaatgaacaaagtaacggcaaaaagttttaccattgattctctgacacgattagaagaaaagaaatttccggttggtgaaagcgagtcgaaatttaatcaggttaatattatcaatcagggggaagacgttgcccaaatcgatgctttcgttgcaaaaaccaggctggatcgcgttaaagacaaagattatatcaatgtcaatctgacctacgaacttgataagttaacaaaagggaatcagcaactcggtagtggtgagtggtcattgattgctgaatctattgatccctcagcagtgcgccaatttatcatccagtataacattgcgatgcagaagcagcttgctgcacaccctgagttagcaaacgatgaagttgctctgcaagaagtgaatgctgcattgttcaaagagtatttaccgttattacaacaaagtgagccgaccattaaacaaccggtaagatggaagaacgcactcggcgaactaaatgccaatctggatatcagtattgccgacccagccaaatcttcatcatccacaaacaaagatatcaaatcgctcaattttgatgtgaagttaccgcttaatgtcgtcacagaaaccgcaaaacagcttaatttatctgaaggaatggatgcggaaaaagcgcaaaagcgggctgataaacaaatcagcgggatgatgaccttaggtcagatgtttcagttaatcacgattgacaacaataccgccccgctgcaactgcgttatacaccgggtaaagttgtttttaacggacaggagatgagcgaagaagaatttatgtctcgtgccggacattttgttcattaa

SEQ ID NO: 458886 - DNA, 933 bp, Shigella boydii
atggctaaccttttgaataaattcattatgacgagaatactcgctgcgataacccttttgctgagtatcgtattgaccattttggtcactattttttgttccgtcccgatcatcattgccgggattgtaaaactattgctacctgtgccagtcatttggcgaaaggtttcgcgtttttgtgattttatgatgtattgctggtgtgaaggtctggcggtattactgcatctgaacccactcctgcaatgggaagttcacgggctggaagggttaagtaagaagaactggtatctgcttatttgtaaccaccgtagttgggcagatattgtcgtactgtgcgtgctgtttcgtaagcacattccgatgaataaatatttcctcaagcaacagctggcctgggtgccatttcttggcctggcgtgctgggcgctggatatgccgtttatgaagcgttattcccgcgcttatttattacgtcatccggagcgacgtggtaaagatgttgaaaccactcggcgttcttgtgaaaagtttcgcctgcatcccaccaccattgtcaatttcgttgaaggctcccgtttcacgcaagaaaaacatcagcaaacccactccacttttcaaaacttgttgccaccaaaggcggcaggcattgcgatggcgctaaatgtactgggtaaacaattcgataaactgcttaatgttacgctgtgttatccggacaataaccgtcagccgttcttcgatatgttaagcggtaaactgacgcgaattgtcgttcatgtggatttacagcctattgccgatgagttacatggcgactacatcaatgacaaaagctttaagcgccattttcagcaatggctgaactcactgtggcaggaaaaagaccgacttctgacgtcgttgatgtcatcacagcggcaggacaagtaa

SEQ ID NO: 458887 - DNA, 186 bp, Shigella boydii
atgagtttttcaccgcttttcgtgaaaatcttttgtagatcttctggatcgctcgcaaatcgtcatgtggataactttgtgcataaattatttacatcgcttttaatttattatcatgctttttacagtatgatgtttgtctttgtttttcatgtagttaaaaataaagccatccctaataattga

SEQ ID NO: 458888 - DNA, 2787 bp, Shigella boydii
atggttcagatcccccaaaatccacttatccttgtagatggttcatcttatctttatcgcgcatatcacgcgtttcccccgctgactaacagcgcaggcgagccgaccggtgcgatgtatggtgtcctcaacatgctgcgcagtctgatcatgcaatataaaccgacgcatgcagcggtggtctttgacgccaagggaaaaacctttcgtgatgaactgtttgaacattacaaatcacatcgcccgccaatgccggacgatctgagagcacaaatcgaacctctgcacgcgatggttaaagcgatgggactgccgctgctggcggtttctggcgtagaagcggacgacgttatcggtactctggcgcgcgaagccgaaaaagccgggcgtccggtgctgatcagcactggcgataaagatatggcgcagctggtgacgccaaatattacgcttatcaataccatgacgaataccatcctcggaccggaagaggtggtgaataagtacggcgtgccgccagaactgatcatcgatttcctggcgctgatgggtgactcctccgataacatccctggcgtaccgggcgtcggtgaaaaaaccgcgcaggcattgctgcaaggtctgggcgggctggatacgctgtatgccgagccagaaaaaattgctgggttgagcttccgtggcgcgaaaacaatggcagcgaagctcgagcaaaacaaagaagttgcttatctctcataccagctggcgacgattaaaaccgacgttgaactggagctgacctgtgaacaactggaagtgcagcaaccggcagcggaagagttgttggggctgttcaaaaagtatgagttcaaacgctggactgctgatgtcgaagcgggcaaatggttacaggccaaaggggcaaaaccagccgcgaagccgcaggaaaccagtgttgcagacgaagcgccagaagtgacggcaacggtgatttcttatgacaactacgtcaccatccttgatgaagaaacactgaaagcgtggattgcgaagctggaaaaagcgccggtatttgcatttgataccgaaaccgacagccttgataacatctctgctaacctggtcgggctttcttttgctatcgagccaggcgtagcggcatatattccggttgctcatgattatcttgatgcgcccgatcaaatctctcgcgagcgtgcactcgagttgctaaaaccgctgctggaagatgaaaaggcgctgaaggtcgggcaaaacctgaaatacgatcgcggtattctggcgaattacggcattgagctgcgtgggattgcgtttgataccatgctggagtcctacattctcaatagcgttgccgggcgtcacgatatggacagcctcgcggaacgttggttgaagcacaaaaccatcacttttgaagagattgcgggtaaaggcaaaaatcaactgacctttaaccagattgccctcgaagaggccggacgttacgccgccgaagatgctgatgtcaccttgcagttgcatctgaaaatgtggccggacctgcaaaaacacaaagggccgttgaacgtcttcgagaatatcgaaatgccgctggtgccggtgctttcacgcattgaacgtaacggtgtgaagatcgatccgaaagtgctgcacaatcattctgaagagctcaccttgcgtctggctgagctggaaaagaaagcgcatgaaattgcaggtgaagaatttaacctttcttccaccaagcagttgcaaaccattctgtttgaaaaacagggtattaaaccgctgaagaaaacgccgggtggcgcgccgtcaacgtcggaagaggtactggaagaactggcgctggactatccgttgccaaaagtgattctggagtatcgtggtctggcgaagctgaaatcgacctacaccgacaagctgccgctgatgatcaacccgaaaaccgggcgtgtgcatacctcttatcaccaggcagtaactgcaacgggacgtttatcgtcaaccgatcctaacctgcaaaacattccggtgcgtaacgaagaaggtcgtcgtatccgccaggcgtttattgcgccagaggattatgtgattgtctcagcggactactcgcagattgaactgcgcattatggcgcatctttcgcgtgacaaaggcttgctgaccgcattcgcggaaggaaaagatatccaccgggcaacggcggcagaagtgtttggtttgccactggaaaccgtcaccagcgagcaacgccgtagcgcgaaagcgatcaactttggtctgatttatggcatgagtgctttcggtctggcgcggcaattgaacattccacgtaaagaagcgcagaagtacatggacctttacttcgaacgctaccctggcgtgctggagtatatggaacgcacccgtgctcaggcgaaagagcagggctacgttgaaacgctggacggacgccgtctgtatctgccggatatcaaatccagcaatggtgctcgtcgtgcagcggctgaacgtgcagccattaacgcgccaatgcagggaaccgccgccgacattatcaaacgggcgatgattgccgttgatgcgtggttacaggctgagcaaccgcgtgtacgtatgatcatgcaggtacacgatgaactggtatttgaagttcataaagatgatgttgatgccgtcgcgaagcagattcatcaactgatggaaaactgtacccgtctggatgtgccgttgctggtggaagtggggagtggcgaaaactgggatcaggcgcactaa

SEQ ID NO: 458889 - DNA, 633 bp, Shigella boydii
ttgactaatttgaattatcaacagacgcattttgtgatgagtgcgcctgatattcgccacctaccttccgataccggaattgaagtggcttttgcaggccgttccaacgcaggtaaatccagcgcgctgaacacgctgactaaccagaaaagcctggctcgtacctcaaaaaccccagggcgcacccagcttatcaacctgtttgaagtggctgacggcaagcgtctggttgacttgcctgggtacggttatgcggaagtcccggaagagatgaagcgcaaatggcagcgtgcgctcggcgaatacctcgaaaaacgtcagagcctgcaaggtctggtggtgctaatggatattcgccatccgctgaaagatttggatcagcagatgattgagtgggcggtagacagcaatatcgccgttctggtgctgctgaccaaagcggacaaactggcaagcggcgcacgtaaagcgcaattgaatatggtgcgtgaagctgtactggcgtttaacggtgatgtgcaggttgaaacgttttcttcgttgaagaaacaaggcgtggacaagctgcggcagaaactggatacctggtttagcgagatgcagcctgtagaagaaacgcaggacggcgaataa

SEQ ID NO: 458890 - DNA, 510 bp, Shigella boydii
atgaaaccatcatcttcaaactcacgcagcaaaggtcatgcaaaagcgcgtcgaaaaacacgcgaggagctggatcaggaagctcgtgatcgcaagcgtcagaaaaaacgtcgtggtcatgcgccgggcagccgcgcagcgggcggaaacaccacgtcaggcagcaaaggccagaacgcaccaaaagatccacgtattggcagtaaaacccctattccattgggcgtgactgaaaaagtcaccaaacagcacaaaccgaagagtgagaaacctatgctttcaccgcaggcggagttggaattactggaaacggatgagcgtctggatgcgctgctggaacgtctggaagcaggcgaaaccctgagtgccgaagagcaatcctgggtggatgctaaactggatcgtattgatgagttgatgcagaaactcggcctctcttatgacgatgacgaagaagaggaagaagacgagaagcaagaagacatgatgcgtctgctgcggggcaactaa

SEQ ID NO: 458891 - DNA, 1374 bp, Shigella boydii
atgtctgtacagcaaatcgactgggatctggccctgatccagaaatataactattccgggccacgatacacctcgtacccgaccgcgctggagttttcagaagactttggcgaacaggcgtttttacaagccgtggcgcgctatcctgagcgtccattatctctctacgtacatatcccgttctgccataagctttgttacttctgcggttgtaataagattgttactcgccagcagcacaaggccgatcagtatctggacgcgctggagcaagaaatcgtccatcgtgcaccgctgttcgccgggcgtcacgtcagccaattgcactggggcggcggaacgccgacgtatctgaataaagcgcaaatcagccgcctgatgaagctgctgcgcgaaaacttccagttcaatgccgatgcggagatttcgatcgaagtcgatccgcgggaaatcgaactggatgtactcgatcatttacgcgccgaaggctttaatcgcctgagcatgggcgtgcaggacttcaacaaagaagtgcaacgtctggttaaccgcgagcaggatgaagagttcatctttgcactgcttaaccatgcgcgtgagattggttttacctccaccaacatcgacctgatttacggcctgccgaaacagacgccggagagtttcgcctttaccctgaaacgtgtggcggagctgaaccccgatcgtctgagtgtctttaactacgcgcatctgccgaccatttttgctgctcagcgcaaaatcaaagatgctgacctgccgagtccgcagcaaaaactcgatatcctgcaggaaaccatcgccttcctgacgcaatcgggctatcagtttatcggtatggatcactttgcccgtccggatgacgagctggcggtggcccagcgtgaaggcgtgctgcatcgtaacttccagggctacaccactcagggcgataccgatctgctggggatgggcgtttccgccatcagcatgattggcgactgctacgcgcagaaccagaaagagttgaagcagtactatcagcaagtggatgaacaaggcaatgcgctgtggcgtggtattgcgctaacgcgtgatgactgtattcgccgcgatgtgattaagtcgctcatctgcaacttccgtctggattacgcccctattgagaaacagtgggatttgcacttcgctgattactttgcggaagatctcaagctgctcgccccgttagcaaaagatgggctggtggatgtggatgagaagggaatacaggtgacggcgaaaggtcgcttgctgatccgcaacatttgcatgtgctttgatacctatctgcgccagaaagcgcggatgcagcagttctcacgggtgatttga

SEQ ID NO: 458892 - DNA, 1410 bp, Shigella boydii
atgcaacgagggatagtctgggtagtcgatgacgatagttccatccgttgggtgcttgaacgtgcgctcgctggagcgggtttaacctgtacgacatttgagaacggcgcggaagtactggaggcgctggcgagcaaaacgccggatgtgctgctttcagatatccgtatgccgggaatggacgggctggcgctgctcaagcagattaaacagcgccatccaatgcttccggtcatcattatgaccgcacattccgatctggatgctgccgtcagcgcctatcaacaaggggcgtttgattatctgcccaaaccgtttgatatcgacgaagccgtggcgctggttgagcgcgctatcagtcattaccaggaacagcagcagccgcgtaatattcagcttaacggcccaacgaccgatatcatcggcgaagcgccagccatgcaggacgtgttccgtattatcggtcggctttcgcgttcttctattagcgtgctgattaacggcgaatccggcaccggtaaagaactggtcgctcatgccctgcatcgccacagtccgcgcgccaaagcgccgtttatcgcgctgaatatggcagctatcccaaaagatttgatcgaatcagaactgtttggccacgagaaaggcgcgtttactggcgcgaataccattcgtcaggggcgttttgaacaggccgatggcggtacattattcctcgacgaaattggtgatatgccgctggatgtgcagacgcgtttgctgcgcgtgctggcagacggtcagttttaccgcgttggcggctatgcgccggtgaaagtggatgtgcggattatcgctgccactcaccagaatctcgaacagcgagtgcaggaaggtaagttccgtgaggatctgttccaccgcctaaacgttatccgcgttcatctgccgccgctgcgcgaacgtcgggaagatattccccgtctggcgcgccattttttacaggttgccgcgcgcgaactgggcgtagaagcgaagttactgcatccggaaaccgaaactgctctgacgcgtctggcgtggccaggcaacgtgcgccagctggaaaacacctgccgctggctaacggtgatggccgccgggcaggaagtgttgattcaggatttgcccggcgaactgtttgaatcaacggttgcggagagtacttcgcaaatgcaaccggacagctgggcgacgcttcttgcgcagtgggcagacagagcgctgcgttccggtcatcaaaatctgctttccgaagcgcagccagagctggagcggacgttactgacgaccgcgttgcgacatacgcaggggcataaacaggaagcggcgcggctactcggctggggccgcaacaccctgacgcgtaagttaaaagagctggggatggagtga

SEQ ID NO: 458893 - DNA, 1050 bp, Shigella boydii
atggcaacaggcacgcagcccgatgctgggcagatcctcaactcgctgattaacagtattttgttaatcgatgacaacctggagatccattacgccaaccctgccgcgcaacaactgctcgcccaaagctcccgcaaattgtttggtacaccgttaccggaactgttgagctacttctcattaaatatcgagctgatgcaagaaagtctggaggcggggcaaggttttaccgataacgaagtgacgctggtcatcgacgggcgctcgcatatcctttctgtgacggcccagcgtatgccggacggcatgatcctgctggagatggctccgatggataaccagcgccgcttaagtcaggaacagctacagcacgcccagcaggttgctgcccgtgatttagtgcgcggcctggcacatgagattaaaaatccgcttggctgtttacgtggcgcggcgcagctgctcagcaaagcgttacctgacccatcactactcgaatataccaaagtgattatcgaacaggcggaccggctgcgaaatctggtcgaccgtctgttggggccgcagctgcccggtacgcgcgttaccgaaagtattcacaaagtggctgaacgcgtggtaacgctggtgtcgatggaactgccggacaacgtgcggttgattcgtgattacgatcccagcctgccggaactggcgcacgacccggatcaaattgaacaggtcttgctgaatattgtgcgcaatgcgctacaggcgctggggccggaaggcggtgaaatcattctgcgtacccgcaccgcgtttcaactgaccttacacggcgagcgctaccggctggcggcgcggattgatgtggaagataacgggccgggcattccgcctcatttgcaggatacgctgttttacccgatggtcagcggccgcgaaggtggcaccgggcttggcttatccatcgcccgtaatttgattgatcagcattcaggcaaaattgaatttaccagttggccaggtcataccgagttctcggtttacctgcctatcaggaaataa

SEQ ID NO: 458894 - DNA, 1410 bp, Shigella boydii
atgtccgctgaacacgtactgacgatgctgaacgagcacgaagtgaagtttgttgatttgcgcttcaccgatactaaaggtaaagaacagcacgtcactatccctgctcatcaggtgaatgctgaattcttcgaagaaggcaaaatgtttgacggctcctcgattggcggctggaaaggcattaacgagtccgacatggtgctgatgccagacgcatccaccgcagtgattgacccgttcttcgccgactccaccctgattatccgttgcgacatccttgaacctggcaccctgcaaggctatgaccgtgacccgcgctccattgcgaagcgcgccgaagattacctgcgttccactggcattgccgacaccgtactgttcgggccagaacctgaattcttcctgttcgatgacatccgtttcggatcatctatctccggttcccacgttgctatcgacgatatcgaaggcgcatggaactcctccacccaatacgaaggtggtaacaaaggtcaccgtccggcagtgaaaggcggttacttcccggttccaccggtagactcggctcaggatattcgttctgaaatgtgtctggtgatggaacagatgggtctggtggttgaagcccatcaccacgaagtagcgactgctggtcagaacgaagtggctacccgcttcaataccatgaccaaaaaagctgacgaaattcagatctacaaatatgttgtgcacaacgtagcgcaccgcttcggtaaaaccgcgacctttatgccaaaaccgatgttcggtgataacggctccggtatgcactgccacatgtctctgtctaaaaacggcgttaacctgttcgcaggcgacaaatacgcaggtctgtctgagcaggcgctgtactacattggcggcgtaatcaaacacgctaaagcgattaacgccctggcaaacccgaccaccaactcttataagcgtctggtcccgggctatgaagcaccggtaatgctggcttactctgcgcgtaaccgttctgcgtctatccgtattccggtggtttcttctccgaaagcacgtcgtatcgaagtacgtttcccggatccggcagctaacccgtacctgtgctttgctgccctgctgatggccggtcttgatggtatcaagaacaagatccatccgggtgaagccatggacaaaaacctgtatgacctgccgccagaagaagcgaaagagatcccacaggttgcaggctctctggaagaagcactgaacgaactggatctggaccgcgagttcctgaaagccggtggcgtgttcactgacgaagcaattgatgcgtacatcgctctgcgtcgcgaagaagatgaccgcgtgcgtatgactccgcatccggtagagtttgagctgtactacagcgtctaa

SEQ ID NO: 458895 - DNA, 1824 bp, Shigella boydii
gtgatcgaaaaattgcgtaatatcgccatcatcgcgcacgtagaccatggtaaaaccaccctggtagacaagctgctccaacaatccggtacgttcgactctcgtgccgaaacccaagagcgcgtgatggactccaacgatttggagaaagagcgtgggattaccatcctcgcgaaaaacaccgctatcaaatggaatgattaccgtatcaacatcgttgataccccggggcacgccgacttcggtggtgaagttgaacgtgtaatgtccatggtagactcagtgctgctggtggttgacgcatttgacggcccgatgccgcaaacgcgcttcgtaaccaaaaaagcgtttgcttacggcctgaagccgattgttgttatcaacaaagttgaccgccctggcgcgcgtcctgattgggttgtggatcaggtattcgatctgttcgttaacctcgacgcgaccgacgagcagctggacttcccgatcgtttacgcttctgcgctgaacggtatcgcgggtctggaccacgaagatatggcggaagacatgaccccgctgtaccaggcgattgttgaccacgttcctgcgccggacgttgaccttgacggtccgttccagatgcagatttctcagctcgattacaacagctatgttggcgttatcggcattggccgcatcaagcgcggtaaagtgaagccgaaccagcaggtcactatcatcgatagcgaaggcaaaacccgcaacgcgaaagtcggtaaagtgctgggccacctcggtctggaacgtatcgaaaccgacctggcggaagctggcgatatcgttgcgatcacgggccttggcgaactgaacatttctgacaccgtttgcgacacgcaaaacgttgaagcgctgccggcactctccgttgatgagccgaccgtttctatgttcttctgcgttaacacctcgccgttctgcggtaaagaaggtaagttcgtaacgtctcgtcagatcctggatcgtctgaacaaagaactggtacacaacgttgcgctgcgcgtagaagaaaccgaagacgctgatgcgttccgcgtttctggtcgtggcgaactacacctgtctgttctgatcgaaaacatgcgtcgtgaaggtttcgaactggcggtatcccgtccgaaagttatcttccgtgaaatcgacggtcgtaaacaagagccatatgaaaacgtgactctggacgttgaagaacagcatcagggttctgtaatgcaggcgctgggcgaacgtaaaggcgacctgaaaaacatgaatccagacggtaaaggccgcgtacgtctcgactacgtgatcccaagccgtggtctgattggcttccgttctgagttcatgaccatgacttccggtactggtctgctgtactccaccttcagccactacgacgacgtacgtccgggtgaagtgggtcagcgtcagaacggcgtactgatctctaacggtcagggtaaagcggtcgcgttcgcgctgttcggtctgcaggatcgcggtaagctgttcctcggtcacggtgcagaagtttacgaaggtcagattatcggtattcatagccgctctaacgacctgactgtaaactgcctgaccggtaagaaactgaccaacatgcgtgcttccggtactgacgaagccgttgttctggttccgcctatccgcatgactctggaacaagctctggagttcatcgatgatgacgaactggtagaagtgactccgacctctatccgtattcgtaaacgtcacctgacggaaaacgatcgtcgtcgcgccaaccgcgcaccgaaagactattaa

SEQ ID NO: 458896 - DNA, 789 bp, Shigella boydii
atgagtatcatcgaagtgacaggtaatccacgccatgaccaactcgttcatctaatcgcagaacgcggttatatgaatattgaagaactggcacaactgctggatgtttcaacgcaaaccgtgcgccgggatatccgaaaactcagtgagcagggcttgatcacccgtcatcatggaggggccgggcgcgtctccagcgtcatgaataccgcttttgagcaacgggaactttcgctcaccgccgagaaacgggcgatcgctgaggcagtcgccgattaccttcccgaacgctgtaccgtctttatcaccatcggtacaaccgtagaagccgttgccagggcattactcaaccggcgtgatttacgcattatcactaacagcctacgtgtggcacagattctttataagaatcaggatattgaagtgatggtgccgggaggcactttacgcgctcataacggcgggattatcggcccaggagccgtggattttattgaaggcttccgcgcagattatttaatcaccagtataggtgccattgaacatgacggcaccctactggaatttgatgtaaatgaagcgttagtcgcgagaacgatgattaaacatgcgcggaatacattgttagtggccgatcatacgaagtttgccgcgtctgctgccgtttcaattggcaatgcacggaatgtcagggctttttttactgatgccccgcctcccaattctttctgccagttgttaagtgaagagaatgttgaactggtggttgccgagcaagaagtatcctga

SEQ ID NO: 458897 - DNA, 897 bp, Shigella boydii
atgaccagaattgcatgcgtgggtatcacagttcaggacagaatttattctttgcccactctgccggagggcggcgggaaatatcaggcaaatcattatcttgagattggtggcggcccggcagcaacagccgctgttgcaatcgcaaagcttggcgtggaggttgatttcatcggtcgcgtcggcgatgacagttgtggaaataccttacttgcagaacttgagggttggggcgtcaataccgcattttgccgccgatatcctaacgcccgttcgtcgcaatcagcgatcctcgttgatcagcatggcgaacggattatcgttaattatccaagtcctgatctcggtactgatgccgaatggttagaagcgatcgatttctctcgttatgatctgattctggccgatgttcgctggcatagcggtactgaaaaagcattctcgctagcgtgccttgcgggtgtgacaacgcttttagacgccgatatgacaccgcaggatatttctccacttgtcgcgcttgccgatcacgccgtgttctcaacaccagggctgaaacgcatgactggcctgcagtcacctgaagaaggtttgttccaggcaacgacacaaacagcaggtaaagtgtatgttacgctgggttctgaaggatcgttgtggattgaagatggtcatttgtgtcaacaggaggcattttctgtcaatgtggttgataccactggagcaggcgatgtttttcacggcgcactcgcggtagcgttggcagaaaaaatgccaacaaaagaggctattcgttttgccagtgcggttgccgcgatgaaatgtacccagcctggcggtcgggccggcattcctaatcgtgagcaaaccgaatcatttttgtcactttatgcgtaa

SEQ ID NO: 458898 - DNA, 273 bp, Shigella boydii
atggcaaccattgcatttctcgggctggggcagatgggtagcccaatggctaacaatctattgcaaaaagggcattcattgcaggtatttgatgtcaatgcacaggccgtcgatgcgctagttacgcagggggccactgcggcacaaaccccagcggaagcagcagcaggcgctgaatttatcatcactatgcttcccaatggtgacattgttcgacaggttctgttggggaaaaaggcgtctgtgaggctgtttcatctgacgcgttattga

SEQ ID NO: 458899 - DNA, 243 bp, Shigella boydii
atgtcgactattcatcccttacagaccgatgcattaatacgggagttacaagaaaaaggcatcagtatgatggacgctcccgtgggcagaacgtccgtgaatgcgattgatggcacattgctgattttagcgggtggcactgatgagcagattgcacgtgcacgcccgattcttatgtgcatgggtaatgagctggtcgaggctgggcggcccaggaatggggatccgcgtgaagctaattaa

SEQ ID NO: 458900 - DNA, 384 bp, Shigella boydii
atggggatccgcgtgaagctaattaacaactatatgagcattgcgcttaatgcgctgtcctccgaggccgctgtgttatgtgagtcactgggattaaatcttgatgtcgcaattaaggtgatgagtggtacggcagcagggaaaggacattttacgaccacctggcctggcaaagtgctgaaaggcgatctttcacccgccttcatggtggatctggcgttgaaagatctgcgtattgcagttgacgtcgctcgggagacgggggcaccgctcaatatggggattgcagcagaaagttattacgctgcagcaagtcaagacggcaaagggcggcaggactggagtgccctgctaaatcaggttcgccagcaggctggtctttaa

SEQ ID NO: 458901 - DNA, 888 bp, Shigella boydii
atgtcatcccacttcaccccatttacgctgaaagatatctcccgcccaggtggtggatttgccatgttagctgtcgatcagcgtgaggccatgcgcttgatgtttgcggcagcagggcagccaaaacccatcgccgacagtgtactcaccgattttaaagttgccgcgacccgaatcctttctccttatgcttctgccgttctggcggataaacaattttgtcttgagcaaatagtcgagcagggcgctgttgctaattcttgcggcctgattgtcgctgccgatctttttatcccaggtaatggcatcccggttgatagcgttgaaatagatatgtccgtcgacccgcataaagcccgtgaaatgggggctaaggcaatgaaattacttgtactctggcgtgaagatgaacccgcagaggaacgtctggcaatggttgataaatttgttcgtcgctgccgtagtgccgggctggtgagcattattgaacctgtggtgcgtccacctcgtcgcggttgggactttgatcgtgaaagcgccattgttgccgccgccgcagagcttggtggaacagaggctgatctttacaaagccgagatgccattagggggcaaaggcgatgaaaaaaccttacttgccgcctgtcagcaacttaacgatcagatgaagatgccgtgggtaattctttcttctggcgttgatgccgatatttttggccgtgcagtaagtattgccatgaaaggtggtgcgtcgggcttcctggctggacgagcggtttgggcgtcggttgttggtgcacaagatccacaaactatgctgcgcgatgtctctgttcctcgtttacaacggttggcagaaattgtcgatgaaggtatcgcgcaacgctaa

SEQ ID NO: 458902 - DNA, 1011 bp, Shigella boydii
atggataaaattacccaggttttattttcagatattgggaaagtcaccactcaatatgttgaagtaccacaccaggaacttaaaccgcacgaagtgcggattgcgcctgtgttctatgggatatgcggttcggatctgcatgttctgaaaggcggtcatccgtttgccaaaccacctgtcgtccccggtcatgaaattgcagcgcgcgttacggaagttggcagcgacgttaaaaatgtacagccgggcgatcatgttgtggtcgatcccatcatggcttgcatggaatgccgagcctgcaaagcaggacgttttaatctttgtgaaccaccgcaggttgctagttttcgcgcaccgggctttgctcgctcacaacacattgttcctgcgcgtaattgccatgtcgcaccagcctctttaccgctaaaagtgttggcctttgccgaaccggcggcttgtgcccgtcactgcgttaaccgaatgccgaaagcttctctggaaagcgtactggtaattggtgccggaacgataggcttatccatcgtgcaggcactgcgcattatgggggcaggtaagattaccgtgattgaacctgacgctgccaaacgcgcgctggcgttaaagctgggcgcagcagaagtttgggcactaggtgagctggccgcagatgtgcgatttacgggggcgattgatgtcgttgcagcgcaggccacgcttaacgatgcatgtacccgtgtatatgccggaggcaccgtcgtgtgcatgggcgtaccaagtgggccgcgtgaaataccattaccgatgatgcaacgtttcgagcgtgacttgctcaactctggcatgtacatccctgaagatttcgatgctgttatcgaatggctggcggatgggcggtttgataccagtgaactggttaccgatttatttgccattgaggatgcagcggcggcatttgaacgcgcgcagcaaaatgactccataaaggtcatgctgcaatttgcgccggaatga

SEQ ID NO: 458903 - DNA, 381 bp, Shigella boydii
atgctgggagcggtggaacgccgcttcggcaacgatcttccgtcgtctccagtggagtggctgacggataatggttcatgctaccgggctaatgaaacacgccagttcgcccggatgttgggacttgaaccgaagaacacggcggtgcggagtccggagagtaacggaatagcagagagcttcgtgaaaacgataaagcgtgactacatcagtatcatgcccaaaccagacgggttaacggcagcaaagaaccttgcagaggcgttcgagcattataacgaatggcatccgcatagtgcgctgggttatcgctcgccacgggaatatctgcggcagcgggcttgtaatgggttaagtgataacagatgtctggaaatatag

SEQ ID NO: 458904 - DNA, 189 bp, Shigella boydii
atgaataacaatgaaccagatactctgcctgatcccgcgataggctatatcttccagaatgatattgtggcgttaaagcaggtattttcactgcctgatattgattatgccgatatttcccaacgcgaacagttggccgcggcattaaaacgctggccgttgctggcagagtttgcgcaacaaaagtag

SEQ ID NO: 458905 - DNA, 753 bp, Shigella boydii
atggccgtactgggattgcagggggtgcggggaggcgtggggacaacaaccatcaccgccgcattagcctggtcattacaaatgttgggagaaaatgtcctggtggtcgatgcctgcccggacaacttgttgcgcctgtcatttaatgttgattttacccaccgtcagggctgggccagagcgatgctggatggccaggactggcgtgacgctgggttgcgctacacctcgcagctcgatttgctgccttttggtcagttatccattgaagaacaagaaaatccacagcactggcaaacccggctgagcgatatttgctccggcttacagcaactaaaagccagcgggcgttaccagtggattttaatcgacttaccgcgtgatgcctcgcagataacccaccagctgctgagtttgtgcgatcactcgctggcaatcgtcaatgtggatgccaactgccatatccgactgcatcagcaagcgctgccggatggcgcacatattttgattaatgacttccgtattggcagtcaggttcaggacgatatttaccagctttggttgcaaagccagcgccgattactgccgatgctcattcatcgtgatgaagcgatggctgaatgcctggcggctaagcaaccagtaggtgaatatcgcagtgatgcgctggcggctgaagagatactgacgctggcgaactggtgcctgttgaactactccgggctgaaaacgccagtcgggagtgcatcatga

SEQ ID NO: 458906 - DNA, 2619 bp, Shigella boydii
atgagtatcctgacccggtggttgcttatcccgccggtcaacgcgcggcttatcgggcgttatcgcgattatcgtcgtcacggtgcgtcggctttcagcgcgacgctcggctgtttctggatgatcctggcctggatttttattccgctggagcacccgcgctggcagcgtattcgcgcagaacataaaaacctgtatccgcatatcaacgcctcgcgtccgcgtccgctggacccggtccgttatctcattcaaacatgctggttactgatcggtacatcgcgcaaagaaacgccgaaaccgcgcaggcgggcattttcaggtctgcagaatattcgtggacgttaccatcaatggatgaacgagctgcctgagcgcgttagccataaaacacagcatcttgatgagaaaaaagagctcggtcatttgagtgccggggcgcggcggttgatcctcggtatcatcgtcaccttctcgctgattctggcgttaatctgcgttactcaaccgtttaacccgctggcgcagtttatcttcctgatgctgctgtggggtgtagcgctgatcgtacggcggatgccggggcgcttctcggcgctaatgttgattgtgctgtcgctgaccgtttcttgccgttatatctggtggcgttacacctctacgctgaactgggacgatccggtcagcctggtgtgcgggcttattctgctcttcgctgaaacgtacgcgtggattgtgctggtgctcggctacttccaggtcgtatggccgctgaatcgtcagccggtgccattgccgaaagatatgtcgctgtggccgtcggtggatatctttgtcccgacttacaacgaagatctcaacgtggtgaaaaataccatttacgcttcgctgggtatcgactggccgaaagacaaactgaacatctggatcctcgatgacggcggcagggaagagtttcgccagtttgcgcaaaacgtgggggtgaaatatatcgcccgcaccactcatgaacatgcgaaagcgggcaacatcaacaatgcgctgaaatatgccaaaggcgagttcgtatcgattttcgactgcgaccacgtaccaacgcgatcgttcctgcaaatgaccatgggctggttcctgaaagagaaacagctggcgatgatgcagacgccgcaccacatcttctcgccggacccgtttgaacgcaacctggggcgttttcgtaaaacgccgaacgaaggcactctgttctatggtctggtgcaggatggcaacgatatgtgggacgccactttcttctgcggttcctgtgcagtaattcgtcgcaaaccattggatgaaattggcggtattgctgtcgaaacggtaaccgaagatgcgcacacgtctctgcgcctgcactgtcgtggctacacctctgcatatatgcgtattccgcaggcggcggggctggcgaccgaaagtctgtcggcgcatatcggtcagcgtattcgctgggcacgcgggatggtgcaaatcttccgtctcgataacccgcttaccggtaaagggctgaaattcgcccagcggctgtgctacgtcaacgccatgttccacttcttgtcgggcattccacgactgatcttcctgactgcgccgctggcgttcctgctgcttcatgcctacatcatctatgcgccagcgttgatgatcgccctgttcgtgctgtcgcatatgatccatgccagcctgaccaactcgaagatccagggcaaatatcgccactctttctggagtgaaatctacgaaacggtgctggcgtggtatatcgcaccaccgacgctggtggcgctgattaacccgcacaaaggcaaatttaacgtcaccgccaaaggtggactggtggaagaagagtacgtcgactgggtgatctcgcggccctacatcttccttgttctgctcaacctggtgggtgttgcggtcggcatctggcgctacttctatggcccgccaaccgagatgctcaccgtggtcgtcagtatggtgtgggtgttctacaacctgattgttcttggcggcgcagttgcggtatcggtagaaagcaaacaggtacgccgatcgcaccgcgtggagatgacgatgcccgcggcaattgcccgcgaagatggtcacctcttttcgtgtaccgttcaggatttctccgacggtggtttggggatcaagatcaacggtcaggcgcagattctggaagggcagaaagtgaatctgttgcttaaacgcggtcagcaggaatacgtcttcccgacccaggtggcgcgcgtgatgggtaatgaagttgggctgaaattaatgccgctcaccacccaacaacatatcgattttgtgcagtgtacgtttgcccgtgcggatacatgggcgctctggcaggacagctacccggaagataagccgctggaaagtctgctggatattctgaagctcggcttccgtggctaccgccatctggcggagtttgcgccttcttcggtgaagggcatattccgtgtgctgacttctctggtttcctgggttgtatcgtttattctgcgccgcccggagcggagcgaaacggcacaaccatcggatcaggctttggctcaacaatga

SEQ ID NO: 458907 - DNA, 2295 bp, Shigella boydii
atggggatgagtgcgttcccctctttcatgacgcaggcgacgccagcaacgcaaccactgatcaatgctgagccagctgtagccgcccagacggaacaaaatccgcaggtggggcaagtgatgccgggcgtgcagggcgctgatgcgccagtcgtggcgcagaacggtccttcgcgtgatgtgaagctgacctttgcgcaaattgcgccgccgccgggcagcatggtgctacgtggcattaacccgaacggcagcattgagtttggtatgcgcagcgatgaagtggtgacgaaggcgatgctcaacctcgaatacatgccatcgccatcgttactgcctgtccagtcgcagttaaaggtttatctcaatgatgagctgatgggcgtactgccagtgaccaaagaacagttgggtaaaaaaacgctggcgcaaatgcccattaacccactgtttattaccgacttcaaccgtgtgcggctggagtttgtcggccattatcaggacgtgtgcgaaaacccggccagcaccacgctttggctggatgttgggcggagtagtggactggatctgacctatcagaccctgaatgtgaagaacgacctgtcacacttcccggtgccattctttgacccgcgcgataaccgtactaacaccttgccgatggtctttgcgggtgcgccggatgttgggctgcaacaagcatctgccattgtcgcctcgtggtttggttcgcgttctggctggcgtgggcagaacttcccggtgctctataaccaactgccggatcgtaatgccattgtctttgcaaccaacgacaaacggccggacttcctgcgcgatcatccggcggtaaaagccccggtgattgagatgatcaaccatccgcagaatccttacgtcaaactgctggtggtgtttggtcgtgacgacaaagacctgttgcaggcagcgaaaggtatcgctcagggtaacattctgttccgtggtgaaagcgtggtagtgaatgaagtgaaaccgctgctaccgcgtaagccgtacgatgcgccgaactgggtacgtaccgatcgtccggtcacatttggcgaactgaaaacctatgaagaacagttacaatccagcggtcttgagccagcagcgattaacgtttcgctaaacctgccgccggatctctacctgatgcgcagtaccggcattgatatggatattaattaccgctacaccatgccgccggtgaaagacagttcgcggatggatatcagcctgaataaccagttcctgcaatccttcaacctgagcagcaaacaggaggcgaaccgcctgctgctgcggattccggtattacaaggtttgctggatggcaaaacagatgtctctattccggcgctgaaactgggcgcgaccaaccagctgcgcttcgactttgagtatatgaacccgatgccgggcggttcggtggataactgtattaccttccagccggtgcagaatcatgtggtgattggtgacgactccaccatcgacttctcgaagtattaccacttcatcccgatgccggatctacgcgcctttgctaacgcgggcttcccattcagccggatggcggatctgtcgcaaaccatcaccgtgatgccgaaagcgcctaacgaagcacagatggaaacgttgctgaatactgttggttttatcggcgcacagacgggcttcccggcgattaatctgacggtgaccgatgatggcagcaccattcagggcaaagatgccgacatcatgatcatcggtggtatcccggacaaactgaaagacgataagcagatcgacctattggtgcaggcgaccgaaagctgggtgaaaacaccgatgcgccagaccccgttccccggcattgtgccggacgagagcgatcgcgcggcagaaacccggtcaacgctgacctcttccggtgcgatggcggcggtgattggcttccagtcgccgtataacgaccagcgcagcgtgattgcgctgttggcagatagcccacgcggttatgaaatgcttaacgatgcggtgaacgatagcggcaaacgcgccaccatgttcggttcggtcgcggtgatccgcgagtccggtatcaacagcctacgtgttggcgacgtttattacgtaggtcatctgccgtggttcgagcgcgtgtggtatgcgctggcaaaccatccgattctgctggcggctatcagtgtgatattgctggcatggatactgtggcgtctgctgcgaattattattagtcgtcgtcttaacccggataacgagtaa

SEQ ID NO: 458908 - DNA, 1107 bp, Shigella boydii
atgaatgtgttgcgtagtggaatcgtgacgatgctgttgttggctgcctttagtgttcaggcagcctgtacctggcctgcctgggagcagtttaaaaaggattacatcagtcaggaagggcgcgtcatcgaccccagcgacgcgcgcaaaatcaccacctccgaagggcaaagttacggtatgttctttgccctggcggctaacgaccgtgcagctttcgataatattctcgactggacgcagaacaatctcgctcagggttctttaaaagaacgtttgcccgcctggctgtggggcaagaaagagaacagtaagtgggaagtgctggacagcaattcggcctccgatggtgatgtctggatggcctggtcgttgctggaggcggggcgtttgtggaaagagcagcgttataccgacatcggcagcgcgttgctaaaacgtatcgcgcgggaggaagtggtgacggtgcctgggctgggttccatgttgttaccgggcaaagtgggttttgctgaggataacagctggcgttttaaccccagctacctgccgccgacgctggcgcagtatttcacccgctttggcgcgccgtggactacgctgcgcgaaaccaatcaacgtttattgctggaaaccgccccgaaaggcttttcgccagactgggtgcgttatgagaaagacaaaggctggcagctaaaagccgaaaaaacattgatcagcagctacgacgccatccgcgtttacatgtgggtaggcatgatgcctgacagcgatccgcagaaagcgcggatgctcaaccggtttaaaccgatggcgacattcactgagaaaaacggttatccgccggaaaaagtggatgtggctacggggaaagcgcagggtaaaggaccagtcggtttttctgccgccatgctgccctttttacaaaaccgcgatgcgcaggccgttcagcgccagcgcgtggccgataactttcccggcagcgatgcctattacaactatgtgctgaccctgtttggacaaggctgggatcaacaccgtttccgcttctcgacaaaaggtgagttattacctgactggggccaggaatgcgcaaattcacactaa

SEQ ID NO: 458909 - DNA, 2217 bp, Shigella boydii
atgcgcaaattcacactaaacatattcacgctttccctcggtctgtccgtcatgccgatggtcgaggcagcaccaaccgctcagcaacagttgctggagcaagttcggttaggcgaagcgacccatcgtgaagatctggtgcaacagtcgttatatcggctggaacttattgatccgaataacccggacgtcgttgccgcccgtttccgttctttgttacgtcagggcgatattgatggcgcgcaaaaacagctcgatcggctgtcgcagttagcgccgagttcaaatgcgtataaatcgtcgcggactacgatgctactttccacgccggatggtcgtcaggtactgcaacaggcacgattgcaggcgacgaccggtcatgcagaagaagctgtggcgagttacaacaaactgttcaacggtgcgccgccggaaggtgacattgctgtcgagtactggagtacggtggcgaaaattccggctcgccgtggcgaagcgattaatcagttaaaacgcatcaatgcggatgcaccgggcaatacgggcctgcaaaacaatctggcgctattgctgtttagtagcgatcgccgtgacgaaggttttgccgtcctggaacagatggcaaaatcgaacgccgggcgcgaaggggcctctaaaatctggtacgggcagattaaagacatgcccgtcagtgatgccagtgtgtcggcgctgaaaaaatatctctcgatctttagtgatggcgatagcgtggcggctgcgcaatcgcaactggcagaacagcaaaaacagctggccgatcctgctttccgcgctcgtgcgcaaggtttagcggcggtggactctggtatggcgggtaaagccattcccgaactacaacaggcggtgcgggcgaacccgaaagacagtgaagctctgggggcgctgggccaggcgtattctcagaaaggcgatcgcgccaatgcagtggcgaatctggaaaaagccctcgcactggacccgcacagcagcaacaacgacaaatggaacagtctgctgaaagtaaaccgctactggctggcgatccagcagggcgatgctgcgctgaaagccaataatcctgaccgggcagaacgcctgttccagcaggcgcgtaatgtcgataacaccgacagttatgcagtgctggggctgggcgatgtggcgatggcgcgaaaagattatcccgccgccgaacgttattatcagcagaccttgcgtatggacagcggcaacactaacgccgtgcgcgggctggcaaatatttaccgccagcaatcgccagaaaaagctgaagcgtttatcgcctcgctctctgccagtcagcggcgtagcattgatgatatcgaacgcagcctgcaaaacgaccgtctggcacagcaggcagaggcactggaaaaccagggcaaatgggcgcaggcggcagcacttcagcggcaacgactggcgctggaccccggcagcgtatggattacttaccgactttcgcaggatctctggcaggccggacaacgcagccaggccgatacgttaatgcgcaatctggcgcagcagaagccgaacgacccggagcaggtttacgcttacgggctgtacctctctggtcatgaccaggacagagcggcgctggcgcatatcaacagcctgccgcgcgcgcagtggaacagcaatattcaggagctggttaatcgactgcaaagcgatcaggtgctggaaaccgctaatcgcctgcgagaaagcggcaaagaagctgaagcagaagcgatgctgcgtcagcaaccaccttccacgcgtattgacctcacgctggctgactgggcgcagcagcgacgtgattacaccgccgcccgcgctgcatatcagaatgtcctgacgctggagccaactaacgccgatgccattctggggctgacggaagtggatattgctgccggtgacacagcggcggcacgtagccagctggcgaaactgcccgctaccgataacgcctcgctgaacacacagcggcgcgtggcgctggcgcaggcgcagcttggagataccgcagcggcgcagcagacgtttaataagttgatcctgcaggcaaaatctcagccaccgtcgatggaaagcgcgatggtgcgaagtttgaagcgcaggcgggcgatccaaagcaggcgctggaaacctacaaagacgccatggtcgcatccggtgtga

SEQ ID NO: 458910 - DNA, 1263 bp, Shigella boydii
atggtcgcatccggtgtgactacgacgcgtccgcaggataacgacacattcacccgactgacccgtaacgacgagaaagatgactggctgaaacgcggcgtgcgcagcgatgcggcgggcctctatcgccagcaggatcttaacgtcaccctcgagcacgattactggggttcgagcggcaccggtggttactccgatctgaaagcgcacactaccatgttgcaggtggatgcgccgtattctgacgggcggatgttctttcgcagtgatttcgtcaatatgaacgtcggcagtttctccactaatgccgatggcaaatgggatgacaactggggcacctgtacattacaggactgtagtggcaaccgcagccagtcggactccggtgccagcgtggcggtcggctggcgaaatgacgtctggagctgggatatcggtaccacgccgatgggcttcaacgtggtggatgtggtcggcggcatcagttacagcgatgatatcgggccgctgggttacaccgttaacgcccaccgtcggcccatctccagttctttgctggcctttggtgggcaaaaagactccccgagcaataccgggaaaaaatggggtggcgtacgtgccgacggtgtggggctaagtctgagctacgataaaggtgaagcaaacggcgtcagggcatcgcttagtggcgaccagttaaccggtaaaaatgtcgaagataactggcgcgtgcgctggatgacgggctattactataaggtcattaaccagaacaatcgccgcgtcacaatcggcctgaacaacatgatctggcattacgacaaagatctgagtggctactcactcggtcagggcggttactacagtccgcaggaatacctgtcgtttgctataccggtgatgtggcgggagcgcacggaaaactggtcgtgggagctgggggcgtctggctcgtggtcgcattcacgcaccaaaaccatgctgcgttatccgctgatgaatctgatcccgaccgactggcaggaagaagctgcgcggcaatccaacgatggcggcagcagtcagggcttcggctacacggcgcgggcattacttgaacgacgtgttacttccaactggtttgttggcacggcaattgatatccagcaggcgaaagattacgcacccagccatttcctgctctacgtacgttattccgccgccggatggcagggtgacatggatttaccgccgcagccgctgataccttacgccgactggtaa

SEQ ID NO: 458911 - DNA, 1950 bp, Shigella boydii
atggtggcagccgttgtcctggtgttcgtttttattttttgcaccgttttgctgttccatctggtccagcagaatcgctataacacggctacgcaactggaaagcattgctcgctctgtacgcgaacccttatcttcagctattttgaaaggcgatattcccgaagcggaagctattcttgccagcattaaaccggcaggcgtggtcagccgtgccgatgtagtgctgcctaaccagttccaggcgctgcgtaaaagttttattccagagcgcccggtgccggtaatggttactcgcctgtttgagctaccggttcaaatctcgctgggcgtttactcgctcgaacgtccggcaaacccgcagccaattgcctatctggtactacaggcggattccttccgtatgtataagttcgtgatgagcaccctctcaacgttagtgaccatttacttacttttgtcgcttatcctgaccgtcgccatcagctggtgcattaaccgcctgattttgcatccgttacgcaatattgctcgcgaacttaacgccatcccagcccaggagcttgttggtcaccaactggcattaccgcgtctgcatcaggacgatgaaatcggtatgttggtgcgcagttacaacctcaaccagcaattgctgcagcgccattatgaagaacagaacgaaaatgcgatgcgcttcccggtgtcggatttgccgaacaaagccttgctgatggagatgctggagcaggttgtcgcgcgtaaacaaaccaccgcgctgatgatcatcacctgtgaaaccctgcgtgatactgcgggcgtgctgaaagaggcgcaacgagaaattctgctgctgacgctggtggaaaaactcaaatcggtactgtcgccacgtatgatcctcgcgcagattagcggttatgactttgctgtcattgccaacggtgtacaggaaccgtggcacgcaatcaccttaggtcagcaagtgctcactatcatgagcgagcgcctgccgattgaacgtattcaactccgtccgcactgtagcattggcgtggcgatgttctacggcgatctcaccgccgaacagctttacagtcgcgctatttctgcggcatttaccgctcgccataaaggcaagaatcagattcagttctttgatccgcagcagatggaagccgcccagaagcggttgacggaagagagcgatatccttaatgcactggaaaatcatcagtttgctatttggttacagccacaggtcgagatgaccagcggtaaactggtcagtgcggaagtgttactgcgtatccagcaaccggatggcagttgggacctgccggatggcttaatcgatcgcattgagtgctgtgggctgatggttaccgtcggtcactgggtgctggaagagtcctgtcgattgcttgcagcctggcaagagcgcggcattatgctgcccttgtcggtaaacctctctgcgctgcaactgatgcacccaaatatggtggcggatatgctggaactgttaacccgctatcgcattcagccgggaacactgattctggaagtgacagaaagccgacgtattgacgaccctcatgctgcggtggcaatcctccgtccgctgcgcaatgccggagttcgggtggcgctggatgatttcggcatgggctacgcagggctgcgtcagctgcagcatatgaaatcgttgccaatcgacgtactgaaaatcgacaaaatgtttgttgaaggcttgccggaagatagcagcatgattgctgcaattatcatgctggcgcagagcctgaacttacaaatgattgccgaaggcgtggagactgaagcacaacgcgactggctggcaaaagcgggcgttggtattgcccagggcttcctttttgctcgcccactccctattgaaatcttcgaagagagttacctggaagaaaagtag

SEQ ID NO: 458912 - DNA, 1287 bp, Shigella boydii
atgaaaacctctctgtttaaaagcctttactttcaggtcctgacagcgatagccattggtattctccttggccatttctatcctgaaataggcgagcaaatgaaaccgcttggcgacggcttcgttaagctcattaagatgatcatcgctcctgtcatcttttgtaccgtcgtaacgggcattgcgggcatggaaagcatgaaggcggtcggtcgtaccggcgcagtcgcactgctttactttgaaattgtcagtaccatcgcgctgattattggtcttatcatcgttaacgtcgtgcagcctggtgccggaatgaacgtcgatccggcaacgcttgatgcgaaagcggtagcggtttacgccgatcaggcgaaagaccagggcattgtcgccttcattatggatgtcatcccggcgagcgtcattggcgcatttgccagcggtaacattctgcaggtgctgctgtttgccgtactgtttggttttgcgctccaccgtctgggcagcaaaggccaactgatttttaacgtgatcgaaagtttctcgcaggtcatcttcggcatcatcaatatgatcatgcgtctggcacctattggtgcgttcggggcaatggcgtttaccatcggtaaatacggcgtcggcacactggtgcaactggggcagctgattatctgtttctatattacctgtatcctgtttgtggtgctggtattgggttcaatcgctaaagcgactggtttcagtatcttcaaatttatccgctacatccgtgaagaactgctgattgtactggggacttcatcttccgagtcggcgctgccgcgtatgctcgacaagatggagaaactcggctgccgcaaatcggtggtggggctggtcatcccgacaggctactcgtttaaccttgatggcacatcgatatacctgacaatggcggcggtgtttatcgcccaggccactaacagtcagatggatatcgtccaccaaatcacgctgttaatcgtgttgctgctttcttctaaaggggcggcaggggtaacgggtagtggctttatcgtgctggcggcgacgctctctgcggtgggccatttgccggtagcgggtctggcgctgatcctcggtatcgaccgctttatgtcagaagctcgtgcgctgactaacctggtcggtaacggcgtagcgaccattgtcgttgctaagtgggtgaaagaactggaccacaaaaaactggacgatgtgctgaataatcgtgcgccggatggcaaaacgcacgaattatcctcttaa

SEQ ID NO: 458913 - DNA, 1497 bp, Shigella boydii
atgcagggcacaaaaattcgacttttagcgggcggtttgctgatgatggccactgctggctatgtgcaggcagatgcgctccagcctgatccagcatggcaacaggggacgctttccaacggtttacagtggcaagtgctgaccaccccccagcgtcccagcgatcgtgttgaaattcgcctgctggttaataccggttcgctcgccgaaagtacacaacagagcggttacagtcacgccatccctcgtattgcgctaacgcaaagcggtggccttgacgcagcacaggcgcgttcattgtggcagcaggggatcgaccctaaacgcccgatgccgccggtaattgtctcttatgacaccacgctgtttaatctgagtttgcccaataaccgtaacgatttgctgaaagaagcgctctcttatctggcaaatgccactggcaaattgaccatcacaccagaaaccatcaaccacgcgctgcaaagtcaggacatggtggcaacctggcctgccgatactaaagagggctggtggcgctatcgtctgaaagggtcaaccttgttaggtcacgatcctgccgatccgctgaaacaacccgttgaagcggaaaaaattaaagatttctatcagaaatggtacaccccggatgcaatgacgctactggtggtgggaaacgtggatgcgcgctcggttgtcgaccaaatcaacaaaacgtttggcgaactgaaaggcaaacgtgaaacgccagctccggtgccgacgctttctccgctgcgtgcggaagcggtgagtattatgactgacgcggtgcgtcaggaccggttatctatcatgtgggatacgccgtggcagccgattcgtgaagcagccgcactgctgcgctactggcgtgcggacctagcccgcgaggcgctgttctggcatgttcagcaagcgttaagcgccagtaacagcaaagacatcggtcttggatttgactgccgtgtgctgtatctgcgtgcgcagtgtgccatcaacatcgaatcaccaaacgacaagctgaacagcaaccttaatctggtggcgcgtgaactggcgaaggttcgcgataaaggtctgccggaagaagagttcaatgcgttagtggcgcaaaagaaactggagctgcagaaactgtttgccgcctatgcgcgggctgataccgatattctgatgggtcagcggatgcgttcgttgcaaaatcaggtcgtcgatatcgcgccggagcagtatcagaaactgcggcaggatttccttaacagcctgacggtggagatgttaaatcaggatctgcgtcagcagttgtcgaatgatatggcgttaatactgctgcagccgaaaggcgagccggaatttaacatgaaagcgttgcaggcggcctgggatcaaatcatggccccatcgactgctgctgccgccacctctgtcgccacggatgacgtacatcctgaagtgacggatattccacctgcacagtaa

SEQ ID NO: 458914 - DNA, 930 bp, Shigella boydii
atgtccaaaaagattgccgtgattggcgaatgcatgattgagctttccgagaaaggcgcggacgttaagcgcggtttcggcggcgataccctgaacacttccgtctatatcgcccgtcaggtcgatcctgcggcattaaccgttcattacgtaacggcgctgggaacggacagttttagccagcagatgctggacgcctggcacggcgagaacgttgatatttccctgacccaacggatggaaaaccgtctgccgggcctttactacattgaaaccgacagcaccggcgagcgtacgttctactactggcggaacgaagccgccgccaaattctggctggagagtgagccgtctgcggcgatttgcgaagagctggcgaatttcgattatctctacctgagcgggattagcctggcgatcttaagcccgaccagccgcgaaaagctgctttccctgctgcgcgaatgccgcgccaacggcggaaaagtgattttcgacaataactatcgtccgcgcctgtgggccagcaaagaagagacacagcaggtgtaccaacaaatgctggaatgcacggatatcgccttcctgacgctggacgatgaagacgcgctgtggggtcaacagccggtggaagacgtcattgcgcgcacccataacgcgggcgtgaaagaagtggtggtgaaacgcggggcggattcttgcctggtgtccattgctggcgaagggttagtggatgttccggcggtgaaactgccgaaagaaaaagtgatcgataccaccgcagctggcgactctttcagcgccggttatctggcggtacgtttgacgggcggcagtgcggaaaacgcggcgaaacgcgggcacctgaccgcaagtaccgttattcagtatcgcggcgcgattatcccgcgtgaggcgatgccagcgtaa

SEQ ID NO: 458915 - DNA, 768 bp, Shigella boydii
atgataaggcaggttatccagcgaataagcaaccctgaagcaagcatcgagagcttgcaggaacggcgtttttggttgcagtgtgagcgtgcttacacctggcagccgatctatcaaacatgcgggcggttaatggccgtggagctattaacggtggtcacgcatcccttgaacccttcgcaacgcctgccgccggatcgctattttactgaaatcaccgtcagccatcggatggaggttgtgaaagagcagattgatttgctggcgcaaaaagccgacttctttatagagcacggcctgctggcatcggtcaatattgatggccctacgctcatcgccctgcgtcagcaaccaaaaatcctgcgccaaattgagcgtcttccctggctgcgtttcgaactggtggagcatatccgtctgccgaaagattcaacctttgcctcgatgtgtgaatttggcccgctgtggctgggtgattttggtaccgggatggcaaatttctctgcactaagtgaagtgcgttatgactacatcaaaatcgcgcgagaactgtttgtgatgctgcgtcagtcgccggaaggacgcacactcttttctcagcttttacatctaatgaatcgctattgtcgcggggtgattgttgagggcgtagaaacgccggaagagtggcgtgatgtacagaactcgcccgcattcgccgcacaaggctggtttctttcacgcccggcaccgatagaaacgctgaatacggcggttctggcgctataa

SEQ ID NO: 458916 - DNA, 2061 bp, Shigella boydii
atgagcaaggcaggcaaaataaccgctgcgatttcaggggctttcttgttgttgattgtcgtggcgatcattttgattgcaacttttgactggaatcgactcaaaccgaccatcaaccagaaagtctctgcggagttgaatcgtccgttcgctatccgtggcgatctgggcgtggtgtgggagcggcaaaaacaagaaactggctggcgcagctgggtgccgtggcctcatgtacatgcagaagacatcattcttggcaatccaccggatattcccgaagtcacgatggtgcatttgccgcgagtagaggcaacgctggcaccgctggcgctgctgaccaaaacggtctggctgccgtggatcaagctcgaaaagcccgacgcgcgcctgattcgcctctccgaaaagaacaataactggacgtttaatctcgccaacgatgataacaaagacgcgaatgcaaagccgtcggcatggtcgtttcggctggataatattcttttcgatcaagggcggatcgccattgatgacaaagtaagcaaagcggatctggaaatttttgttgatccgttaggcaagccgctgccgttcagcgaagttactggatcgaaaggtaaagcggataaagaaaaggtgggcgattacgtttttggcctgaaggcgcagggacgttataacggtgaaccgctcacgggtacgggaaaaataggcggtatgctggcgctgcgtggcgaagggacgccgtttccggtacaggctgatttccgttcaggtaatacccgtgttgcttttgatggcgtcgtgaatgacccaatgaagatgggcggtgtcgatttacggcttaaattttctggcgattcactgggtgatctctatgaactgacgggcgttctgctgcccgataccccgccgtttgaaacggatggtcggctggtagcgaaaatcgacactgaaaaatcgtcggtctttgattatcgcggttttaatggacgaattggcgatagcgatatccacggttctctggtctacaccaccggaaagccacgaccaaaactggaaggtgatgtcgagtcgcggcaattgcggctggcggacctgggaccgttgattggcgttgattcggggaaaggggcagaaaagtcgaaacggtctgaacagaagaagggcgaaaaaagcgttcagcctgcgggcaaagtgctgccttatgaccgcttcgaaaccgataaatgggacgttatggatgccgatgttcgcttcaaaggccgacgtatcgagcatggcagtagcctgccgattagcgatctttctactcatatcatcctcaaaaatgctgacctgcgcctgcaaccgctgaaatttggcatggcgggcggcagcattgcggcgaatatccatctggaaggcgataaaaagccgatgcaggggcgggcagatattcaggctcgtcgactgaaactgaaagaactgatgcccgatgtggaactgatgcagaagacgctgggggaaatgaacggtgacgcggaactacgcggtagcggtaactcggtggcggcgcttttaggcaacagtaacggcaacctgaaactgttgatgaatgacgggctggtgagccgcaacctgatggagattgttgggctgaatgtcggcaactacattgtcggtgcgatatttggtgacgatgaggtgcgggtgaactgcgcggcggcgaatctgaatattgccaacggcgtagcgcgcccgcagatttttgctttcgatactgagaacgcgttgattaatgttaccggcacggcaagttttgcttcggaacagctggatttgactattgatccggagagtaaagggattcggattatcacactgcgttcgccgctgtatgtgcgtgggacgtttaaaaatccgcaggctggggtgaaagccggaccgctgattgcccgtggtgccgttgcggcggcactggcaacgctggtaacaccggcggcggcgttattggcactgatctcaccttccgaaggggaggctaatcagtgtcggacgatattgtcgcagatgaagaagtga

SEQ ID NO: 458917 - DNA, 1323 bp, Shigella boydii
atgcaagcaacagccacaacactcgaccacgagcaagaatacacgccgatcaactcgcgtaataaagtccttgtcgcctctctcattggcacagccattgagttcttcgacttttacatttacgccactgcggccgttattgtgtttccgcatatcttcttcccgcagggcgatcctacggcagcaacgctacagtcgctcgccaccttcgccatcgccttcgtcgcgcgccccattggctctgccgtttttggtcattttggcgatcgcgttgggcgtaaagcgacgctggtcgcctcgttgctaacgatggggatttcgaccgtggtgattggtctgctgccaggctatgccacgattggtattttcgccccgctgctgctggcgctggctcgatttggtcagggtctgggcttaggtggtgaatggggcggcgcggcgctgctggcgactgaaaacgccccaccgcgcaaacgtgcattgtacggctccttcccgcagctgggcgcaccgattggcttcttctttgccaacggcactttcttgctgctttcctggctactgaccgacgagcagtttatgagctggggctggcgtgtgccatttatcttctcggcggtgctggtcattatcggcctgtatgttcgcgtgtcgctgcatgagtcgccggtgtttgagaaagtcgctaaagcgaaaaaacaggtgaagatcccgctgggtacgctgctgaccaaacatgttcgcgtaaccgtactgggtacgttcattatgctggcaacctatacgctgttttacatcatgacggtctactctatgacctttagtaccgccgccgcgccagttgggcttggcctgccgcgtaacgaagtgttgtggatgttgatgatggcagttattggttttggcgtgatggtgccagtcgctggattactggctgatgcctttggtcgccgtaaaagcatggtaatcatcaccacgctgatcatcctattcgcgctattcgcctttaaccctttgctcggttctggcaacccgattctggtttttgccttcctgctgctggggttaagtctgatggggctgaccttcggtccgatgggcgcgctgttaccagagctgttcccgacagaagtgcgttacaccggagcatcgttctcttacaacgtatcgtcgattctcggggcttccgttgcgccgtatatcgcagcctggttgcagactaactacgggttaggtgcggtggggttatatctggcggcgatggctggcttgacgttaatcgccctgctgctgacccatgagacgcgacatcagtcgttgtaa

SEQ ID NO: 458918 - DNA, 1014 bp, Shigella boydii
atgacgcaggaaaacgagatcaaacgtcccacccaggatctggagcacgagccgattaagcagttggataatagcgagaaaggcggcaaagttagccaggcgctggaaaccgtcaccaccactgccgaaaaagtccaacgccaaccggttattgcgcacctgattcgcgcgacagaacgctttaacgatcggctgggtaaccagtttggtgcggctatcacctatttctcatttttgtcgatgatcccgattttgatggtgtcgtttgccgcagggggctttgtgctggcctcccatccgatgttgctacaggatatcttcgacaaaattctgcaaaacatcagcgatccgacactagccgccacgttgaaaaacaccatcaacaccgccgttcagcagcgtacgactgtagggcttgtcggcctggcggtggcactttattccggcatcaactggatgggtaacctgcgtgaagcgattcgtgcccagtcgcgcgatgtctgggaacgctcgccgcaagatcaggagaagttctgggtaaaatatctgcgtgattttatttcactgattggtttgttgattgcgctgattgtgacgctttcgatcacctcggttgccggttcggcgcagcaaatgattattagcgccctgcacctgaacagcattgagtggctgaaaccgacgtggcgattgattggcctggcgatttccatcttcgccaactatctgcttttcttctggatcttctggcggttgccgcgccaccgtccgcgcaaaaaagccctgattcgcggaacatttctggctgctattggttttgaagtgattaaaatcgtgatgacctacaccctgccatcgctgatgaaatccccctctggcgcagcatttggttccgtgctggggctgatggcatttttctacttcttcgcccgtttgacgctgttttgcgcggcgtggattgccaccgccgaatataaagacgacccgcgaatgccagggaaaacgcagccttaa

SEQ ID NO: 458919 - DNA, 972 bp, Shigella boydii
atgttagaaaaaacaataaacaatgcgatatgcgcgttactgtttcgctgtgaacagcaatcggtcaaagaaatggataaaattcacgcaatgcagttgttcatcaaagtcgcggagctggaaagtttttcccgcgcagcggatttctttgctttgccaaagggaagtgtttcgcgccagatacaggcactggaacatcaacttggcacccagcttctccagcgcaccacgcgacgggtcaaactcacgccagaaggcatgacctattatcaacgggcaaaagatgtgttgagtaatctcaacgaactggacggtctgtttcaacaggatgccaccagtatcagcggtaaattacgcatcgacatcccgccaggaatcgcgaaaaacctgttactgccgcgcctgtcggaatttctctatctgcatccgggaattgagctggaactgagtagccatgaccgtccggtagatattcttcatgatggttttgattgcgtgatacgcactggcgcgttaccggaagatggcgttatcgcccgtcccctcggcaaactgaccatggtcaactgtgccagtccgcactatctgacgcgctttggttatccgcaaagccccgatgatctgacttcacacgcaatagtgcgttatacaccgcacctgggtgtacatccgttaggttttgaggttgccagcgttaatggcgtccagtggtttaagtctggcggcatgttgacggtaaatagtagcgaaaactatctcgccgccggtcttgccggtctggggattattcagatcccgcgcattgccgtgcgcgaagccctgcgtgccgggcggcttattgaagtattacctggctaccgtgccgagccgctctccctttcgctggtttacccgcagcgtcgggagctttcccggcgtgtaaacctgtttatgcagtggctggctggcgtaatgaaagagcacctggactga

SEQ ID NO: 458920 - DNA, 1935 bp, Shigella boydii
atgtttcaggacaacccgctgctagcgcagcttaaacagcaactgcattcccagacgccacgcgctgaaggggtggtaaaagccacagaaaaaggctttggcttcctggaagtcgacgcgcaaaaaagttatttcattccgccgccgcagatgaaaaaagtcatgcatggcgaccgaattatcgcggtgatccacagtgaaaaagaacgtgaatccgcagagccagaagaactggttgaaccgttcctgactcgtttcgtgggtaaagttcagggcaaaaatgaccgtctggccatcgttcctgatcatccactcttaaaagacgccattccttgccgcgcagcccgtggcctgaaccacgagtttaaagaaggcgactgggcggttgccgaaatgcgccgtcatccgctgaaaggcgatcgttctttctatgctgaattgacacaatacatcacttttggtgacgaccactttgtaccgtggtgggttacacttgcgcgccataatctggaaaaagaagcaccagacggcgtcgctaccgaaatgctcgatgaaggtctggttcgtgaagatctgaccgcgctggattttgtcaccatcgacagtgccagcacagaagatatggatgacgcccttttcgctaaggcgttgccggatgacaaacttcagctgattgtggcgattgccgatccaaccgcgtggattgctgaaggcagcaagctggacaaagccgcgaaaattcgcgcattcaccaactatctgcctggcttcaacatccctatgctgcctcgcgagctttctgacgatctctgctcactgcgcgccaatgaagtccgcccggtactggcatgccgcatgacgctctccgctgatggcgccattgaagataatatcgaattctttgccgccaccatcgaatccaaagcaaagctggtgtatgaccaggtttctgactggctggaaaataccggtgactggcagcctgaaagtgaagcaattgccgaacaagtccgtttgctagcgcaaatttgccaacgccgcggcgagtggcgtcataaccacgcactggtgtttaaagatcgcccggattaccgctttattctcggtgaaaaaggtgaagtgctggatatcgtcgccgagcctcgtcgcattgccaaccgtatcgtcgaagaagcgatgattgccgctaacatttgtgcggcccgcgtactgcgcgataagctcggttttggcatctataacgtgcatatgggctttgatccggcgaatgccgacgcgctggcagcgttgctgaaaacgcacggtctgcatgtcgatgccgaagaagtgctcacgctggacggtttctgcaaactgcgtcgtgaactggacgcgcaaccaactggtttcctcgacagccgcattcgtcgcttccagtcatttgctgaaattagcactgaacccggtcctcactttggcctcggtctggaagcatacgccacctggacttcgccgatccgtaaatatggcgacatgatcaaccaccgtctgctgaaagcggttatcaaaggcgaaactgcgacgcgcccacaggatgaaatcactgtccaaatggccgagcgtcgccgtctcaaccggatggcagaacgtgatgttggtgactggttatacgcacgcttcctgaaagacaaagccgggaccgacacccgtttcgcagcggaaattgtcgatatcagccgtggcggcatgcgtgtgcgtttggttgataacggcgctatcgcctttattccggcacctttcttacacgctatgcgcgatgaactggtttgcagccaggaaaacggcactgtacaaattaaaggtgaaacggtttacaaagtaactgacgttattgacgtcaccattgccgaagtccgcatggaaacccgcagcattattgcgcgcccggtcgcgtaa

SEQ ID NO: 458921 - DNA, 1128 bp, Shigella boydii
atggaacaacgccacatcaccggcaaaagccactggtatcatgaaacgcaatccagtactgcggagtatgacgttctgcctctggtcccggaagccgcaaaggtcagcgatccctttctgctcgacgtgatccttgatgaagaaacgctggctcccttcctttcatggctggtccctgcgcgcgttcttgcagtggaattgttccctgaccagcttaccgtgacccgttcacagaccttcaccgcttatgaacgcttgtctacggccctgacggttgctcaggtttgcggcgtccagcggttatgtaactactattcggcgcgacttacgccgctccccgggcctgattcctctagggaaagcaatcataggttggcacaaatcacgcaatatgcccgccaactggctagctcgccttctattatcgacaaccgatcgcgccagcatctgaatgacgtcgatcttactgcctgggactgtgtgatcattaaccaaatcattggttttattggctttcaggcgcggaccattgcgacatttcaggcttatctcgggcacccggtacgctggttacccggtctggaaatacaaaactacgccgacgcgtcactgtttgctgatgaatcaatacgctggcgaagcagctatgaggtggaaaaactacctgaagagtacacaaaaagttcaacagcagaactttgccaactggccgaaacactctctctccaccctatttcactttcccttctcgaaaggttgttaaacagtacacgggttaatacacagccggataataagcttgcggcgttgttatgcgcgcggataaatggcagtcctgcttgttttgccgcctgtatggattcatcaaatgaatataaaaaaatcagcccccttctgcgcaagggcgaaaatgaaattaaccaatgggctgaccgtcattctgttgagcacgctaccgttcaggcgatacaatggctgacccgagcacccgatcgctttagcaccgcccagttcagccctttactcgaacacgaacaatcatcaacgcagattattaatctgctggtatggagcgggctgtgtggctggataaatcgcttaaaaatcgcgttgggtgagacatattaa

SEQ ID NO: 458922 - DNA, 789 bp, Shigella boydii
atgggttttctttccggtaagcgcattctggtaaccggtgttgccagcaaactatccatcgcctacggtatcgctcaggcgatgcaccgcgaaggagctgaactggcattcacctaccagaacgacaaactgaaaggccgcgtagaagaatttgccgctcaattgggttctgacatcgttctgcagtgcgatgttgcagaagatgccagcatcgacaccatgttcgctgaactggggaaagtttggccgaaatttgacggtttcgtacactctattggttttgcacctggcgatcagctggatggtgactatgttaacgccgttacccgtgaaggcttcaaaattgcccacgacatcagctcctacagcttcgttgcaatggcaaaagcttgccgctccatgctgaatccgggttctgccctgctgaccctttcctaccttggcgctgagcgcgctatcccgaactacaacgttatgggtctggcaaaagcgtctctggaagcgaacgtgcgctatatggcgaacgcgatgggtccggaaggtgtgcgtgttaacgccatctctgctggtccgatccgtactctggcggcttccggtatcaaagacttccgcaaaatgctggctcattgcgaagccgttaccccgattcgccgtaccgttactattgaagatgtgggtaactccgcggcattcctgtgctccgctctctctgccggtatctccggtgaagtggtccacgttgacggcggtttcagcatcgctgcaatgaacgaactcgaattgaaataa

SEQ ID NO: 458923 - DNA, 351 bp, Shigella boydii
atggataaaataaaatcaaatgcgcgtgatttaagacgcaatctcactttgcaggaacgaaagctctggcgatatcttcgcagccgacgttttggtgatttcaaatttcgccgtcaacatccggtggggagctacattctcgattttgcttgctgctcggcgcgcgtagtcgttgagctggatggtgggcagcatgatttggcagttgcctatgataccaggcgcactagctggcttgagtcgcagggctggaccgtgctgcgtttctggaataacgagattgattgtaatgaggaggcggtgctggagattattctgcaggaactgaaccgccgatcaccctcaccctga

SEQ ID NO: 458924 - DNA, 807 bp, Shigella boydii
atgatcgaaacgctgcttgaagtgcgtaatttaagtaaaacgttccgctaccggaccggctggtttcgccgtcagaccgtagaagcggtaaaacccttgagctttacgctacgtgaaggccagacactggcgattattggcgagaatggttcgggtaaatccacgctggcaaaaatgctggcgggaatgatagagcctaccagcggcgagttattgattgacgatcatccactgcattttggcgattattccttccgcagtcagcgtattcgcatgatttttcaggatccttcgacctcgttgaatccccgtcaacgtatctcgcaaattctggattttccactgcgcctgaacaccgacctggaaccggaacagcgtcgcaaacagattattgaaacgatgcgtatggttgggctgctaccggatcacgtcagttactatccgcatatgttggcacccggacaaaaacagcgtctgggtctggcgcgcgcgctgatattgcgcccaaaagtcattattgccgatgaagcactcgcttcactggatatgtcgatgcgttcgcagttgattaatctgatgctggagttacaggaaaaacagggcatttcgtatatttatgttacccagcatatcggaatgatgaagcacattagcgaccaggtgctggtgatgcatcagggcgaggttgtcgagcgaggcagcaccgcggatgtgctggcatcgccgctgcatgaactcaccaaacggctgattgccgggcactttggcgaagcattgacagcggatgcgtggcgtaaagatcgctaa

SEQ ID NO: 458925 - DNA, 993 bp, Shigella boydii
atgccattactcgatattcgtaacctgaccattgaatttaaaaccggtgatgagtgggttaaagccgtcgaccgggtaagtatgaccttaaccgaaggtgaaatccgcggtcttgttggtgaatccggttccggcaagagtttgattgcgaaagcgatttgtggggtgaataaagataactggcgtgttactgctgaccgtatgcgttttgatgatatcgatttgctgcgtctctccgcacgcgaacggcgcaaactggttggccataacgtgtcgatgattttccaggaaccgcagtcgtgtcttgacccttcagaacgtgtgggtcgccagttgatgcaaaacatcccagcctggacctataaaggccgttggtggcagcgttttggctggcgcaaacgccgtgccattgaactgctgcaccgcgtggggattaaagatcacaaagatgcgatgcgcagttttccctatgagttgaccgaaggtgaatgtcagaaagtgatgatagccattgcactggcgaatcaaccgcgtctgctgattgctgacgaaccgaccaactcaatggagccaacaacccaggcgcaaatctttcgcctgctgacgcgtctcaaccaaaacagcaataccactattttgcttatcagccatgacttacaaatgcttagccaatgggcggataaaattaacgtgctttactgcggtcaaacagtggaaaccgcgccgagtaaggagttggtgacgatgccacatcatccttatacccaggcgctgatccgcgcgataccagacttcggcagcgcgatgccgcataaaagtcgcctcaatactctgcccggcgctatcccactgctggaacagttaccgattggttgtcgtctggggccacgttgcccgtatgcacaacgagaatgcattgtgacgccacgtttgacgggggcgaaaaatcatctctatgcctgtcatttcccgctgaacatggagaaagagtga

SEQ ID NO: 458926 - DNA, 891 bp, Shigella boydii
atgccttacgatagcgtatacagcgaaaagcgcccgccgggcacgctgcgtaccgcctggcgcaaattttatagtgacgcctctgcgatggtcggcctgtacggctgcgcggggctggctgtactgtgtatttttggcggctggtttgcgccttacggcatcgaccagcaatttctcggttatcaattattgccgccatcatggtcgcgctatggcgaagtttctttcttcctggggactgacgacctcggacgcgatgttttaagccgtttactgagcggagctgcgccaaccgtgggtggcgcatttgtggtgacgcttgccgcgacgatctgtggcctggtactgggcaccttcgccggggcgacacacggcctccgctcagcggtgcttaaccatattctggataccttactggcgatcccttcgctgctgttggcaattatcgttgtagcgtttgccggaccgagtttgtcccacgctatgtttgctgtctggctggcattgctgccgcgtatggtacgttcgatttacagcatggtgcatgacgaactggaaaaagagtacgttatcgccgcccgtctggatggcgcatcaacgctgaatattctctggtttgctgtgatgccaaacatcaccgccgggctggtcaccgagatcacccgcgcactgtcgatggcaattctcgatatcgccgcgctgggctttctcgatctcggcgcacaactcccctcgcctgaatggggagcgatgctcggtgatgcgctggaactgatttatgtcgccccgtggactgtcatgctgccaggtgcggcaattatgattagcgtgttgttggttaacctccttggcgatggcgttcgtcgtgcgattattgcgggggtggaataa

SEQ ID NO: 458927 - DNA, 966 bp, Shigella boydii
atgattatcttcaccttacgccgcattttgttattgattgtcaccttgttcctgctgaccttcgttggcttcagcttgagctatttcacccctcatgcgccgttacaaggcgcgtcactgtggaatgcctgggtgttctggtttaacggcctgatccactgggattttggtgtttccagcattaacggtcaaccgattgccgaacagttaaaagaggtcttcccggcgacgatggaactgtgcatcctcgccttcggttttgcgctgattgttggcatccccgtggggatgattgccgggattacgcgccataagtggcaggataacttgatcaacgccatcgccttactgggcttttcaatcccggtgttctggctggcgcttctgttgacgctgttttgttcactcacgctaggttggttgcccgtttcagggcgtttcgatctgctctacgaagtgaaaccgattaccggttttgcgttgattgatgcctggctttcggactcaccatggcgggatgaaatgatcatgagcgcaatccgccatatgatattgcccgtgatcaccctgtcggttgcgccaacaactgaagtgatccgcctgatgcgtatcagcactatcgaagtgtatgaccagaactatgtaaaagcggcggcgacccgcggtttgtcgcgctttactattttgcgtcgccacgttctgcataacgcgttaccgccggttattcctcgcctgggcttacagttttccaccatgctgacgctggcgatgatcaccgaaatggtttttagctggccgggtttagggcgctggttaattaacgccatccgccagcaggattacgcagccatttccgccggagtgatggtgtgtggctcactggtcattattgttaacgtgatttctgatattttgggtgccatggctaaccctctgaaacataaggaatggtatgccttacgatag

SEQ ID NO: 458928 - DNA, 1644 bp, Shigella boydii
atgcgccaggtattatcgtctcttttggtgattgctggacttgtgagtggtcaggcaatcgccgcgcctgaatcccccccgcatgctgatatccgcgacagcggttttgtctattgcgtcagcgggcaagtcaacacctttaacccatccaaagcgagcagtgggttaattgtcgatacccttgccgcccagttttatgatcgactgctggatgtcgatccctatacctatcgcctgatgccggaacttgccgaaagctgggaagtactcgacaacggcgcgacctatcgcttccacctgcgtcgcgatgttccgtttcaaaaaaccgactggtttactcccactcgtaaaatgaatgccgacgatgtggtgtttaccttccagcgaatttttgaccgcaacaacccgtggcataacgtcaacggcagcaacttcccctacttcgacagcctgcaatttgccgataacgtgaaaagcgtccgcaaactggataatcataccgttgagttccgactcgcccagccggatgcttcttttttgtggcacctcgcaacccattatgcttcggtcatgtcggcagaatatgcccggaagttagagaaagaagatcgccaggagcaactcgaccgtcaaccggtcggcaccggtccgtatcagttgtcggaataccgcgccgggcaatttattcgcctacaacgtcatgatgacttctggcgcggtaaaccgttaatgccgcaggtagtggtggatttaggctccggcggcaccggacgtctgtcgaaactcctgaccggggaatgcgacgttctggcctggcctgctgccagccagctatccattttgcgtgacgacccgcgcttgcgtttaacgctgcgtcctgggatgaacgtcgcctatctggcatttaacaccgccaaaccgccgctaaataatcccgctgtccgccatgcactggcactggcgattaataaccagcgcctgatgcaatccatctattatggtacggctgaaacggcggcctctattttaccgcgcgcctcgtgggcctatgacaacgaggctaaaattactgaatacaatccggcgaaatcgcgcgaacagttgaaggcgttggggctggaaaacttaacgctgaaactgtgggtgcccacacgttcgcaggcgtggaaccccagtccactgaaaactgccgaactgattcaggcggatatggcgcaggttggcgtaaaagtggtgattgtgccggtagaaggtcgctttcaggaggcgcggttgatggatatgagccatgatctgacgttatccggttgggcgacggacagtaacgacccggacagtttcttccgtcctttactgagctgtgcggcaattcattcacagaccaacctcgcccactggtgcgatccgaaattcgacagcgtgttgcgtaaggcgctctcctcgcagcagctggcggcgcgtattgaagcctatgacgaagcgcagagtattctggcgcaggaattgcccattttgccgctggcgtcgtcattgcgtttgcaggcctatcggtacgatatcaaaggtctggtacttagcccgtttggtaacgcctcctttgctggggtgtatcgcgagaaacaggatgaggtgaaaaaaccatga

SEQ ID NO: 458929 - DNA, 246 bp, Shigella boydii
atgaaccatgatatcccgctaaaatattttgatattgccgatgagtacgcgaccgaatgcgcagagcctgtcgcagacgctgaacgcacaccgctggcccactacttccagttactgctcacccgtttgatgaacaatgaagagatcagcgaagaagcccaacatgaaatggctgctgaagcggggattaatcccgtacgcattgatgagatcgcagagtttttgaatcaatggggtaatgagtaa

SEQ ID NO: 458930 - DNA, 1386 bp, Shigella boydii
atggctattaattcaccactgaatattgctgcgcaacccggcaaaacccgtctgcgaaaatcactgaaattgtggcaggtggtgatgatgggtctggcctatctcacgccgatgaccgtatttgatacttttggtattgtctccggcattagcgacggtcacgttccggcgtcctatttgctggcgctggcgggcgtgctgtttaccgctatcagctacggcaaactggttcgccagtttccggaggccgattcggcctatacctacgcgcaaaagtcgattaacccgcacgtcggatttatggtcggctggtcatcgctgctggattatctctttttgccgatgatcaacgtcttgttggcgaaaatctatctctccgccctcttcccggaagtgccgccgtgggtgtgcgtagtaaccttcgtcgccattttaaccgccgcgaatctgaagagcatcaacctagtcgctaacttcaataccctgtttgtactggtgcaaatctccatcatggtggtgtttatcttcctggtagttcagggactgcataaaggagaaggcgttggcaccgtctggtcacttcagccgtttatcagcgagaacgcgcacctgatcccgattattaccggggcgacgattgtctgtttctccttcctcggtttcgatgcggtgaccacgctttcggaagagacgccggacgccgcacgcgtgatcccgaaagccatcttcctgacggcggtctacggtggcgttatctttatcgcggcgtcgttctttatgcagctgttctttcccgatatcagccgctttaaagatccggatgccgcactgcctgaaattgcgctgtacgtcggcggcaagctcttccagtcgattttcctctgcaccacgtttgtgaacacgttagcctctggcctggcttcacatgccagcgtgtcgcgtctgctgtatgtgatggggcgtgacaatgtgtttccggagcgcgtgtttggctatgtgcacccaaaatggcggactccggcactcaacgtcattatggtcgggattgtcgcgttgtcggcgctgttcttcgatttagttaccgccacagcgttaattaacttcggtgctctggtggcgtttaccttcgtgaatctgtcggtgtttaatcatttctggcggcgtaaaggaatgaataaaagctggaaggatcacttccactatttgctgatgccgctggttggcgcgctgacggtgggtgtgctgtgggttaacctcgagtcaacgtcactgacactcggtctggtatgggcttcgttaggcggcgcatatttatggtatctgatccgccgctatcgcaaagtgccgttgtatgatggtgacagaacgccggtgagtgaaacgtaa

SEQ ID NO: 458931 - DNA, 1419 bp, Shigella boydii
atggaaaccaatatcgttgaagtagagaactttgttcagcagccagaagagaggcggggtagcgcctttacgcaggaagtgaaacgctacctggagcgctacccgaatacgcaatatgttgatgttttacttactgatttgaatggttgcttccgtggaaaacgtatccctgtttcaagcctgaagaagttggagaaagggtgttatttcccggcctcggtgtttgcaatggatattctgggcaacgtagtagaagaagcgggtctgggtcaggaaatgggcgagccggatcgtacttgtgttcctgttctcggttccttaaccccttctgccgccgatccagagtttatcggtcagatgctcctgaccatggtcgatgaagatggcgctccctttgacgttgagccgcggaacgttcttaaccgcctgtggcagcagctacgccagcgcggattgttcccggttgtagcggtagagctggagttctatttactggatcgtcagcgcgacgctgaagggtatctgcaaccgccctgcgcgcccggcaccgatgaccgcaatacacacagccaggtttactccgttgataacctcaaccacttcgccgacgtgctcaatgatattgatgaactggcgcagttacagttaattcccgccgacggtgcggtcgccgaagcctcgccgggtcagtttgaaatcaacctttaccataccgataacgtgctggaagcctgcgatgatgcgctggcgctaaaactcctggtgcgtctgatggcagaaaagcataagatgcacgccacttttatggcgaagccgtatgaagagcacgcgggcagcgggatgcatatccatatcagtatgcaaaataatcgtggcgagaatgtgctttctgacacagaaggcgaagattcgccgctgctgaaaaagatgctcgccgggatgattgacctgatgccgtcgtcgatggcgttgctggcaccaaacgtgaactcgtatcgccgcttccagccgggaatgtatgtgccgacgcaggcgtcgtggggccataacaaccgcaccgtcgccctgcgtattccgtgcggcgaccgtcataatcaccgcgtggaatatcgcgtggcgggtgccgatgccaacccatatctggtgatggcagcgatttttgccggtattttgcatggccttgataacgagctgccgttgcaggaagaagtcgaaggcaacgggctggaacaggaaggcttacccttcccgattcgccagagcgatgccctgggtgagtttatcgagaatgatcacctgcgccgctatttaggcgaacggttttgccatgtgtatcacgcctgtaaaaatgatgagctgttgcagtttgagcgcctcatcacagaaacagaaattgagtggatgttgaaaaacgcatag

SEQ ID NO: 458932 - DNA, 537 bp, Shigella boydii
atggaaaatataatgaacaatccggttatcggtgtcgtaatgtgcaggaacaggcttaagggtcatgcgacccagactctgcaagaaaagtacctgaatgccatcatccacgcaggcggcttgccaattgcgctaccacatgcgctggcggaaccgtcgttacttgaacaacttttgccgaaactcgatggcatttatcttcctggtagtcccagcaatgtgcagccgcacctatatggtgaaaacggcgatgagcctgacgccgatcccgggcgtgatcttctgagcatggcgataattaatgccgcactcgaaaggcgcatccccattttcgccatctgccggggtttacaagaactggtggtggcaaccggtggttcgttgcatcgcaagctgtgcgaacagcctgaattgctggaacatcgggaagatccgaactgccggtggaacagcaatatgcaccgtcgcatgaagttcaggttgaagaggggggattactgtctgcgttgttacctgaatgtagcaacttttgggtaa

SEQ ID NO: 458933 - DNA, 558 bp, Shigella boydii
atgagtgatgagggactggcgccaggaaaacgcttgtcggaaatccgccagcagcaggggctttcacaacgtcgtgccgccgaactctccgggctgactcacagtgctatcagtacgatagaacaagataaagtcagccctgccatcagtacgctgcaaaagctgctgaaggtgtatggtctgtcactctcggaattcttttccgagccggaaaaacctgatgagccgcaggtcgtcattaatcaggacgacttaattgagatgggcagtcagggtgtgtcaatgaagctggttcataacggtaacccgaatcgcacgctggcgatgatctttgaaacgtaccagccgggcacaaccactggggaaagaattaagcatcagggtgaggaaataggcacagtactggaaggtgaaattgttctgacgattaatggtcaggattaccacctcgtcgcgggtcaaagttatgccattaataccggcatcccgcacagtttcagtaatacgtcggcaggtatttgccgaattatcagcgcccatacgcccaccacgttttaa

SEQ ID NO: 458934 - DNA, 1488 bp, Shigella boydii
atgaattttcatcatctggcttactggcaggataaagcgttaagtctcgccattgaaaaccgcttatttattaacggtgaatatactgctgcggcggaaaatgaaacctttgaaaccgttgatccggtcacccaagcaccgctggcgaaaattgcccgcggcaagagcgtcgatatcgaccgtgcggtgagcgcagcacgcggcgtatttgaacgcggcgactggtcactctcttctccggctaaacgtaaagcggtactgaataaactcgccgatttaatggaggcccacgccgaagagctggcactgctggaaactctcgacaccggcaaaccgattcgtcacagtctgcgtgatgatattcccggcgcggcgcgcgccattcgctggtacgccgaagcgatcgacaaagtgtatggcgaagtggcgaccaccagtagccatgagctggcgatgatcgtgcgtgaaccggtcggcgtgattgccgccatcgtgccgtggaacttcccgctgttgctgacttgctggaaactcggcccggcgctggcggcgggaaacagcgtgattctaaaaccgtctgaaaaatcaccgctcagtgcgattcgtctcgcggggctggcgaaagaagcaggcttgccggatggtgtgttgaacgtggtgacgggttttggtcatgaagcggggcaggcgctgtcgcgtcataacgatatcgacgccattgcctttaccggttcaacccgtaccgggaaacagctgctgaaagatgcgggcgacagcaacatgaaacgcgtctggctggaagcgggcggcaaaagcgccaacatcgttttcgccgattgttcggatctgcaaaaagcggcgagctccaccgcagcaggcatcttctacaaccagggtcaggtgtgcatcgccggaacacgcctgttgctggaagagagcatcgccgatgaattcttagccctgttaaaacagcaggcgcaaaactggcagccgggccatccgcttgaccccgcaaccaccatgggcactttaatcgactgcgcccacgccgactcggtccatagctttattcgtgagggcgaaggcaaagggcaactgctgctggatggccgtaacgccgggctggctgccgccatcggcccgaccatctttgtggatgtagacccgaatgcgtccttaagccgcgaagagattttcggtccggtgctggtggtcacgcgtttcacatcagaagaacaggcgctacagcttgccaacgacagccagtacggccttggcgcggcggtatggatgcgcgacctctcccgcgcgcaccgtatgagccgccgcctgaaagccggttccgtcttcgtcaataactacaacgacggcgatatgaccgtgccgtttggcggctataagcagagcggcaacggtcgcgacaaatccctgcatgcccttgaaaaattcaccgaactgaaaaccatctggataagcctggaggcctga

SEQ ID NO: 458935 - DNA, 1281 bp, Shigella boydii
atgaccgaacataccagcagttattacgccgccagtgcgaataaatacgtgccattcgacaccctgaatgagtcaatcacctgcgacgtttgcgtggttggcggcggctataccgggctctcctccgcgctgcatctggcggaagcgggctttgacgtagtggttctcgaagcctcacgcatcggctttggcgcaagcgggcgcaatggcgggcagcttgtgaactcctacagccgcgacatcgacgtgatcgaaaaaagctacggcatggacaccgcccctatgctcggcagcatgatgttcgaaggtggtgagatcatccgcgaacgtatcaaacgttatcagattgactgcgactaccgccccggcggcctgtttgtggcgatgaatgataaacagctcgccacacttgaagagcagaaagagaactgggaacgctacggcaataaacagctggaattgctggacgccaacgccattcgccgtgaagtagccagcgatcgctataccggtgcgctgctggatcacagcggtgggcatattcacccgctaaacctcgccattggcgaagcggacgccatccgcctcaacggcgggcgcgtgtatgaactttctgccgtgacgcagatccagcacaccacgccagccgttgtgcgcactgccaaaggtcaggtgacggcgaagtatgtgattgtcgccgggaatgcgtatctgggcgataaagtagagccggaactggcgaaacgcagcatgccgtgcggcacgcaggtgatcaccaccgaacggctgtcggaagatttagcctgttcgctgatcccgaaaaactactgtgtggaagactgtaattatctgcttgattactaccgtcttaccgccgacaaccgtttgctgtacggcggcggcgtggtctacggcgcgcgcgacccggatgacgttgagcgtcttgttgtgccgaaactgctgaaaaccttcccgcagctgaagggcgtcaaaatcgactatcgctggacgggcaacttcctgctgaccctttcacggatgccgcagttcggtcgcctcgataccaacatctattacatgcagggctacagcggccacggcgtcacctgtacccacctcgccgggcgtttgattgctgaactgctgcgcggtgacgccgagcgtttcgatgccttcgccaatctgccgcattacccgttccccggcgggcgcacgctgcgcgtgccatttaccgcgatgggcgcggcttattacagcctgcgcgatcgtctgggcgtttaa

SEQ ID NO: 458936 - DNA, 1278 bp, Shigella boydii
atgagcaacaatgaattccatcagcgtcgtctttctgctaccccacgcggggttggcgtgatgtgtaacttcttcgcccagtcggcagaaaacgctacgctgaaggacgtagagggcaacgaatacatcgatttcgccgcaggcattgcggtgctgaataccgggcatcgccaccctgatctggtcgcggcggtggagcagcaattgcaacagtttacccacacggcgtatcagattgtgccgtacgaaagctacgtcacgctggcggagaaaattaacgcccttgccccagtgagcgggcaggctaaaaccgcattcttcactaccggcgcggaagcggtggaaaacgcggtgaaaattgctcgcgcccataccggacgacctggcgtgattgcgtttagcggcggcttccacggtcgtacatatatgaccatggcgctgaccggaaaagttgcgccgtacaaaatcggcttcggcccgttccctggttcggtgtatcacgtaccttatccgtcagatttacacggcatttcaacacaggactccctcgacgccatcgaatgcttgtttaaatcggacattgaagcgaagcaggtggcggccattattttcgaaccggtgcagggcgagggcggtttcaacgttgcgccaaaagagctggttgccgccattcgccgcctgtgcgacgagcacggtattgtgatgattgccgatgaagtgcaaagcggctttgcgcgtaccggtaaactgtttgccatggatcattacgccgataagccggacttaatgacgatggcgaaaagcctcgcgggcgggatgccgctttcgggcgtggtcggtaacgcgaatattatggacgcgcccgcgcccgcgcccgcgccgggcgggttgggtggcacctacgccgggaacccgctggcggtggctgccgcgcacgcggtgctcaatattatcgacaaagaatcactctgcgaacgcgcgaatcaactgggccagcgtctcaaaaacacgttgattgatgccaaagaaagcgttccggccattgctgcggtacgcggcctggggtcgatgattgcggcagagtttaacgatccgcaaacgggcgagccgtcagcggcgattgcacagaaaatccagcaacgcgcgctggcgcaggggctgctcctgctgacctgtggcgcatacggcaacgtgattcgcttcctgtatccgctgaccatcccggatgcgcaattcgatgcggcaatgaaaattttgcaggatgcgctgagcgattaa

SEQ ID NO: 458937 - DNA, 978 bp, Shigella boydii
atggcagaatacaaagataatttacttggtgaggcgaacagctttctcgaagtgctggaacaggtttcgcatctcgcaccgctggacaaaccggtgctcatcatcggcgaacgcggcaccggtaaagagctgattgccagccgcctgcattatctctcctcccgttggcaagggccgtttatttcccttaactgcgcggcgttaaatgaaaatctgctggattccgaactgtttggtcacgaagcgggggcgtttaccggtgcgcaaaaacgtcatccagggagatttgaacgtgccgacggcggtacgctatttcttgatgaactcgctacggcaccgatgatggtgcaggagaaattattgcgcgtgattgagtacggtgaactggagcgcgttggcggcagccagccattgcaggtgaatgtgcggttggtatgcgcgacgaatgccgatctcccggcgacggtcaatgaaggcacttttcgcgctgacctgctcgaccgactggcttttgatgttgtacaactgccaccactgcgcgagcgcgaaagcgacataatgttgatggcagaacactttgccatccagatgtgtcgggaaatcaagctgcctctgttcccggggtttacggagcgcgccagagaaacattgctgaattatcgttggccgggaaatattcgtgaattgaaaaacgtggtggaacgttcagtgtatcgccacggcaccagcgattatccgcttgatgacatcattattgatccctttaaacggcgtccgcctgaagacgctatcgccgtttcagaaaccacctcgcttccaacactgccgctggatttacgtgagtttcagatgcagcaggaaaaagagttgctgcaactcagtttgcaacaagggaaatataaccagaagcgcgcggctgaattactggggttaacttatcatcagttccgcgcgttgttgaaaaagcaccagatttag

SEQ ID NO: 458938 - DNA, 669 bp, Shigella boydii
atgggtattttttctcgctttgccgacatcgtgaatgccaacatcaacgctctgttagagaaagcggaagatccacagaaactggtgcgtctgatgatccaggagatggaagatactctggttgaagtacgttctacttcggcgcgtgcgttggcagaaaagaaacagctgactcgccgtattgaacaagcgtcggcgcgtgaagttgaatggcaggaaaaagccgaactggcgctgctgaaagagagagaggatttggcacgtgcggcgttaattgaaaaacagaaactgaccgatctgattaagagtctggaacatgaagtgacgctggtggacgatacgctggcacgcatgaagaaagagatcggtgagctggaaaacaaattgagcgaaacacgcgctcgccagcaggcattgatgttacgccatcaggcggcaaactcgtcgcgcgatgtgcgtcgtcagctggacagtggcaaactggatgaagcaatggctcgtttcgaatctttcgaacgtcgtattgaccagatggaagcggaagcagaaagccacagcttcggtaaacaaaaatcgctggacgatcagtttgccgaactgaaagccgatgatgcaatcagcgaacaactggcacaattaaaagccaaaatgaagcaagacaatcaataa

SEQ ID NO: 458939 - DNA, 225 bp, Shigella boydii
atgagcgcgctatttctggctattccgttaaccatttttgtgctgtttgttttaccgatctggttatggctgcattacagcaatcgttctggtcgcagtgaattgtcgcaaagtgagcagcagcgattagcgcaactggttgatgaagcaaaacggatgcgcgaacgtattcaggcgctggaatctattcttgatgcagaacatccgaactggagggatcgctaa

SEQ ID NO: 458940 - DNA, 360 bp, Shigella boydii
atggcgggcattaatctcaataaaaaattatggcgtattccacagcagggcatggtccgcggcgtctgcgccgggattgccaactattttgatgtaccggtaaaactggtgcgtatcctggtggtgctgtcgattttcttcggtctggcgctgtttaccctggttgcttacatcattttgtcatttgcgcttgatccaatgccggacaacatggcctttggtgagcagctaccctccagcagcgaattgctggatgaagtcgaccgtgaactggcggcaagtgaaacgcgtttacgcgagatggaacgttatgtcacttccgatactttcacgttacgtagccgtttccgtcaactgtga

SEQ ID NO: 458941 - DNA, 222 bp, Shigella boydii
atgaatactcgctggcaacaggccgggcaaaaggtaaagcttggtttcaaattagcaggcaagctggtacttcttaccgcactgcgctatggcccggcgggtgtagcgggctgggcgataaaatcagttgctcgccgaccgctgaaaatgttgctggctgtggcgctggaaccgctgttaagtcgggctgctaataaactggcacagcgttataaaaggtga

SEQ ID NO: 458942 - DNA, 315 bp, Shigella boydii
atgtttaaaaaaggcttacttgctctggcactggtgttttcactgcccgttttcgccgctgaacactggatcgatgttcgtgttccagagcagtatcagcaagagcacgttcagggggccatcaatattcccctgaaggaagtgaaagagcgcattgccaccgccgttccggataaaaacgacaccgtgaaagtgtattgcaatgccggacgccagtcagggcaagcaaaagagatccttagcgagatgggatatacccacgttgagaacgccggtggcttgaaagacatcgcaatgccgaaggtcaaaggttaa

SEQ ID NO: 458943 - DNA, 144 bp, Shigella boydii
atgggatcgctaccactgaaaggcaacatgaaacagaaaattactgattacctggacgaaatctacggtggaacatttaccgcaactcatttacagaaacttgtaacgcgtcttgagggtaatgctgccaacttactgatttag

SEQ ID NO: 458944 - DNA, 618 bp, Shigella boydii
atggcacagctatatttctactattccgcaatgaatgcgggtaagtctacagcattgttgcaatcttcatataattaccaagaacgcggcatgcgcactgtcgtatatacggcagaaattgatgatcgctttggtgccgggaaagtcagttcgcgtataggtttgtcatcgcctgcaaaattatttaaccaaaattcatcattatttgatgagattcgtgcggaacatgaacagcaggcaattcattgcgtactggttgatgaatgccagtttttaaccagacaacaagtatatgaattatcggaggttgtcgatcaactcgatatacccgtactttgttatggtttacgtaccgattttcgaggtgaattatttattggcagccaatacttactggcatggtccgacaaactggttgaattaaaaaccatctgtttttgtggccgtaaagcaagcatggtgctgcgtcttgatcaagcaggcagaccttataacgaaggtgagcaggtggtaattggtgataatgaacgatacgtttctgtatgccgtaaacactataaagaggcgttacaagtcggctcattaacggctattcaggaaaggcatcgccacgattaa

SEQ ID NO: 458945 - DNA, 414 bp, Shigella boydii
atgagcgaagcacttaaaattctgaacaacatccgtactcttcgtgcgcaggcaagagaatgtacacttgaaacgctggaagaaatgctggaaaaattagaagttgttgttaacgaacgtcgcgaagaagaaagcgcggctgctgctgaagttgaagagcgcactcgtaaactgcagcaatatcgcgaaatgctgatcgctgacggtattgacccgaacgaactgctgaatagccttgctgccgttaaatccggcaccaaagctaaacgtgctcagcgtccggcaaaatatagctatgttgacgaaaacggcgaaactaaaacctggactggccagggccgaactccagctgtaatcaaaaaagcaatggatgagcaaggtaaatccctcgacgatttcctgatcaagcaataa

SEQ ID NO: 458946 - DNA, 909 bp, Shigella boydii
atggctgccattaatacgaaagtcaaaaaagccgttatccccgttgcgggattaggaaccaggatgttgccggcgacgaaagccatcccgaaagagatgctgccacttgtcgataagccattaattcaatacgtcgtgaatgaatgtattgcggctggcattactgaaattgtgctggttacgcactcatctaaaaactcgattgaaaaccactttgataccagttttgaactggaagcaatgctggaaaaacgtgtaaaacgtcaactgcttgatgaagtgcagtctatttgtccgccgcacgtgactattatgcaagttcgtcaggggctggcgaaaggcctgggacacgcggtattgtgtgctcacccggtagtgggtgatgaaccggtagctgttattttgcctgatgttattctggatgaatatgaatccgatttgtcacaggataacctagcagagatgatccgccgctttgatgaaacgggtcatagccagatcatggttgaacaggttgctgatgtgaccgcatatggcgttgtggattgcaaaggcgttgaattagcgccgggtgaaagtgtaccgatggttggtgtggtagaaaaaccgaaagcggatgttgcgccgtctaatctcgctattgtgggtcgttacgtacttagcgcggatatttggccgttgctggcaaaaacccctccgggagctggtgatgaaattcagctcaccgacgcaattgatatgctgatcgaaaaagaaacggtggaagcctatcatatgaaagggaagagccatgactgcggtaataaattaggttacatgcaggccttcgttgaatacggtattcgtcataacacccttggcacggaatttaaagcctggcttgaagaagagatgggcattaagaagtaa

SEQ ID NO: 458947 - DNA, 1014 bp, Shigella boydii
atgacgcagccattggtcggaaaacagattctcattgttgaagatgagcaggtatttcgctcgcttctggattcatggttttcctcattgggagcgacaacggtactggcggctgatggggtggatgcccttgagttgctgggaggtttcactccagacctgatgatatgtgatatcgcgatgccacgaatgaacgggcttaaactgctggagcatatacgtaacagaggcgaccagaccccagttctggtgatatctgccactgaaaatatggcagatattgccaaagcgttacgtctgggcgttgaagatgttttgctgaaaccagttaaagatctgaatcgcttgcgcgagatggtttttgcctgtctctatcccagcatgtttaattcgcgcgttgaggaagaggaaaggctttttcgcgattgggatgcaacggttgataaccctgccgcagcggcgaaattattacaggaactacaaccgccggttcagcaggtgatttcccattgccgggttaattatcgtcaattggttgccgcggacaaacccggcctggtgcttgatattgccgcactttcggaaaacgatctggcattttattgccttgatgtcacccgagctggacataatggcgtacttgctgccttgttattacgcgcattgtttaacggattattacaggaacagcttgcacaccaaaatcaacggttgccagagctgggcgcgttattgaagcaggtaaaccatttactccgtcaggccaatctgccggggcagtttccgctattagttggctattatcatcgcgaactgaaaaatctcattctggtttctgcgggtctgaatgcgacgttaaataccggcgaacaccaggtgcaaatcagtaatggtgttccgttaggcactttaggtaacgcttatttgaatcaattgagccagcgatgcgatgcctggcaatgccaaatatggggaactggtggtcgactgcgcttgatgttgtctgcagaatga

SEQ ID NO: 458948 - DNA, 945 bp, Shigella boydii
gtggctacgattgcattccaggggaatcttgcgggaataatgagaaagataaaaatagggctggcgctgggatctggcgcggcgagaggttggtcgcatattggcgttattaatgcgctaaaaaaagtgggtattgaaattgatatcgttgcaggatgttcaattggttcgctggtgggcgctgcctatgcatgcgatcgattatctgcgctggaagattgggtgacctctttcagttattgggatgttttacgcctgatggatctctcctggcagcgcggtgggttactgcgcggcgagcgtgtcttcaatcaataccgcgaaataatgccggaaacagagatcgaaaattgttcccgtcgctttgcggctgttgccaccaatttaagtacgggacgtgaattatggtttactgaaggcgatctccatcttgctattcgcgcatcatgcagtattccaggactcatggcacctgttgcacataacggctactggctggttgatggagcagtagttaacccaattcctatttccctcacgcgtgcattgggggctgatattgtgatagcggtcgacctgcagcacgatgctcatttgatgcaacaagatttgctctcctttaatgtcagtgaagaaaatagcgagaatggtgaatctttgccgtggcatgcgcgtctgaaagaaaggttaggcagtataacaacacgtcgggcggtgacagcgccaacggcaacagagattatgaccacttctatccaggtgctggagaaccgccttaaaaggaaccgcatggcaggtgatccgcccgatattctgattcaacctgtttgcccgcaaatatctacgcttgatttccatcgcgcgcacgctgccattgcggccggacagctggcagtggaaaggaaaatggacgaacttttgccgttggtacgcaccaacatttga

SEQ ID NO: 458949 - DNA, 459 bp, Shigella boydii
gtgtctcagctttgtccctgtggtagtgctgtcgagtatagcctatgttgccacccttatgtgtctggtgaaaaggttgcacctgatccagaacatctcatgcgttcgcgttactgcgcttttgtgatgcaagacgcagattatttaataaagacctggcatccctcttgtggagcagcggcgttacgtgccgaattgatggccggatttgcgcatactgaatggttgggattgaccgtatttgaacattgttggcaggacgccgacaatatcggatttgtcagttttgttgctcgatttaccgaaggtggcaaaacaggtgcaataattgaacgttcgcgatttttgaaagaaaacggtcaatggtactatattgacggtacacgtccgcagtttggtcgcaacgatccctgcccttgtggttcaggtaaaaaatttaaaaagtgctgcggccaataa

SEQ ID NO: 458950 - DNA, 843 bp, Shigella boydii
atgcattcactccaacgtaaagttctgcgtactatttgtccggaccaaaaaggtctgatcgcacgtattaccaatatttgctacaagcacgagttaaatatcgtacagaacaatgaatttgttgatcaccgtaccgggcgcttttttatgcgcacggaactggaagggatttttaatgattccaccctgctggcggatctcgatagcgcattgccagaaggctccgtgcgtgagctgaatcctgccggtcgtcgccggatagtgattctggtcactaaagaagcgcattgccttggcgatttgttgatgaaagccaattacggcggcctggatgtcgaaatcgcggcagttattggtaaccacgatactttacgttctctggttgagcgttttgatattccgtttgagctggtaaaccatgaagggttaagccgcaacgagcacgatcaaaagatggcagacgccattgatgcttataaacctgactatgtggtgctggcgaagtatatgcgggtattaacgccggaatttgtggcacgcttcccgaataaaatcatcaatattcaccattcattcctgcctgcgtttatcggcgcacgtccttatcaccaggcctatgaacgtggtgtgaagattattggcgcaaccgctcactatgtgaatgacaatctggacgaaggcccaatcatcatgcaggacgttattcatgtcgatcatacctacacagctgaagatatgatgcgcgcaggtcgtgacgtcgagaaaaacgtcttaagtcgtgcgctatacaaagtactggcacagcgcgtctttgtttacggtaatcggacgattattctttaa

SEQ ID NO: 458951 - DNA, 678 bp, Shigella boydii
atgcaattcctgaatatgttcttctttgatatctacccgtacatagccggggcggtcttcctgattggtagctggctgcgttatgactacgggcagtacacctggcgcgcggcgtccagccagatgctggatcgcaaagggatgaacctggcgtcgaacctgttccatatcggtattctggggatttttgttggtcacttcttcggtatgctgacgccgcactggatgtatgaagcctggctgccgattgaagtgaaacagaaaatggcgatgtttgctggtggtgccagcggcgtgctgtgtctgattggcggcgtgctgttgctgaagcgtcgtctgttcagcccacgcgtgcgtgcaaccactaccggagcggatatcctgatcctgtcgctgctcgttatccagtgcgcgctgggcctgttgaccattccgttctccgctcagcatatggacggtagcgagatgatgaaactggttggctgggcgcagtcggtggtgaccttccacggtggcgcttctcaacacctcgatggtgtggcgtttatcttccgtctgcacctggtgctggggatgacgttattcctgctgttcccgttctcgcgtctggtacacatctggagcgtaccggtggagtatctgacacgtaagtaccagctggtgcgcgctcgtcactaa

SEQ ID NO: 458952 - DNA, 711 bp, Shigella boydii
atgatcgaactcgtgattgtatcgcgtctccttgaatatccggatgctgccttatggcagcatcaacaagagatgtttgaggcgattgctgcgtcgaaaaatctgtcgaaagaagatgcccatgcgctgggcattttcctgcgcgatttaacggcgatggatccgctcgatgcccaggcccagtacagcgaactgttcgaccgtggccgcgccacgtcactgttgctatttgaacatgttcacggtgaatcccgtgaccgcggccaggcgatggtggacctgctggcgcagtacgagcagcacggcttgcagttaaacagccgcgaattaccggaccatctgccgctgtatctggagtacctgtcgcagctgccgcaaagcgaagccgtggaaggtttgaaagatatcgcgccgattctggcattgctgagcgcgcgtctgcaacagcgtgaaagccgttatgccgtgatgtttgatctgctgctgaaattggccaataccgctatcgacagcgacaaagtggcggaaaaaattgccgacgaagcgcgcgatgatacgccgcaggcgctggatgctgtctgggaagaagagcaggttaaattctttgctgacaaaggctgcggtgattcagcaatcactgctcatcagcgtcgctttgccggtgccgtcgcgccgcaatatctgaatatcaccaccggaggacagcactaa

SEQ ID NO: 458953 - DNA, 1539 bp, Shigella boydii
atgaaaattcgttcacaagtcggcatggtgctgaatctcgataagtgcatcggctgccacacctgttcagttacctgtaaaaacgtctggaccagccgtgaaggcgtggagtacgcgtggttcaacaacgtggaaaccaagccgggtcagggcttcccgactgactgggaaaaccaggaaaaatacaaaggcggctggatccgtaaaatcaacggcaaactgcagccgcgcatgggtaaccgtgccatgttgctgggtaaaatcttcgctaacccgcatctgccggggatcgacgattattacgagccgttcgattttgactatcagaacctgcataccgcgccggaaggcagcaaatcgcagccgattgcccgtccccgttcgctgattaccggggaacggatggcgaaaatcgaaaaagggccgaactgggaagatgacctgggtggtgagtttgacaaactggcgaaagacaagaacttcgacaacatccagaaggcgatgtatagccagttcgaaaacacctttatgatgtatttgccgcgcctgtgcgaacactgcctgaacccggcatgtgtggcgacctgcccgagcggtgcgatttacaagcgtgaagaagatggcatcgtcctgatcgaccaggataaatgccgtggctggcgtatgtgcatcaccggatgcccgtacaaaaaaatctacttcaactggaagagcggtaagtctgagaagtgcatcttctgctatccgcgtattgaagcgggtcagccgaccgtgtgctcagaaacctgtgtcggtcgtatccgttatcttggcgtgctgctgtacgatgccgacgcgattgaacgtgcagccagcaccgagaacgagaaagatctttaccagcgtcagctggaggtgttcctcgatccgaacgatccgaaagtcatcgagcaggcgattaaagacggtattccgctgagcgttattgaagccgcacagcagtcgccggtttataaaatggcaatggaatggaaactggcgctgccgctgcatccagaatatcgcacactgccgatggtctggtacgtgccgcctctgtctccgattcagtctgcagtagacgcgggtgagctgggtagcaacggcattctgccagacgtcgaaagcttgcgtattccggtacagtatctggcgaatctgctgaccgccggtgataccaaaccggtactgcgcgcactgaaacgtatgctggcgatgcgtcattacaaacgtgctgaaaccgttgacggtaaagttgatacccgtgcgctggaagaggtcggtctgaccgaagcccaggcacaggagatgtaccgttatctggcgattgctaactacgaagatcgctttgtggtgccgagtagtcatcgtgaactggcacgggaagccttcccggagaaaaatggctgcggctttacctttggtgatggctgccacggctcagataccaaattcaatctgttcaacagccgtcgtatcgatgccatcgatgtgaccagcaaaacggagccgcatccatga

SEQ ID NO: 458954 - DNA, 3723 bp, Shigella boydii
atgagtaaattcctggaccggtttcgctacttcaaacagaagggtgaaacctttgccgatgggcatggccagcttctcaataccaaccgtgactgggaggatggatatcgccagcgttggcagcatgacaaaatcgtccgctctacccacggggtaaactgcaccggctcctgcagctggaaaatctacgtcaaaaacggtctggtcacctgggaaacccagcagactgactatccgcgtacccgtccggatctgccaaaccatgaacctcgcggctgcccgcgcggtgccagctactcctggtatctttacagtgccaaccgcctgaaatacccgatgatgcgcaaacgcctgatgaaaatgtggcgtgaagcgaaggcgctgcatagcgatccggttgaggcatgggcttctatcattgaagacgccgataaagcgaaaagctttaagcaggcgcgtggacgcggtggatttgttcgttcttcctggcaggaggtgaacgaactgatcgccgcatctaacgtttacaccatcaaaaactacggcccggaccgtgttgctggtttctcgccaattccggcaatgtcgatggtttcttacgcatcgggtgcacgctatctctcgctgattggcggtacttgcttaagcttctacgactggtactgcgacctgcctcctgcgtctccgcaaacctggggcgagcaaactgacgtaccggaatctgctgactggtataactccagctacatcatcgcctggggttcaaacgtgccgcagacgcgtaccccggatgctcacttctttactgaagtgcgttacaaaggcaccaaaactgttgccgtcacaccagactacgctgaaatcgccaaactgtgcgatctgtggctggcaccgaaacagggcaccgatgcggcaatggcgctggcgatgggccacgtaatgctgcgtgaattccacctcgacaacccaagccagtatttcaccgactatgtgcgtcgctacaccgacatgccgatgctggtgatgctggaagaacgcgacggttactacgctgcaggtcgtatgctgcgcgctgctgatctggttgatgcgctgggccaggaaaacaatccggaatggaaaactgtcgcctttaataccaatggcgaaatggttgcgccgaacggttctattggcttccgctggggcgagaagggcaaatggaatcttgagcagcgcgacggcaaaactggcgaagaaaccgagctgcaactgagcctgctgggtagccaagatgagatcgctgaggtaggcttcccgtactttggtggcgacggcacggaacacttcaacaaagtggaactggaaaacgtgctgctgcacaaactgccggtgaaacgcctgcaactggctgatggcagcaccgccctggtgaccaccgtttatgatctgacgctggcaaactacggtctggaacgtggcctgaacgacgttaactgtgcaaccagctatgacgatgtgaaagcttataccccggcctgggccgagcagattaccggcgtttctcgcagccagattattcgcatcgcccgtgaatttgccgataacgctgataaaacgcacggtcgttcgatgattatcgttggtgcggggctgaaccactggtatcacctcgatatgaactatcgtggtctgatcaacatgctgattttctgcggctgtgtcggtcagagcgggggcggctgggcgcactatgtaggtcaggaaaaactgcgtccgcaaaccggctggcagccgctggcgtttgcccttgactggcagcgtccggcgcgtcacatgaacagcacttcttatttctataaccactccagccagtggcgttatgaaaccgtcacggcggaagagttgctgtcaccgatggcggacaaatcccgctataccggacacttgatcgactttaacgtccgtgcggaacgcatgggctggctgccgtctgcaccgcagttaggcactaacccgctgactatcgctggcgaagcggaaaaagccgggatgaatccggtggactatacggtgaaatccctgaaagagggttccatccgttttgcggcagaacaaccagaaaacggtaaaaaccacccgcgcaacctgttcatctggcgttctaacctgctcggttcttccggtaaaggtcatgagtttatgctcaagtacctgctggggacggagcacggtatccagggtaaagatctggggcaacagggcggcgtgaagccggaagaagtggactggcaggacaatggtctggaaggcaagctggatctggtggttacgctggacttccgtctgtcgagcacctgtctctattccgacatcattttgccgacggcgacctggtacgaaaaagacgacatgaatacttcggatatgcatccgtttattcacccgctgtctgcggcggtcgatccggcctgggaagcgaaaagcgactgggaaatctacaaagccatcgcgaagaaattctccgaagtgtgcgtcggccatctgggtaaagaaaccgacatcgtcacgctgcctatccagcatgactctgccgctgaactggcgcagccgctggatgtgaaagactggaaaaaaggcgagtgcgacctgatcccaggtaaaaccgcgccacacattatggtcgtagagcgcgcttatccggcgacttacgaacgctttacctctatcggcccgctgatggagaaaatcggtaatggcggtaaagggattgcctggaacacccagagcgagatggatctgctgcgtaagctcaactacaccaaagcggaaggtccggcgaaaggccagccgatactgaacaccgcaattgatgcggcagagatgatcctgacactggcaccggaaaccaacggtcaggtagccgtgaaagcctgggctgccctgagcgaatttaccggtcgtgaccatacgcatctggcgctgaataaagaagacgagaagatccgcttccgcgatattcaggcacagccgcgcaaaattatctccagcccgacctggtctggtctggaagatgaacacgtttcttacaacgccggttacaccaacgttcacgagctgatcccatggcgtacgctctctggtcgtcagcaactgtatcaggatcaccagtggatgcgtgatttcggtgaaagcctgctggtttatcgtccgccgatcgacacccgttcggtgaaagaagtgataggccagaaatccaacggcaacccggaaaaagcgctcaacttcctgacgccgcaccagaagtgggggatccactccacctacagcgacaaccagttgatgctgaccttaggtcgcggtggcccggtggtctggctgagcgaagccgatgccaaagagctgggcattgccgataacgactggattgaagtttacaacagcaacggtgcgctgactgcccgtgcggttgtcagccagcgtgttccggcagggatgaccatgatgtaccacgcgcaggaacgtatcgttaacctgccgggttcggaaattactggccagcgtggggggatccacaactcggtcacccgtatcacgccgaaaccgacgcatatgattggtggctatgcccatctggcatacggctttaactactacggcaccgtaggttctaaccgcgatgagtttgttgtagtgcgtaagatgaagaacattgactggttagatggcgaaggcaatgactag

SEQ ID NO: 458955 - DNA, 1392 bp, Shigella boydii
atgagtcactcatccgcccccgaaagggctactggagctgtcattacagattggcgaccggaagatcctgcgttctggcaacaacgcggtcaacgtattgccagccgtaacctgtggatttccgttccctgtctgctgctggcgttttgcgtatggatgttgttcagcgctgttgcggtgaacttaccgaaagtcggttttaattttacgaccgatcagctatttatgttgactgcgctgccttcggtttctggcgcgttattacgtgttccatactcctttatggttcctatcttcggtggtcgtcgctggacggcgttcagcaccggtattctgattattccttgcgtctggctgggttttgccgtgcaggatacctccacgccttatagcgtcttcatcatcatctctctgctatgcggctttgctggcgcgaacttcgcatccagtatggcaaacatcagcttcttctttccgaaacagaagcagggtggcgcgctgggtctgaatggtggtctgggaaacatgggcgtcagcgtcatgcagttggttgctccgctggtggtatcactgtcgattttcgcagtatttggtagccagggcgtcaaacagccggatgggactgagctgtatctggcgaatgcgtcctggatatgggtgccgttccttgccatcttcaccattgcggcgtggtttggcatgaacgatcttgctacctcgaaagcctccatcaaggagcagttgccggtactcaaacggggtcatctgtggattatgagcctgctgtatctggcaaccttcggctccttcatcggcttctccgcgggctttgcaatgctgtcaaaaacgcagttcccggatgttcagattctgcaatacgctttcttcgggccgtttattggtgcgctggcgcgttctgcaggtggtgcattatctgaccgtctgggcggaactcgtgtcacgctggtgaactttattctgatggcgattttcagcggcctgctgttcctgaccttaccgactgacgggcagggcggaagcttcatggcgttcttcgcggtcttcctggcgctgttcctgacagctgggctgggtagtggttccactttccagatgatttcagtgatcttccgtaaactgacaatggatcgcgtgaaagcagaagggggttctgacgaacgtgcgatgcgtgaagcggcaaccgacacggcggcggcgctgggtttcatctctgcgattggcgcgattggtggcttctttatcccgaaagcgtttggtagctcgctggcattaacgggttcgccagtcggcgcaatgaaggtatttttgattttctatatcgcctgcgtagtgattacctgggcggtatatggtcggcattctaaaaaataa

SEQ ID NO: 458956 - DNA, 219 bp, Shigella boydii
atgagcaataaccttaatgaatgtgatgatacattctggaatggcagtattctcggctattggctgaagtatacccatacccggaaagagttactccttatttgccgtgtggttagtcgctttacatcggtaagggtagggattttacagcaccgtgaaaaatctcataatttttatgaaatcactgtactcactatgggtaatgataaatatcaatga

SEQ ID NO: 458957 - DNA, 1797 bp, Shigella boydii
atgcttaaacgttgtctctctccgctcaccctggttaatcaggttgcgcttattgtgttgctttctactgctattggactggcagggatggcggtttctggctggctggtgcaaggcgttcagggcagcgcccatgcgatcaacaaagcgggatcgctgcgcatgcaaagttaccgtctgttggcggcagtgccattaagtgagaaagacaagcccttaattaaagagatggaacaaacggcatttagcgccgagttaactcgagcagcagaacgagacgaacaactggcgcaattacagggtttacaagattactggcgtaatgaactgatccctgcactgatgcgtgcacaaaaccgcgaaacggtgtcagcggatgtcagccagtttgttgccgggcttgatcagctggtatctggttttgaccgcaccacggaaatgcgcattgagacagtggtactggtccatcgggtaatggcggtatttatggcacttttactggtgttcactattatctggttgcgggcgcgactgctacaaccgtggcggcaactgctggcaatggcgagtgccgtcagtcatcgcgattttacccaacgcgcgaacatcagcgggcgcaacgaaatggcgatgcttggaactgcattgaacaatatgtctgcagaactggccgaaagttatgccgtacttgagcagcgggttcaggagaaaaccgccgggctggagcataaaaatcagatcctctcttttttatggcaggctaaccgccgtttgcattcccgcgccccgctgtgtgaacgcctgtcacctgtactcaacggcttacagaatttaaccctgctacgtgatatcgaactgcgggtgtatgacactgatgatgaagagaatcatcaggagtttacctgccagccagatatgacttgtgatgataaaggctgccagctctgcccgcgcggcgtattacccgttggtgatcgcggcacaaccctgaagtggcgactggctgactctcatacgcagtacggtattttgctggcgaccctgccgcaggggcgtcatcttagccatgatcaacaacaactggtggataccctggttgaacaactcaccgccacgctggcgctggatcgccatcaggaacgtcagcaacagttgatcgtgatggaagagcgtgccaccattgcgcgcgaactgcatgattctattgcccaatctctctcttgcatgaagatgcaggtgagttgtttacagatgcagggcgatgcgctgccagcaagcagccgcgaactgttaagtcagatccgtaacgaactgaatgcatcctgggcgcagttgcgtgaattgctcaccacattccgcttgcagctcaccgagcctggattacgtccggcgctggaggcgagttgcgaagagtacagcgccaaatttggcttcccggtgaagctggattatcaattgccgcctcgtctggtgccttcacatcaggcaatccacttgttgcaaattgcccgtgaggcattaagtaacgccctcaaacattcgcaagcgagtgaggtcgtggtgacggtggcgcaaaacgataatcaggtcaaactgaccgtccaagataacggctgcggcgtgcctgaaaatgccatccgcagcaatcactacggcatgataataatgcgcgaccgtgcgcaaagtttacgaggcgattgccgcgtccgccgtcgtgaatcaggtggcaccgaagtggtggtcacctttattcccgaaaaaactttcacagacgtccaaggagatacccatgagtaa

SEQ ID NO: 458958 - DNA, 651 bp, Shigella boydii
atgagtaatcaggaaccggctactatcctgctgatcgacgatcacccgatgctgcgaactggcgtaaaacagcttatcagtatggcaccagatatcaccgtggttggcgaagcgagtaatggcgaacagggtattgaactggcggagtctcttgatcccgatctgatcctgttagatctcaatatgcccggcatgaacggtctggaaacgctggataaactgcgcgaaaagtccctctcagggcgcattgtggtattcagcgtctctaaccatgaagaagatgtggtcaccgcactgaaacgcggcgcggatggttatctgttaaaagatatggaaccggaagatctgctgaaagcattgcatcaggcagctgctggcgaaatggtattaagcgaagcattaacgcctgttctggccgccagcttgcgcgctaaccgtaccactactgagcgcgatgttaaccagttaaccccacgcgagcgcgatattctcaagctgattgcccagggtttgccgaacaagatgattgcccgccgcctggatatcaccgaaagcacagtaaaagtgcacgtcaagcacatgctgaagaaaatgaaactcaagtctcgcgtggaagcagcggtatgggtgcatcaggagcgcattttctga

SEQ ID NO: 458959 - DNA, 1395 bp, Shigella boydii
ttgagccgtttcgttcctcgcattatcccgttttatttactcttgcttgtagcaggcggtacagctaacgcacaatctaccttcgagcaaaaagcggcaaatccctttgataataacaatgatggtctgccggatttaggcatggctcccgaaaatcatgatggggaaaaacactttgctgaaattgtgaaagatttcggcgaaaccagtatgaatgataacgggctggatactggcgagcaggcaaaagctttcgcattgggaaaagtccgcgacgcgcttagtcaacaggttaatcagcacgtagagtcctggctatcaccgtggggaaatgccagtgttgacgtcaaagtggataacgaaggacatttcaccggcagtcgtggaagctggtttgtgccgttacaagataatgatcgttatctcacctggagccagcttggtcttactcagcaggataatgggttggtgagcaatgtgggcgttgggcaacgctgggcgcgcggcaactggctggtgggttataacactttttatgacaacttgctggacgaaaatcttcagcgagcgggctttggtgccgaagcgtggggcgaatatttgcgattattggcaaacttttatcagccgtttgctgcatggcatgaacagacagccacgcaggaacaacggatggcgcgcgggtacgacctgacagctcggatgcgcatgccgttctatcaacacctcaataccagtgtcagcctagaacagtattttggtgatcgtgttgatttgtttaactctggtacgggttatcacaatcccgtcgcgttgagtctgggattaaattacacccctgtgccattagtcactgtgacggcccagcataaacagggtgaaagtggcgagaatcaaaataacctcgggctgaatcttaattaccgctttggtgtaccgctcaaaaaacaactttctgcgggcgaggttgccgaaagtcagtcgttacgtggtagtcgctatgacaatccgcagcgaaataatctaccgactcttgagtaccgacagcgaaaaacgttaacggtgtttctggcgacaccgccgtgggatctaaaacctggcgaaacagtgccgctgaaattacaaatccgcagtcgttacggtattcggcaactgatttggcagggcgatacgcagatattaagtttgacgccgggcgcacaagccaacagcgcggagggctggacgctgatcatgcctgactggcagaacggggaaggggcaagcaatcactggcgattgtcggtggtggtggaagataaccaggggcagcgtgtctcctccaatgagatcacgctaacgcttgtcgaaccgttcgatgcattgtcaaacgacgaactgcgctgggaaccgtaa

SEQ ID NO: 458960 - DNA, 354 bp, Shigella boydii
atgcaaaaaatcgtgatcgttgccaatggcgcaccttacgggagcgaatccttgtttaacagcttgcggctggccattgcgttacgagagcaggagagcaatctggatctgcgtctgttcctcatgtctgatgcggtcacagccgggttgcgcgggcaaaaaccaggggaaggctacaacattcagcaaatgctggagatccttaccgctcagaatgtaccggtgaaattgtgcaaaacctgtaccgacgggcgcgggattagtacacttcctctgattgatggggtggaaatcggtactcttgtggaactggcgcaatggacgctgtcagccgataaagtgctcacattttaa

SEQ ID NO: 458961 - DNA, 717 bp, Shigella boydii
atgcagtggcggaggtgtaaggtgataacgcgtgatttcttgatgaatgccgattgtaaaacggcatttggtgccattgaagaatcactcttatggtcagcagagcaacgagcggcttcgctggcggcgacgctggcttgtcgacctgatgagggaccggtgtggatcttcggttatggatcgttgatgtggaatccggcactggagtttaccgagtcgtgcaccggtacactggttggatggcatcgcgcgttttgcctgcgcctgaccgccgggcgcgggactgcgcaccagccgggacggatgcttgcactgaaagagggcggacgcactacaggcgtcgcctatcgactgccagaagagacgctggagcaggaactaaccctgttgtggaagcgcgagatgattaccggctgttatctgccaacctggtgtcagcttgatcttgatgatggatgcacagtaaacgccattgtgtttattatggacccgcgacatccagaatatgaatctgacactcgcgctcaggtcatcgcgccgttgattgcggcggcgagcggtccgctgggaaccaacgcacaatacctgttttcactggaacaggagcttatcaaactgggaatgcaggacgatgggctgaatgatttgctggtatcggtaaaaaaactgctggcggagaattatccggatggtgtgttacggccgggattcgcctga

SEQ ID NO: 458962 - DNA, 231 bp, Shigella boydii
atgccgtataaaacgaaaagcgatctgccggaaagcgtaaagcacgttctaccgtctcatgcccaggatatctataaagaagcgttcaacagcgcatgggatcaatataaagataaagacgatcggcgtgatgacgccagccgcgaagaaaccgcgcataaagtggcctgggctgctgtgaagcatgaatatgccaaaggggatgatgataaatggcataaaaaatcgtaa

SEQ ID NO: 458963 - DNA, 1101 bp, Shigella boydii
atgtcaaatgctcaagaggcggtaaaaacccgccacaaggagacttcgcttattttcccggttctggcgctggtagtgctgttcctgtggggaagcagccagacactaccagtggtcattgccatcaatcttcttgcgcttattggtattttaagtagcgcctttagtgttgtccgtcatgcggacgtattagcccatcgcctgggagaaccttacggttcgcttattcttagcctttcagtggttattcttgaagtcagtttgatttcagctttaatggcaaccggcgacgccgcgccaacgctaatgcgtgatacgctctattcaatcattatgattgttaccggtgggctggttggcttttcattattgttgggcggtcgtaagtttgccacccaatatatgaatctgtttggtatcaagcagtatttaattgcgctgttccccctggcgataatcgtactggtatttccaatggctctgcctgcggcgaatttttcaaccggtcaggcgttactggtagcattaatttctgcggcaatgtatggcgtatttttgctgatccagaccaaaacgcatcaaagtttgtttgtctacgagcacgaagatgacagtgatgacgacgacccgcatcacggtaaaccgtctgcccatagcagcgtgtggcatgctatctggttgattatccatctgattgccgttattgcagtcaccaaaatgaatgccagcccgctggagacattgctcgacagcatgaatgcccctgtcgcctttactggcttcctggtggctctgttgattctgtcgccggaaggtttaggtgcgttaaaagcagtgttgaacaaccaggtccagcgcgcgatgaatctgttctttggttcagtgttagcaaccatttcgcttaccgtacctgtcgtcacgctaattgcctttatgacgggtaacgaattacagtttgcacttggtgcgccagaaatggtggtgatggtggcctctttagtgctgtgccatatctccttctccaccggacgtactaacgtgctcaatggcgcagcgcatctggcactgtttgccgcctatttgatgacgatatttgcctga

SEQ ID NO: 458964 - DNA, 357 bp, Shigella boydii
atggttacactttacggcatcaaaaattgtgacaccattaaaaaggctcgccgttggctggaagccaataacatcgactatcgttttcatgattaccgcgtcgatgggctggacagcgaattattgaacggttttatcaacgaattaggctgggaagcgttactgaacacccgtggtacaacctggcgtaaactggacgaaaccacccgcaataaaatcaccgatgcggcctctgcggcggcattaatgactgaaatgccttcaattatcaaacgtccattgctctgcgcgcctggtaagcctatgctgctgggtttcagtgattccagttatcagcaatttttccatgaggtgtag

SEQ ID NO: 458965 - DNA, 1128 bp, Shigella boydii
atgtcgtgcccggttattgagctgacacaacagcttattcgccgcccttccctgagtcctgatgacgcaggatgccaggctttgttgattgaacgtttgcaggcgatcggttttaccgttgaacgcatggactttgccgatacgcagaatttttgggcatggcgtgggcaaggtgaaacgttagcctttgccgggcataccgacgtggtgccgcctggcgacgccgatcgttggatcaatccgccgtttgaacccaccattcgtgatggcatgttattcgggcgcggtgcggcagatatgaaaggctcgctggcggcgatggtggtagcggcagaacgctttgtcgcacaacatcccaaccatacggggcgactggcatttctgatcacctctgatgaagaagccagtgcccacaacggtacggtaaaagtcgtcgaagcgttgatggcacgtaatgagcgtctcgattactgcctggtcggcgaaccgtcgagtatcgaagtggttggtgatgtggtgaaaaatggtcgtcgcggatcgttaacctgcaaccttaccattcatggcgttcaggggcatgtggcctacccgcatctggctgacaatccagtacatcgcgcagcacctttccttaatgaattagtggctattgagtgggatcagggcaatgaatttttcccggcgaccagtatgcagattgctaatattcaggcgggaacgggcagtaacaatgttattccgggtgaactgtttgtgcagtttaacttccgcttcagcaccgaactgactgatgagatgatcaaagcgcaggtgcttgccctgcttgaaaaacatcaactgcgctatacggtggattggtggctttccgggcagccatttttgaccgcgcgcggtaaactggtggatgcggtcgttaacgcggttgagcactataatgaaattaaaccgcagctactgaccacaggcggaacgtccgacgggcgctttattgctcgcatgggggcgcaggtggtggaactcgggccggtcaatgccactattcataaaattaatgaatgtgtgaacactgccgacctgcagctacttgcccgtatgtatcaacgtatcatggaacagctcgtcgcctga

SEQ ID NO: 458966 - DNA, 201 bp, Shigella boydii
atggactggctggctaaatattggtggattctggtgattgtctttttggtaggcgtcctgctgaacgtgattaaagatctcaagcgcgtcgaccacaagaaatttctcgccaacaagccggagcttcccccgcatcgtgatttcaacgataagtgggacgatgacgacgactggccgaaaaaggatcaaccgaagaagtaa

SEQ ID NO: 458967 - DNA, 699 bp, Shigella boydii
atgaaacatgaccattttgttgttcaaagcccggataaacctgtgcaacagttgttactgcttttccatggtgtcggggataactcggtggcaatgggggaaataggcagttggtttgcaccgctgtttcctgatgcgctggtggtgagtgtcggtggcgcggagccgagcggtaatccggcggggcgtcagtggttttcggtgcagggtattacggaagataatcgccaggcgcgtgtggatgccatcatgccgacgtttattgaaacggtacgctactggcagaaacagagtggagtaggggctaacgccacggcgttaatcggtttctctcaaggcgcgattatggcgctggagagtattaaagccgaaccgggccttgcttcacgcgtcattgcttttaacggacgctatgcgagcctgccggaaaccgcgtctacagcaacgacaattcacctgattcatggcggtgaagatccggttatcgatctggcgcatgcggttgcggcgcaggaagcgttaatcagtgccggtggtgacgtgacgctggatatcgtggaggatttaggccatgcgatcgacaatcgcagtatgcaatttgccctggatcacttgcgttataccattccgaaacattatttcgacgaagcgctaagtggcggtaagcctggcgatgatgatgtgattgaaatgatgtaa

SEQ ID NO: 458968 - DNA, 2016 bp, Shigella boydii
atggctgaactgactgcgctttacacattaacaacgcaaatgaaacgtgaagggatccgccgcttgctggtgttgagcggggaagagggttggtgttttgatcatgcgcttaagttgcgtgatgccttacttggcgactggctgtggatttcgccgcagccagatgctgaaaaccactgttctccctcggtgctacaaactttacttgggcgcgagttccggcatgcggtattcgacgcccgccacggctttgatgccgctgcctttgcggcacttagcggaacgttgaaagcgggaagctggctggttttgttactccctgtatgggaagagtgggaaaaccaacctgatgccgactcgctgcgctggagtgattgccctgaccctattgcgacgccgcattttgtccagcatctcaaacgcgtacttacggcggataacgacgctattctctggcggcaaaaccagccgttctcgttggcgcattttactccccgtactgactggcaccccgcgaccggcgcaccacaaccagaacaacagcaactcttacagcagctactgaccatgctgccgggcgtggcagcggtaacggctgcgcgtgggcgcggtaagtcggcgctggcagggcaactcatttctcgtattgcgggcagtgcgattgtcaccgcgcccgcaaaagcggcaacggatgtactggcacaatttgcgggcgagaagtttcgctttattgcgccggatgccttgttagccagcgatgagcaagccgactggctggtggtcgatgaagccgcagccatacctgcgccgttgttgcatcaactggtatcgcgttttcctcgaacgttgttaaccactacggtgcagggctacgaaggcaccggacgtggttttttgctgaaattttgcgctcgctttccgcatttacaccgttttgaactgcaacagccgatccgctgggcacagggatgcccgctggaaaaaatggttagtgaggcactggtttttgacgatgaaaacttcacccatacaccacaaggcaatatcgtcatttccgcatttgaacaaacgttatggcgaagcgagccagaaacgccgttaaaggtttatcagttattgtctggtgcgcactaccggacttcgccgctggatttacgccggatgatggatgcaccagggcaatattttttacaggcggctggcgaaaacgagattgccggagcgctgtggctggtggatgaggggggattatctcaacaactcagtcaggcggtatgggcaggttttcgtcgcccgcggggtaatctggtggcccagtcgctggcggcgcacggtagcaatccactggcagcgacattgcgtggacggcgggtcagccggatagcagttcatccggctcgtcagcgcgaaggcgttgggcaacagctcattgccagcgctttgcaatatacgcaagacctcgactatctttcggtgagttttggttacaccggggagttatggcgtttctggcaacgctgcggttttgtgctggtacgaatgggtaatcatcgtgaagccagcagtggttgctatacggcgatggcgctgttaccgatgagtgatgcgggtaaacagctggctgaacgtgagcattaccgtttacgtcgcgatgcgcaagctctcgcgcagtggaatggcgaaacacttcctgttgatccactaaacgatatcgtgctttctgacgacgactggcttgaactggccggttttgcttttgctcatcgtccgctattaacgtcgttaggttgcttattgcgtctgctacaaaccagtgaactggcattaccggcgctgcgtgggcgtttacagaaaaatgccagtgatgcgcagttatgtaccacacttaaacttgcaggccgcaagatgttactggtccgtcagcgggaagaggccgcgcatgcgctgttcgcacttaatgatgttcgcactgagcgtctgcgcgatcgcataacgcaatggcaattttttcactga

SEQ ID NO: 458969 - DNA, 864 bp, Shigella boydii
atgcgttggcaagggcgacgtgaaagtgacaatgttgaagacaggcgcaacagctccggtggtccgtctatgggcggtcccggttttcgcctgccaagcggtaaaggcgggctgattttactgatagtcgtgctggttgcaggctactatggtgttgatttaaccgggttaatgactggacagccggtttcccaacaacaatcaacgcggtccattagccctaatgaagacgaagctgcaaaattcacctcggtgattctggcaaccacggaagacacctggggacaacagttcgagaagatgggtaagacctatcagcaaccgaagctggtcatgtaccgtggaatgacgcgcaccggctgcggggcgggccagtccattatggggccgttctattgcccggcggatggcacagtttatatcgatctctccttctatgatgacatgaaagacaaacttggcgcggatggcgattttgcccaggggtacgttatcgcccatgaagtcggtcatcatgtgcagaaactgttaggcatcgagccgaaagttcgtcaactgcaacaaaacgcgacgcaggcggaagtgaaccgcttatctgtgcgtatggaactccaggccgactgttttgccggtgtctgggggcataacatgcagcagcaaggtgttctggaaaccggcgatctggaagaggcgctgaatgcggcgcaggccatcggcgatgaccgtttacaacagcaaagtcaggggcgagtagtaccagacagtttcacacatggcacttctcagcaacgctacagctggtttaaacgtggtttcgacagcggcgatccggcacaatgcaatacttttggtaaaagcatttaa

SEQ ID NO: 458970 - DNA, 714 bp, Shigella boydii
atgcaaaagcaagctgagttgtatcgtggtaaagcgaaaaccgtatacagcacggaaaacccggacctgttggtgctcgaattccgcaatgatacgtcagcaggggatggcgcgcgcattgagcagtttgatcgcaaaggtatggtgaacaacaagttcaactacttcattatgagcaaactggctgaagcgggtatcccgactcaaatggagcgtctgctctccgataccgaatgtctggtgaaaaagctggatatggtgccggttgagtgtgtcgtgcgtaaccgtgctgcaggctctctggtgaaacgtcttggaatcgaagaaggtattgagctgaacccgccgctgttcgatctgttcctgaaaaacgatgccatgcacgatccgatggtcaacgaatcttactgcgaaacctttggctgggtgagcaaagagaacctggcgcgtatgaaagagctgacctacaaagcgaacgacgtgctgaaaaaactgttcgatgatgctggtctgattctggtcgacttcaagctggagtttggtctgtacaaaggtgaagtggtactgggcgatgagttctccccggacggcagccgcctgtgggacaaagaaacactggagaaaatggacaaagaccgtttccgccagagcctcggtggcctgatcgaagcctatgaagccgtcgcccgccgcctgggtgtacagctggactga

SEQ ID NO: 458971 - DNA, 231 bp, Shigella boydii
atgcggcaagaacgccttatccgacctacgtccgacaaacaaatttcgtgcgaattaccgctaaaattgcatttttctgccgacgcacacgtttgcgtatcatatcagaaaaaagggccggatgactccagccctgtatttttacttgctaaacgcagcctggaagacagctaccagcgcgtcgttctgactctgagtcagagtatgacctttcggatcgatgaactgtag

SEQ ID NO: 458972 - DNA, 1035 bp, Shigella boydii
atggcttactctgttcaaaagtcgcgcctggcaaaggttgcgggtgtttcgcttattttattactcgctgcctgtagttctgactcacgctataagcgtcaggtcagtggtgatgaagcctacctggaagcggcaccgcttgcggagcttcatgccccggctggaatgattttgccggtgacctccggtgattatgcaatcccggtgaccaacggtagtggtgctgtcggtaaggcgctggacattcgtccaccagcccagccgctggcactggtttctggcgtgcgtacccagttcacgggcgataccgcttcattgctggtggaaaatggtcgtggcaatactctgtggccgcaggtggtttgcgtgctgcaggcgaaaaactacaccatcacccaacgtgatgatgctggtcagacactgaccatcgattgggtacaatggaaccgtctggacgaagacgagcagtatcgtggtcgttatcaaatctctgttaagccgcagggttatcagcaggcggttacggttaaactgctgaacctggaacaggcgggcaaaccggttgcagacgcggcttccatgcagcgttacagcacggagatgatgaacgttatttccgccggtctggataaatctgcctctgacgccgcgaacgctgcgcaaaatcgtgcctccaccactatggacgtacaaagtgcagctgatgacaccggtttaccgatgctggtcgtacgcgggccgttcaatgtggtttggcaacgtctgccagcggcgctggaaaaagtgggcatgaaagtgaccgacagcacccgttcgcagggtaacatggccgtaacttataagccgctgtctgacagcgactggcaggaactgggcgcgagcgatccaggcctggcatccggtgactataaactgcaggttggcgatttagataaccgcagcagcctacagttcatcgatccgaaaggtcatactctgactcagagtcagaacgacgcgctggtagctgtcttccaggctgcgtttagcaagtaa

SEQ ID NO: 458973 - DNA, 879 bp, Shigella boydii
atgttcacgggaagtattgtcgcgattgttactccgatggatgaaaaaggtaatgtctgtcgggctagcttgaaaaaactgattgattatcatgtcgccagcggtacttcggcgatcgtttctgttggcaccactggcgagtccgctaccttaaatcatgacgaacatgctgatgtggtgatgatgacgctggagctggctgacgggcgcattccggtgattgccgggaccggtgctaacgctactgcggaagccattagcctgacgcagcgcttcaatgacagcggtatcgtcggctgcctgacggtaaccccttactacaatcgtccgtcgcaagaaggtttgtatcagcatttcaaagccatcgctgaacatactgacctgccgcaaattctgtataatgtgccgtcccgtactggctgcgatctgctcccggaaacggtgggccgtctggcgaaagtaaaaaatattatcggaatcaaagaggcaacagggaacttaacgcgtgtaaaccagatcaaagagctggtttcagatgattttgttctgctgagcggcgatgatgcgagcgcgctggacttcatgcaattaggcggtcatggggttatttccgttacggctaacgtcgcagcgcgtgatatggcccagatgtgcaaactggcagcagaagggcattttgccgaggcacgcgttattaatcagcgtctgatgccattacacaacaaactatttgtcgaacccaatccaatcccggtgaaatgggcatgtaaggaactggatcttgtggcgaccgatacgctgcgcctgccaatgacaccaatcaccgacagtggtcgtgagacggtcagagcggcgcttaagcatgccggtttgctgtaa

SEQ ID NO: 458974 - DNA, 573 bp, Shigella boydii
ttgacactgtcatcgcaacattatctggtgatcactgcgttgggtgccgatcgccctggaattgtgaacaccatcacccgtcatgtcagtagttgcggctgtaatattgaagacagtcgcctggctatgctgggagaagagttcacgtttatcatgctgctttccggttcatggaatgccattactctgattgaatcaacgttaccgttgaaaggtgccgaactggatcttttaatcgtgatgaagcgcacgacggcgcgtccgcgtccgccaatgccagcatctgtctgggttcaggtcgatgttgcagactccccgcatttaattgaacgcttcacagcacttttcgacgcgcatcatatgaacattgcggagctggtgtcgcgcacgcaacctgctgaaaatgaacgggctgcgcagttgcatattcagatcaccgcccacagccccgcatctgcggacgcagcaaatattgagcaagcgttcaaagccctatgtacagaactcaatgcacaaggcagtattaacgtcgtcaattattcccaacatgatgaacaggatggagttaagtaa

SEQ ID NO: 458975 - DNA, 471 bp, Shigella boydii
atgaatccactgaaagccggtgatatcgcaccgaaatttagcttgccggatcaagacggagaacaagttaatttgaccgacttccagggacagcgtgttctggtttatttctacccgaaagccatgacccccggctgtaccgtacaggcctgcggcttacgcgataacatggatgagttgaaaaaagcgggcgttgatgtgctgggtatcagcaccgataaacccgaaaaactctcccgttttgcggaaaaagagctgcttaactttacgctcctgtctgatgaggaccaccaggtgtgcgaacaattcggcgtctggggtgaaaagtccttcatgggcaaaacctacgatggtattcatcgcatcagcttcctgattgacgctgatggcaaaatcgaacatgtctttgacgattttaaaaccagcaatcaccacgacgttgtgctgaactggctgaaagaacacgcctga

SEQ ID NO: 458976 - DNA, 618 bp, Shigella boydii
atgaaccgctttgtggtggccgaaccactgtggtgtacaggatgtaatacctgtctcgctacctgttcggacgtgcataaaacgcaaggtttacagcaacacccgcgcctggccctggcgaagacgtcaacaatcactgcccctgtcgtgtgtcatcactgtgaggaagccccttgcctgcaggtctgcccggtcaatgccatctcccagagggatgatgcgatccaactcaacgaaagcctctgtattggctgcaagctttgcgccgtggtctgcccatttggcgcaatcagcgcttcaggaagccgtccggtgaatgcccctgcgcaatatgtttttcaggctgacggctcactcaaagatggcgaagaaaacgcgccgacccaacatgctttgctgcgctgggaaccgggtgtccagaccgtcgcggtgaaatgcgacctgtgtaatttcttgccagaaggtccggcctgcgttcgcgcttgcccgaatcaggcgttacggctgattaccgacgatagcctgcaacgtcagatgaaagaaaaacagcgccttgccgcaagctggtttgccaatggcggggaggatcccctttccctcactcaggagcaacactaa

SEQ ID NO: 458977 - DNA, 672 bp, Shigella boydii
atggatgccctgcaattattaacctggtcgctgatcctctttctgtttgccagtctggcttcgctgtttttactcggtctggacagactggctattaagctttccggcatcacatcgctggtgggcggcgtgattggcatcatcagcggaattacgcaattacatgctggtgtaactttagtcgcccgttttgccaccccttttgactttgccgatttaaccctgcgaatggatagcctctcggcatttatggtgctggttatctccttgctggtggtggtttgttcgctctattcattgacttatatgcgcgaatacgagggcaaaggcgcggcggcgatgggcttctttatgaatcttttcatcgcatcgatggttgccctgctggtgatggacaacgctttttggttcatcgtgctgtttgaaatgatgtcgctgtcttcctggtttctggtcattgccaggcaggataaaacgtcgatcaacgctggcatgctctacttttttatcgcccacgccggatcggtgctgattatgatcgccttcttgctgatggggcgcgaaagcggcagcctcgattttgccagtttcgcacgctttcactttctccggggctggcgtcggcggtgtttctgctggcctttttcggttttggcgcgaaagccgggatga

SEQ ID NO: 458978 - DNA, 726 bp, Shigella boydii
atgatgccgttgcacagctggttgccgcgcgctcaccctgccgcaccatcgcacgcttcggcgttgatgtctggcgtaatggtcaaaatcggtattttcggcatcctgaaagtagcgatggatctgctggcgcaaacgggtttgcctctgtggtggggcattctggtgatggcgatcggcgcaatctccgcgctcctgggcgtgctatatgcgctggcggaacaggatatcaaacggctgctggcctggagtaccgtcgaaaacgtcggcattattttgctggcagtcggtgtggcgatggacggtctgtcactgcacgacccgctgctcaccgtggttggactgctcggcgcactgtttcatctgctcaaccatgcgctgttcaaagggctgctatttctcggcgcgggcgcgattatttcgcgtttgcatacccacgacatggaaaaaatgggggcactggcgaaacggatgccgtggacagccgcagcatgcctgattggttgcctcgcgatatcagccattcctccgctgaatggttttatcagcgatatggtacacctggcagtcgctgttctcactaagtcgtgtggaagccgtagcgctacaacttgcgggtcctattgctatggtaatgctggcagtcactggtgggctggcagtaatgtgcttcgtcaaaatgtacggtattactttctgtggtgcgccgcgcagtacacacgctga

SEQ ID NO: 458979 - DNA, 687 bp, Shigella boydii
atgtgcttcgtcaaaatgtacggtattactttctgtggtgcgccgcgcagtacacacgctgaagaggcacaggaagtgccaaatacgatgatcgtcgccatgctactgctcgcggcactctgcgtattaattgcgcttagtgccagttggctggcaccgaagataatgcatattgcccatgcgtttaccaatacccctcccgtcactgtcgccagcggaatagcacttgtacccggcacgtttcatacacgggtcactccttcattactgttgctgttactactggcgatgcctttgctgccaggcctttactggctgtggtgtcgttcgcgccgcgcagcgtttcgtcgcacaggagatgcctgggcatgcggctacggctgggaaaacgcgatggctccgtcaggcaatggcgtgatgcagccgctgcgtgtggtcttctctgcgttatttcgtctacgacaacagctcgaccctacgctgaggctaaataaagatcttgcgcacgtcaccgccagggctcagagcacagaacccttctgggatgagcgggtgatccgccccatcgtgagcgccacccaacggctggccaaagaaatacagcatctgcaaagcggcgactttcgtctctattgcctgtatctagttgccgcactagttgtgctgctaatcgctattgccgtctaa

SEQ ID NO: 458980 - DNA, 945 bp, Shigella boydii
atgagacaaactctttgcgacgaatatctggtcatttttgcgttagcacaggccgtgattctgctgctaaccccgctttttacgggtatttcccagcagatacgcgcgcgtatgcactcccgccgcgggccggggatctggcaggattatcgcgagatccacaaactgtttaaacgccaggaagttgcgcctatatcttcaggtctgatgttccgcctgatgccgtgggtattaatcagcagcatgctggtgctggcgatggccctaccactttttattaccgtttccccttttgcgggcggcggcgatctgatcacccttatctatcttcttgccctgtttcgttttttctttgctctttccgggctggataccggaagcccgtttgcgggagtcggtgccagtcgcgagttgacgctcggcattctggtcgaacccatgctcattctctcactgctggtattggcgctgatagcaggttccacgcatatcgagatgatcagcaatacgctggcaacgggctggaactcgccgctaaccaccgtactggcattactggcctgtggttttgcctgcttcattgagatgggaaaaattccctttgatgttgctgaagcagaacaggaattacaggaaggcccgctgaccgaatattccggtgccgggctggcgctagcgaaatgggggctggggctgaaacaggtcgtgatggcagcactgtttgtggccctgtttctgccctttgggcgcgcgcaagaactttctctcgcctgcctgctgacttcacttgtcgttacgctgctcaaggttttgctgatttttgtactggcctcaatcgcagaaaacacgctggcacgcgggcgttttttactcattcaccatgtgacctggcttggcttcagccttgctgcgcttgcatgggtcttctggttaaccggtctgtaa

SEQ ID NO: 458981 - DNA, 369 bp, Shigella boydii
atgggggttttgttcgccgcactgaccacgctgtgcatgttgtcgctgatctccgcgttttatcaggccgataaagttgccgtcacgttgacgttggtcaacgtgggggatgtggcattgtttggcctggtcattgatcgcgtgagtacgctgattctgtttgtggtggtgtttctcggtttgctggtcacgctctactccacgggttatctgacggataaaaatcgcgaacacccgcataacggcacgaatcgttattacgcatttttgctggtgtttatcggcgcgatggcgggactggtactctcctcgacgctgctcggtcagttgttgttttttgaaattagggcggctgctcctgggcgttga

SEQ ID NO: 458982 - DNA, 582 bp, Shigella boydii
gtgggggaaatcggcccagctaccgatgcaagcgtggctaccggacgcaatggaagcgccaacaccgatcagcgcctatctccacgccgcatcgatggtgaaagtgggcggctggcactggagggcagcatcgcctacatcgtcaaccacgcgttcgctaaaagcctgtttttccttgtagcaggtgcgctgagttacagctgcggcacgcgcttgttgccgcgtctgcgtggcgtattgcacaccctgccgttgccaggcgtgggtttctgcgtggcagcgctggcgattaccggtgtgccgccgttcaacggcttcttcagtaaattcccgctgtttgccgccggttttgcgttgtcagtggagtactggatcctgctgcccgccatgattctgctgatgattgaatcggtcgccagtttcgcctggtttattcgctggtttggtcgcgttgtgcctggcaaaccgagcgaggccgtcgccgatgccgcaccgctgccagggtcaatgcgcctggtgttgattgtactgattgtgatgtcgctgatttccagcgtaatcgccgcgacctggttgcagtaa

SEQ ID NO: 458983 - DNA, 651 bp, Shigella boydii
atgatcggttctatgatcgtaaataatctggcgggactgatgatgctgacatcgctgtttgtgattagcgtcaaaagctatcgcctgtcatgcggattttacgcctgccagtcgctggtgctggtgtctattttcgccactctctcgtgcctgttcgccgcagagcaactgctgatctggtccgccagcgcctttatcaccaaagtgctgctggtaccgttaatcatgacttacgctgcacgaaatattccccagaacatcccggaaaaagcgttattcggtccggcaatgatggcactgctcgcggcgttaattgtcctgctttgcgcatttgtcgttcagcccgtgaagctaccgatggctaccgggctgaaaccggcgctggcggtagcgttaggtcattttctgcttggcctgctgtgcattgtcagccagcgcaatatcctgcggcaaatttttggttactgcctgatggaaaacggctcccatctggtgctggcgcttcttgcctggcgagcaccggaactggtggaaataggtatcgctaccgacgccatcttcgccgtcattgtgatggtgttactggcaagaaaaatatggcgtacccacggcacgctggacgtgaacaacttgaccgcgctgaagggataa

SEQ ID NO: 458984 - DNA, 1509 bp, Shigella boydii
atgttcgctttactcctgctcacgccgctgcttttttcgctgctctgttttgcctgccggaaacgggggctctctgcgacttgtacggtgactgtattacatagcttagggatcacactgctgctgattctggcactctgggtggtccaaactgccgctgatgcaggagaaatattcgctgcgggactgtggcttcatattgatggtctgggcggtttgttcctcgccattcttggtgtgattggctttctcaccggtgtttactcgattggctacatgcgtcatgaagtggcacacggcgagctttcacccgttacactgtgcgattactacggtttcttccatctgtttttgttcaccatgctgctggttgttaccagcaataacctgattgtgatgtgggcggcgatcgaagccaccaccttaagctcggcgtttctggtaggcatttacggtcagcgttcatcgctggaatcagcatggaagtacatcattatttgtactgttggtgtcgcttttggtctgttcggtaccgtgctggtatacgccaacgccgccagcgttatgccgcaggcagaaatggcgatattctggagcgagattcttaagcaatcgtccttgcttgacccaacattaatgctgttggcctttgtgtttgtgctaattggctttggtaccaaaaccgggctatttcccatgcacgcctggctgccggatgctcacagtgaagcgccgagtccggtcagcgccctgctctccgccgtattgctgaactgcgcgctgttggtgctgattcgctattacatcattatttgccaagccatcggcagcgatttccccaaccggttgttgctcatcttcggcatgttgtcggttgccgtggcggcatttttcattctggtacagcgggacattaagcgtctgctggcgtactccagcgtggagaacatggggctggtcgcggtggcgctaggcattggcgggccgctgggaatttttgccgcgctgctgcacaccttaaaccacagtctggcaaaaacgctgctgttctgcggttccggcaatgtactgctcaagtacggcacgcgcgatctcaacgtcgtctgtgggatgctcaaaatcatgccatttaccgccgtgctgtttggcggcggtgcgctggcgctggcagggatgccgcccttcaacatttttcttagcgaatttatgaccgttaccgcaggactggcacgtaatcacctgctgattatcgtcctgctgttattgctgttaacgctggtgctggcgggcttggtacggatggctgcgcgggtgttaatggcgaaaccgccgcaggccgttaaccggggtgatctcggctggttgaccacctcgccaatggtgattctgctggtcatgatgctggcgatgggaacgcatattccacaacctgtcatcaggatcctggcgggcgcttccactatagtcctctcagggacgcacgacctgcctgcacaacgtagcacctag

SEQ ID NO: 458985 - DNA, 1716 bp, Shigella boydii
gtgaacgttaattcatcgtcaaatcgtggcgaagcgattctcgccgccctgaaaacgcagttccccggcgcggtgctggatgaagagcgacaaacgcctgaacaggtcaccattacggtgaaaatcaatctgctgcctgacgttgtacattatctttattatcaacatgatggctggcttccagtcctgtttggcaacgacgagcggacacttaacggtcattacgcggtttattatgccctttcaatggaaggggccgaaaaatgctggatcgtggtgaaggcactggtcgatgccgacagtcgggagtttccgtcagtcacaccgcgcgtccctgccgcggtctggggcgagcgagaaattcgcgatatgtacgggctgattccggttggcctgccggatcagcgtcgcctggtgttgcccgatgactggccggaagatatgcatccgctgcgcaaagatgcgatggattatcgactgcgccctgaaccgacgacagattccgaaacgtatgcgtttatcaatgagggcaacagcgatgcgcgggtgatccctgtcggcccgctgcatatcacctccgatgaaccgggtcacttccgcttgtttgtggatggcgagcaaattgtcgatgctgattaccgcctgttttatgtccatcgcggcatggagaaactggcagaaacgcggatgggctacaacgaagtgaccttcttatcggaccgcgtgtgtgggatttgcggttttgcccacagtgtggcctataccaactcggttgaaaatgcactggggattgaggtgccgcaacgagcgcataccattcgctcgattctgctggaagtcgaacggctacacagtcatttgctcaaccttggcctctcctgccattttgttggttttgataccggctttatgcaatttttccgcgtgcgggaaaagtcgatgacgatggcggaattgctgaccgggtcgcgtaaaacctacggtctgaatctgattggtggtgttcgccgcgatattctcaaagagcaacgtctgcaaacgctgaaactggtgcgcgagatgcgcgccgacgtgtcggagctggtagagatgctgcttgctacgccgaatatggaacaacgcactcaggacattggcattctcgaccgacaaatcgcccgtgattatagccctgtagggccgctgatccgcggcagtggttttgcccgtgatttgcgctttgatcacccctacgccgactacggcaatattccaaaaacactgtttaccttcaccggcggcgatgttttctcccgcgtgatggtccgtgtcaaagagacgtttgattcgctggcaatgctggaatttgccctcgacaacatgctggataccccactgctgaccgaaggctttagctataaacctcacgcattcgcgctgggctttgttgaagcgccacgcggtgaagacgtgcactggagcatgctcggtgataaccaaaaattgttccgctggcgctgccgtgccgccacctacgccaactggccggtgttgcgttacatgctgcgcggcaataccgtttctgacgcaccgctgattatcggtagccttgatccctgctactcctgtaccgaccgtgtgacgctggtagatgtgcgcaagcgccagtcaaaaaccgtgccgtataaagagatcgaacgctacggcattgatcgtaaccgttcgccgctgaagtaa

SEQ ID NO: 458986 - DNA, 540 bp, Shigella boydii
atgctgaagttactgaaaactattatgcgcgccggaaccgcgacggtgaaatatcccttcgcgccactggaggtcagcccaggctttcgcgggaaaccggacctgatgcccagccaatgtattgcctgcggcgcctgtacttgtccggcaaatgcgctgactatccagaccgacgaccagcaaaattcgcgcacctggcagctctatctggggcgttgtatttactgcggacgttgtgaagaagtgtgcccgaccagagccatccagcttaccaataactttgaactgaccgtcaccaataaagccgatctctatacccgcgcgacgttccatctacaacgttgcagccgttgcgaacgcccgtttgccccgcaaaaaaccgtcgcactggctgctgaattgttggcacagcaacaaaatgcgccacaaaaccgcgaaatgttgcgggcgcaagcgagcgtctgcccggagtgcaaacaacgcgcgacgctgatcaacgacgatacagatgtaccgctggtggctaaggagcagctatga

SEQ ID NO: 458987 - DNA, 759 bp, Shigella boydii
atgagtccagtgcttacacaacatgtcagccagcccatcacgctggatgagcaaacgcaaaagatgaagcggcatttgctacaggatatccgtcgctcagcctacgtttatcgcgtcgattgcggcggctgcaacgcctgtgaaatcgaaatttttgctgccatcacccccgtattcgacgcagaacgttttggcattaaggttgtttcatcaccgcgtcacgccgatattttgttatttactggcgcagtcacccgggcgatgcgtatgcctgcacttcgggcgtatgagtctgcccccgatcataaaatctgtgtttcctacggcgcgtgcggtgtcggcggcggtattttccacgatctctacagcgtctggggcggcagcgacaccattgtccccattgatgtttggatccccggctgcccgccaacaccggccgccaccattcacggtttcgccgtggcgctcggtttgctgcaacagaagattcacgctgtggattatcgcgatcccaccggggtgactatgcaaccgttgtggccacagatcccgccatcacagcgtatcgccattgagcgagaagcgcggcggctggcgggctatcgtctggggcgagaaatttgcgatcggctcctgcgccatttaagcgacgatcctacaggaaatcgggttaacacctggttgcgcgatgccgacgatccacgtctcaatagtatcgttcagcaactctttcgcgtactccgggggttacatgactga

SEQ ID NO: 458988 - DNA, 414 bp, Shigella boydii
atgactgaagagtgcggggaaattgttttctggacgctgcgaaaaaagtttgtcgccagtagcgacgagatgccggaacacagctctcaggtaatgtattactcgctggctatcggccatcacgttggcgtgattgattgtctgaatgtcgccttccgctgcccactgacggaaaacgaagattggcttgcacaggtcgaagaggagcaagcccgacgtaagatgctgggggtgatgacctttggtgagattgttattgacgccagccacaccgccctgttgacccgggcattcgcgctactggcagatgacgcgacgtctgtgtggcaggcgcgtagcattcaattcattcatctgttggatgaaattgtgcaggaaccggccatctatctgatggccagaaaaattgcgtga

SEQ ID NO: 458989 - DNA, 345 bp, Shigella boydii
atggctatgtcagacgaggcgatgtttgccccgccacaaggaataacaattgaagcggtaaacggaatgctcgcggagcggttagcacagaaacacggtaaggcgtctttattacgcgccttcatcccgatgccgccgccgttcagcccggtacaacttattgaactgcatgttatcaaaagcaacttctattaccgctaccatgatgatggcagcgatgtgacggcaacaacagagtatcagggcgagatggtcgattattctcgtcacgccgtccttctcggcagtagtggaatggcggagctacgctttattcgtacccacggcagccgttttactccctag

SEQ ID NO: 458990 - DNA, 1578 bp, Shigella boydii
ttgctggagaaagatcgcgatcatcatcgggtactggttgatattactaatgcagtgctgtcacatcttgatctcgacgatctgatcgctgacgtcgctcgtgagatccatcattttttcggtctggcttcagtcagtatggtactgggcgatcatcgaaagaacgagaagtttagcctgtggtgcagcgatctttctgcctcacattgtgcgtgtctgccacgcaatatgcctggcgacagtgtattgctgacacaaacgctacaaacccgacaaccgaccttgacgcaccgtgcagacgatctgtttctctggcaacgcgacccgttattactcttacttgcatctaacggctgcgaatctgcgctccttataccgcttacctttggcaaccatacaccgggtgcattgttgctggcgcatacctcttccactctctttagtgaggaaaactgccagctactacaacacatagccgatcgcatcgctattgccgttggcaatgccgatgcctggcgtagcatgaccgatttgcaggaaagtttgcagcaagaaaactaccagcttagcgagcagctcctttcgaatctgggcatcggtgacattatctatcaaagccaggcaatggaagacctgctccagcaggtagatattgtagcgaagagcgacagtacggtattgatttgtggtgaaaccggaaccggcaaagaggtgatcgccagagcgatccatcaacttagcacgcgacgcgacaaaccgctggtcaaaatcaactgcgctgccatccccgccagtcttctggaaagtgagttattcggtcatgacaaaggggcgtttactggtgcgattaatacacatcgtgatcgttttgaaattgccgatggcggcacgttgtttctcgatgaaattggcgatctgccgttagaacttcagcctaaactgctgcgcgtattgcaggaacgggagattgagcgtctcggcgggagtagaacgatcccggtgaatgtcagagtcattgccgccaccaaccgtgatttgtggcaaatggttgaagatcgccagtttcgcagcgatctcttttatcgcctgaatgtcttcccattggaattgccgccgctacgcgaccgtccggaagatatccctcttttagcaaaacatttcacgcaaaaaatggcgcgccatatgaatcgcgcaattgacgccatcccgaccgaggcgctacgccagttgatgtcgtgggactggccgggcaacgtgcacgagctggaaaacgtgattgagcgagcagtactgctgactcgcggtaacagtctgaatttacatcttaatgtccgacaaagccgtttactgccgacgctaaatgaagattcagcgcttcgcagttcaatggcgcagttgctgcacccgacgacgccagagaatgacgaagaagaacgtcagcgcattgttcaggtattgcgagaaaccaatggcattgttgccgggccccgtggcgcggcgacacgattagggatgaagcgcaccacgctgctgtcacgaatgcagcgtctggggatctcggttcgcgaggtgttgtaa

SEQ ID NO: 458991 - DNA, 705 bp, Shigella boydii
atgagaaacaaactctctttcgacttgcagttgagcgccagaaaagcggcaatcgctgaacggattgccgtccataaaattgcccgcagtaaagtgtcggtctttttaatggcgatgtccgctggcgtgtttatggcgatcggatttactttttacctttccgttatcgccgatgccccgtcttcacaggcattaacccatctggtgggcggcctttgctttacactcggctttattttgctggcggtttgcggcaccagcctgttcacctcgtcggtaatgacggtgatggcaaaaagtcggggcgttattagttggcgaacttggctgattaacgcacttctggtggcctgtggtaatctggcaggtattgcctgtttcagtttgttaatctggttttccgggctggtgatgagtgaaaacgcgatgtggggagtcgcggttttacactgcgccgagggcaaaatgcatcatacatttactgaatctgtcagcctcggcattatgtgcaatctgatggtttgcctggcgctgtggatgagttattgcgggcgttcgttatgcgacaaaatcgtcgccatgattttgcccatcaccctgtttgtcgccagtggctttgagcactgtatcgccaatttgtttgtgattccgttcgccattgccattcgccatttcgccccgttactttattcgtaccccttataa

SEQ ID NO: 458992 - DNA, 168 bp, Shigella boydii
atgcctcacacgataaaaaagatgagtctgataggactcatattgatgatctttacttccgtatttggatttgccaatagcccatcggcttattacttaatgggttatagtgcgattcccttttatatattttctgcattgttattctttattccattcgcctggtaa

SEQ ID NO: 458993 - DNA, 978 bp, Shigella boydii
atgagcgaaacggcatcctggcagccgagcgcatccattcctaacttattaaaacgcgcggcgattatggcggagatccgtcgtttctttgctgatcgtggagtgctggaggtggagacgccttgtatgagccaggcgacggtaaccgatattcatttggtcccgtttgagacacgtttcgttggccccgggcattcgcaggggatgaatctctggttaatgaccagcccggaataccatatgaaacgcctgctggttgccggttgtgggccggtattccagctgtgccgcagcttccgtaatgaagagatggggcgttatcacaaccctgagttcactatgcttgagtggtatcgaccgcactatgatatgtaccggttgatgaacgaggtggacgatctcttacaacaggtgctggactgcccggcagcagaaagcctttcttatcaacaagctttcttgcgttatctggaaattgacccgctctctgccgacaaaacgcaactgcgggaagtcgcagcgaaactggatttgagtaacgttgctgataccgaagaagaccgcgacacgttgctacaattgctgtttacctttggcgtagagccaaatattggcaaagaaaaaccgacctttgtgtaccactttccagccagccaggcatcactggcgcaaatcagtaccgaagatcatcgggtcgctgaacgctttgaggtttattataaaggtattgagctggcgaatggtttccatgaattaacggatgcccgtgagcagcaacaacgctttgaacaagataaccgtaagcgcgcggcgcgcggtttgccgcagcaccccattgaccagaatctgattgaagccttgaaagtcggtatgcctgactgttccggcgtggcattaggtgttgatcgtctggtgatgttggcgctgggcgcggagacactggctgaagtcatcgcctttagcgttgaccgggcataa

SEQ ID NO: 458994 - DNA, 1809 bp, Shigella boydii
gtgcaaacctttcaagccgatcttgccattgtaggcgccggtggcgcgggattacgtgctgcaattgctgccgcgcaagcaaatccaaatgcaaaaatcgcactaatctcaaaagtatacccgatgcgtagccataccgttgctgcagaagggggctccgccgctgtcgcgcaggatcatgacagcttcgaatatcactttcacgatacagtagcgggtggcgactggttgtgtgagcaggatgtcgtggattatttcgtccaccactgcccaaccgaaatgacccaactggaactgtgggggtgcccatggagccgtcgcccggatggtagcgtcaacgtacgtcgcttcggcggcatgaaaatcgagcgcacctggttcgccgccgataagaccggcttccatatgctgcacacgctgttccagacctctctgcaattcccgcagatccagcgttttgacgaacatttcgtgctggatattctggttgatgatggtcatgttcgcggcctggtagcaatgaacatgatggaaggcacgctggtgcagatccgtgctaacgcggtcgttatggctactggcggtgcgggtcgcgtttatcgttacaacaccaacggcggcatcgttaccggtgacggtatgggtatggcgctaagccacggcgttccgctgcgtgacatggaattcgttcagtatcacccaaccggtctgccaggttccggtatcctgatgaccgaaggctgccgtggtgaaggcggtattctggtcaacaaaaatggctaccgttatctgcaagattacggcatgggcccggaaactccgctgggcgagccgaaaaacaaatatatggaactgggtccacgcgacaaagtttctcaggccttctggcacgaatggcgtaaaggcaacaccatctccacgccgcgtggcgatgtggtttatctcgacttgcgtcacctcggcgagaaaaaactgcatgaacgtctgccgttcatctgcgaactggcgaaagcgtacgttggcgtcgatccggttaaagaaccgattccggtacgtccgaccgcacactacaccatgggcggtatcgaaaccgatcagaactgtgaaacccgcattaaaggtctgttcgccgtgggtgaatgttcctctgttggtctgcacggtgcaaaccgtctgggctccaactccctggcggaactggtggtcttcggccgtctggccggtgaacaagcgacagagcgtgcagcaactgccggtaatggcaacgaagaggcaattgaagcgcaggcagctggcgttgaacaacgtctgaaagatctggttaaccaggatggcggcgaaaactgggcgaagatccgcgacgaaatgggcctagcaatggaagaaggttgcggtatctaccgtacgccggaactgatgcagaaaaccatcgacaagctggcagagctgcaggaacgcttcaagcgcgtgcgcatcaccgacacctccagcgtgttcaacaccgacctgctctacaccattgaactgggccacggtctgaacgttgctgaatgtatggcgcactccgcaatggcacgtaaagagtcccgcggcgcacaccagcgtctggacgaaggttgcaccgagcgtgacgacgtcaacttcctcaaacacaccctcgccttccgcgatgctgatggcacgactcgcctggagtacagcgacgtgaagattactacgctgccgccagctaaacgcgtttacggtggcgaagcggatgcagccgataaggcggaagcagccaataagaaggagaaggcgaatggctga

SEQ ID NO: 458995 - DNA, 735 bp, Shigella boydii
atggctgagatgaaaaacctgaaaattgaggtggtgcgctataacccggaagtcgataccgcaccgcatagcgcattctatgaagtgccttatgacgcaactacctcattactggatgcgctgggctacatcaaagacaacctggcaccggacctgagttaccgctggtcctgccgtatggcgatttgtggttcctgcggcatgatggttaacaacgtgccaaaactggcatgtaaaaccttcctgcgtgattacaccgacggtatgaaggttgaagcgttagctaacttcccgattgaacgcgatctggtggtcgatatgacccacttcatcgaaagtctggaagcgatcaaaccgtacatcatcggcaactcccgcaccgcggatcagggtactaacatccagaccccggcgcagatggcaaagtatcaccagttctccggttgcatcaactgtggtctgtgctacgccgcgtgcccgcagtttggcctgaacccagagttcatcggtccggctgccattacgctggcgcatcgttataacgaagatagccgcgaccacggtaagaaggagcgtatggcgcagttgaacagccagaacggcgtatggagctgtactttcgtgggctattgctccgaagtctgcccgaaacacgtcgatccggctgcggccattcagcagggcaaagtagaaagttcgaaagactttcttatcgcgaccctgaaaccacgctaa

SEQ ID NO: 458996 - DNA, 396 bp, Shigella boydii
atgacgactaaacgtaaaccgtatgtacggccaatgacgtccacctggtggaaaaaattgccgttttatcgcttttacatgctgcgcgaaggcacggcggttccggctgtgtggttcagcattgaactgattttcgggctgtttgccctgaaaaatggcccggaagcctgggcgggattcgtcgactttttacaaaacccggttatcgtgatcattaacctgatcactctggcggcagctctgctgcacaccaaaacctggtttgaactggcaccgaaagcggccaatatcattgtaaaagacgaaaaaatgggaccagagccaattatcaaaagtctctgggcggtaactgtggttgccaccatcgtaatcctgtttgttgccctgtactggtaa

SEQ ID NO: 458997 - DNA, 360 bp, Shigella boydii
atgattaatccaaatccaaagcattctgacgaaccggtattctggggcctcttcggggccggtggtatgtggagcgcaattattgcgccggtgatgatcctgctggtgggtattctgctgccactggggctgtttccgggtgatgcgctgagctacgagcgcgttctggcgttcgcgcagagcttcattggtcgcgtattcctgttcctgatgatcgttctgccgctgtggtgtggtttacaccgtatgcaccacgcgatgcacgatctgaaaattcacgtgcctgcgggcaaatgggttttctacggtctggctgctatcctgacagttgtcacgctgattggtatcgttacaatctaa

SEQ ID NO: 458998 - DNA, 1134 bp, Shigella boydii
atgttcaaaacgacgctctgcgccttattaattaccgcctcttgctccacatttgctgcccctcaacaaatcaacgatattgtgcatcgcacaattaccccgcttatagagcaacaaaagatccccggtatggcggtggcggtaatttatcagggtaaaccttattactttacctggggctatgcggacatcgccaaaaagcagcccgtcacacagcaaacgttgtttgagttaggttcggtcagcaaaacatttacgggcgtgcttggtggcgacgctattgctcgaggggaaatcaagttaagcgatcccgcaacaaaatactggcctgaacttaccgctaaacagtggaatgggatcacactattacatcttgcgacctacaccgctggcggcctgccattgcagatgccggatgaagtgaaatcctcaagcgacttgctgcgcttctatcaaaactggcagcctgcatgggctccaggaacacaacgtctgtatgccaactccagtatcggtttgttcggcgcactggctgtgaagccgtctggtttgagttttgagcaggcgatgcaaactcgtgtcttccagccactcaaactcaaccatacgtggattaatgtaccgcccgcagaagaaaagaattacgcctggggatatcgcgaaggcaaggcagttcatgtttcgccaggggcgttagatgctgaagcttatggtgtgaagtcgaccattgaagatatggcccgctgggtgcaaagcaatttaaccccccttgatatcaatgagaaaacgcttcaacaagggatacaactggcacaatctcgctactggcaaatcggcgatatgtatcagggcctgggctgggaaatgctggactggccggtcaatcctgacagcatcattaacggcagtgacaataaaattgcactggcagcacgcccggtaaaagcgattaagcccccaactcctgcagtacgcgcatcatgggtacataaaacgggggcgaccggcggatttggtagctatgtcgcgtttattccagaaaaagagctgggtatcgtgatgctggctaacaaaaactatcccaatccagcgagagtcgccgccgcctgtcagattctcaacgctctacagtaa

SEQ ID NO: 458999 - DNA, 534 bp, Shigella boydii
atgcgcctgctccctctcgttgccgcagcgacagctgcatttctggtcgttgcctgcagttctcctacgccgccgcgtggcgtgacagtagtgaataatttcgacgctaaacgctatctcggtacctggtatgagattgcccgttttgatcaccgttttgaacgtggactggaaaaagtcaccgcaacatacagtctgcgtgatggcggcggcctgaatgtcatcaataaaggctataaccctgacagagaaatgtggcagcagagtgaagggaaagcgtactttaccggcgcaccaacacgcgctgcgctgaaagtgtcattctttggtcctttctatggcggttataacgtcattgcacttgatcgggaataccgccatgcgctggtttgcggcccggaccgcgactacctgtggatactctcccgcacgccaaccatttctgacgaagtgaaacaggagatgctggcagtcgcgacccgggaagggtttgatgtcagtaagtttatttgggtacagcagcccggtagttag

SEQ ID NO: 459000 - DNA, 318 bp, Shigella boydii
atgtcctggattatcttagttattgctggtctgctggaagtggtatgggccgttggcctgaaatatacccacggctttagtcgtttgacgccgagtgttattaccgtgacggcgatgattgtcagtatggcgctacttgcctgggcgatgaaatcgttaccagtagggacggcttatgccgtgtggacgggtattggcgcagtcggcgcggctatcaccggcattgtgctgctcggtgagtccgctaacccgatgcgcctggcgagtctggcgttaatcgtattggggattattggtctgaaactcagcactcactaa

SEQ ID NO: 459001 - DNA, 147 bp, Shigella boydii
atggtgaagaagacaattgcagcgatcttttctgttctggtgctttcaacagtattaactgcctgcaacaccacgcgtggcgttggtgaagacatttctgatggcggtaacgcgatttctggcgcagcaacgaaagcgcagcaatag

SEQ ID NO: 459002 - DNA, 126 bp, Shigella boydii
atgatgaaacgccttatcgttcttgttttgcttgctagtacgctgctcacgggctgtaacaccgctcgcggtttcggcgaagacatcaaacatctcggcaactccatctctcgcgctgccagctaa

SEQ ID NO: 459003 - DNA, 567 bp, Shigella boydii
atggcaacgtactatagcaacgattttcgtgctggtcttaaaatcatgttagacggcgaaccttacgcggttgaagcgagtgaattcgtaaaaccgggtaaaggccaggcatttgctcgcgttaaactgcgtcgtctgctgaccggtactcgcgtagaaaaaaccttcaaatctactgattccgctgaaggcgctgatgttgtcgatatgaacctgacttacctgtacaacgacggtgagttctggcacttcatgaacaacgaaactttcgagcagctgtctgctgatgcaaaagcaattggcgataacgctaaatggctgctggatcaggcagagtgtatcgtaactctgtggaatggtcagccgatctccgttactccgccgaacttcgttgaactggaaatcgttgataccgatccgggcctgaaaggtgataccgcaggtactggcggcaaaccggctaccctgtctactggcgctgtggttaaggttccgctgttcgtacaaatcggcgaagtcatcaaagtggatacccgctctggtgaatacgtctctcgcgtgaagtaa

SEQ ID NO: 459004 - DNA, 1050 bp, Shigella boydii
atggcacatattgtaaccctaaataccccatccagagaagattggttaacgcaacttgccgatgttgtgaccgatcctgatgaacttctgcgtcttttgaatatagacgcggacgaaaaactgttggccggacgcagcgccaaaaagctgtttgccctgcgtgtgccccgctcatttatcgatcgcatggagaaaggcaatccggacgatcctcttttgcgtcaggtacttacctcgcaagatgagtttgtcgtcgcgtccggattctccaccgacccactggaagaacagcacagcgtagtgcctggtttgttgcataaataccacaaccgggcgcttttgctggtcaaaggcggctgcgcggtaaattgccgctattgcttccgtcgccacttcccctatgccgaaaatcagggcaacaagcgtaactggcagactgcacttgagtatgttgctgcgcatccggaactggacgagatgattttctccggcggcgatccgctgatggcgaaagatcacgagctggactggttgctcacacaactggaagccatcccgcatatcaaacgtctgcggattcacagccgtctgccgattgtgatcccggcacgcatcacagatgcgctggttgaacgcttttcacattctacgctgcaaatcctgctggtgaatcacatcaaccatgccaatgagatagatgaaacattccgtcaggcgatggctaagttgcgccgggtaggcgttactttgctgaaccagagcgttctgttacgtgatgtgaacgataacgcacaaacgctggcaaacctgagtaatgcgttgttcgatgccggcgtgatgccgtattacctgcatgtgctcgataaagtacagggcgcggcgcattttatggtgagtgatgacgaagcacggcagattatgcgtgagttgctgacattggtgtcgggatatctggtgccgaaactggcgcgagaaattggcggcgaacccagcaaaacgccgctggatctccagctacgccagcagttactgattaaacagggaagttaa

SEQ ID NO: 459005 - DNA, 870 bp, Shigella boydii
atggccataagcatcaagggtgttaataccggtgttattcgcaagagtaataatttcattgcactggcgctgaaaattaaagaacctcgcaataaagaatcgttgttctttatgtctgtcatggaactgcgcgacctgctgattgcgctggaaagtcgtctgcatcaaaagcataaactggatgctgctgcacgccttcagtatgagcaagctcgcgataaagtcattaagaaaatggcagaaaacatcccagaaattctggttgatgagcttaaaaatgccgatattaatcgtcgggttaacacgctggaacttaccgataatcaaggcgaaaatcttaccttcgtattaacgctacatgacggtagcaaatgtgagttagtcgtcaatgagttgcagattgaaatgctagcgcgagcaatcattcatgcaattaataatgcggaaatgcgtgaactggcattacgtattacctcactgttagatttcctgccgttatatgacgttgactgccaggaaaatggcaatctggaatatgacacctattcccaaccggaatggaaacataacttgttcgaccattatctggcggtgctttaccgctttaaagatgaaagtggcaaagaacaatttagcggcgcagtggtgaaaacgcgtgaagcaacgccgggtaaagaagtagaggcgatcactcgccgaatgcttgatttcagcccacgactgaaaaaactcgcgggtgtgccatgtcaggtctatgttcgcaccgtagcggcgaataacgcccaaccgctaacccaggatcaatgcttacgcgcgctgcatcacttacgtgttcaatccaccagcaaaactgcaccacaggcgaaataa

SEQ ID NO: 459006 - DNA, 354 bp, Shigella boydii
atgcacgtaaaatacttagcagggattgtcggtgccgcgctactgatggcgggttgtagctccagcaacgaattgagtgctgccggtcagagtgtacgcattgtggacgagcagccaggcgcagagtgccagctgattggtactgcgacaggtaagcaaagcaactggctttccgggcaacacggagaagagggcggttctatgcgcggcgcagcaaacgatctgcgcaaccaggcggctgcaatgggcggtaacgtgatttatggcatcagcagcccgtcgcagggaatgttgtccagttttgtcccgacggatagccagattatcggtcaggtttataagtgcccgaactga

SEQ ID NO: 459007 - DNA, 1647 bp, Shigella boydii
atggcagctaaagacgtaaaattcggtaacgacgctcgtgtgaaaatgctgcgcggcgtaaacgtactggcagatgcagtgaaagttaccctcggtccgaaaggccgtaacgtagttctggataaatctttcggtgcaccgaccatcaccaaagatggtgtttccgttgctcgtgaaatcgaactggaagacaagttcgaaaatatgggtgcgcagatggtgaaagaagttgcctctaaagcgaacgacgctgcaggcgacggtaccaccactgcaaccgtactggctcaggctatcatcactgagggtctgaaagcagttgctgcgggcatgaacccgatggacctgaaacgtggtatcgacaaagctgttaccgctgcagttgaagaactgaaagcgctgtccgtaccatgctctgactctaaagcgattgctcaggttggtaccatctccgctaactccgacgaaaccgtaggtaaactgatcgctgaagcgatggacaaagtcggtaaagaaggcgttatcaccgttgaagacggtaccggtctgcaggacgaactggacgtggttgaaggtatgcagttcgaccgtggctacctgtctccttacttcatcaacaagccggaaactggcgcagtagaactggaaagcccgttcatcctgctggctgacaagaaaatctccaacatccgcgaaatgctgccggttctggaagccgttgctaaagcaggtaaaccgctgctgatcatcgctgaagatgttgaaggcgaagcgctggcaactctggttgttaacaccatgcgtggcatcgtgaaagttgctgcggttaaagctccgggcttcggcgatcgccgtaaagctatgctgcaggatatcgcaaccctgactggcggtaccgtaatctctgaagagatcggtatggagctggaaaaagcaaccctggaagacctgggtcaggctaaacgtgttgtgatcaacaaagacaccaccaccatcattgatggcgtgggtgaagaagctgcaatccagggccgtgttgctcagatccgtcagcagattgaagaagcaacttctgactacgaccgtgaaaaactgcaggagcgcgtagcgaaactggcaggcggcgttgcagttatcaaagtaggtgctgctaccgaagttgaaatgaaagagaaaaaagcacgcgttgaagatgccctgcacgcgacccgtgctgcggtagaagaaggcgtggttgctggtggtggtgttgcgctgatccgcgtagcgtctaaactggctgacctgcgtggtcagaacgaagaccagaacgtgggtatcaaagttgcactgcgtgcaatggaagctccgctgcgtcagatcgtattgaactgcggcgaagaaccgtctgttgttgctaacactgttaaaggcggcgacggcaactacggttacaacgcagcaaccgaagaatacggcaacatgatcgacatgggtatcctggatccaaccaaagtaacccgttctgctctgcagtacgcggcttctgtggctggcctgatgatcaccaccgagtgcatggttaccgacctgccgaaaaacgatgcagctgacttaggcgctgctggcggtatgggcggcatgggtggcatgggcggcatgatgtaa

SEQ ID NO: 459008 - DNA, 294 bp, Shigella boydii; identical to SEQ ID NO: 2204

SEQ ID NO: 459009 - DNA, 1257 bp, Shigella boydii
atgagtggactcaaacaagaactggggctggcccagggcattggcctgctatcgacgtcattattaggcaccggcgtgtttgccgttcctgcgttagctgcacaggtagcaggcaataacagcctgtgggcgtggcccgttttgattatcttagtgttcccgattgcgattgtgtttgcgattctgggtcgccactatcccagcgcaggcggtgtcgcgcacttcgtcggtatggcgtttggttcgcggcttgagcgagtcaccggctggttgtttttatcggtcattcccgtgggtttgccagccgcgctacaaattgccgccgggttcggccaggcaatgtttggctggcatagctggcaactgttgttggcagaactcggtacgctggcgctggtgtggtatatcggtactcgcggtgccagttccagtgctaatctacaaaccgttattgccggacttatcgtcgcgctgattgtcgctatctggtgggcgggcgatatcaaacctgcgaatatccccttcccggcacctggtaatatcgaacttaccgggttatttgctgcgttatcagtgatgttctggtgttttgtcggtctggaagcatttgcccatcttgcctcggaatttaaaaatccagagcgtgattttcctcgcgcattgatgattggtctgctgctggcaggattagtctactggggctgtacggtagtcgtcttacacttcgacgcctatggtgaaaaaatggcggcggcagcatcgcttccaaaaattgtagtgcaactgttcggtgtaggagcgttatggattgcctgcgtgattggctatctggcctgctttgccagtctcaacatttatatacagagcttcgcccgcctggtatggtcgcaggcgcaacataatcctgaccactacctggcacgcctctcttctcgccatatcccgaataatgccctcaatgcggtgctcggctgctgtgtggtgagcactttggtgattcatgctttagagatcaatctggacgctcttattatttatgccaatggcatctttattatgatttatctgttatgcatgctggcaggctgtaaattattgcaaggacgttatcgactactggcggtggttggcgggctgttatgcgttctgttactggcaatggtcggctggaaaagtctctatgcgctgatcgtgctggcgggattatggctgttgctgccaaaacgaaaaacgccggaaaatggcataaccacataa

SEQ ID NO: 459010 - DNA, 477 bp, Shigella boydii
ttgcgctggttaccttttattgccattttcctttatgtctatattgagatttcaatctttattcaggttgcccatgtattgggggtattgctgaccctcgtgctggttatattcacgtcagttatcgggatgtcactggtacgtaaccagggctttaagaatttcgtgctgatgcagcaaaaaatggcggcgggtgaaaacccagcggcggagatgattaaaagtgtttcgctgatcattgccggtttgctgcttttattaccgggctttttcaccgacttcctcggtcttctgcttttattaccgccggtgcaaaagcatctgacagtgaagttgatgccgcatttgcgcttttctcgtatgccaggcggcggttttagcgccgggaccggtggcggtaatacttttgatggtgagtaccagcgaaaggatgatgagcgcgaccgccttgatcataaagacgatcgccaggattaa

SEQ ID NO: 459011 - DNA, 1437 bp, Shigella boydii
atgtcaaacaacattcgtatcgaagaagatctgttgggtaccagggaagttccagctgatgcctactatggtgttcacactctgagagcgattgaaaacttctatatcagcaacaacaaaatcagtgatattcctgaatttgttcgcggtatggtaatggttaaaaaagccgcagctatggcaaacaaagagctgcaaaccattcctaaaagtgtagcgaatgccatcattgccgcatgtgatgaagtcctgaacaacggaaaatgcatggatcagttcccggtagacgtctaccagggcggcgcaggtacttccgtaaacatgaacaccaacgaagtgctggccaatatcggtctggaactgatgggtcaccagaaaggtgaatatcagtacctgaacccgaacgaccatgttaacaaatgtcagtccactaacgacgcctacccgaccggtttccgtatcgcagtttactcttccctgattaagctggtagatgcgattaaccaactgcgtgaaggctttgaacgtaaagctgtcgaattccaggacatcctgaaaatgggtcgtacccagctgcaggacgcagtaccgatgaccctcggtcaggaattccgcgctttcagcatcctgctgaaagaagaagtgaaaaatatccaacgtaccgctgaactgctgctggaagttaaccttggcgcaacagcaatcggtactggtctgaacacgccgaaagagtactctccgctggcagtgaaaaaactggctgaagtcactggcttcccatgcgtaccggctgaagacctgatcgaagcgacctctgactgcggcgcttatgttatggttcacggcgcgctgaaacgcctggctgtgaagatgtccaaaatctgtaacgacctgcgcttgctctcttctggcccacgtgccggcctgaacgagatcaacctgccagaactgcaggcgggctcttccatcatgccagctaaagtaaacccggttgttccggaagtggttaaccaggtatgcttcaaagtcatcggtaacgacaccactgttaccatggcagcagaagcaggtcagctgcagttgaacgttatggagccggtcattggccaggccatgttcgaatccgttcacattctgaccaacgcttgctacaacctgctggaaaaatgcattaacggcatcactgctaacaaagaagtgtgcgaaggttacgtttacaactctatcggtatcgttacttacctgaacccgttcatcggtcaccacaacggtgacatcgtgggtaaaatctgtgccgaaaccggtaagagtgtacgtgaagtcgttctggaacgcggtctgttgactgaagcggaacttgacgatattttctccgtacagaatctgatgcacccggcttacaaagcaaaacgctatactgatgaaagcgaacagtaa

SEQ ID NO: 459012 - DNA, 1302 bp, Shigella boydii
atgctagttgtagaactcatcatagttttgctggcgatcttcttgggcgccagattggggggaataggtattggttttgcaggcggattgggggtgctggttcttgccgctattggcgttaaacccggtaacatcccgttcgatgtcatttccattatcatggcggttatcgccgctatttctgccatgcaggttgctggcggtctggactatctggttcatcagacagaaaagctgctgcgccgtaacccgaaatacatcacgatcctcgcacctatcgtgacctatttcctgacaatctttgctggtactggcaacatctctctggcgacactgccagttatcgctgaagttgcgaaggaacaaggcgttaaaccttgccgtccgctctctactgcagtggtatccgcgcagattgcgatcaccgcatcgccaatctcagcggcagtggtttacatgtcttccgtgatggaaggtcatggcatcagctacctccatctgctctccgtggtcatcccgtccaccctgctggcggttctggtgatgtcctttctggtcactatgctgttcaactccaaactctctgacgatccgatttatcgcaagcgtctggaagagggcctggttgaactgcgcggtgaaaagcagattgaaatcaaatccggtgcaaaaacgtccgtctggctgttcctgctgggcgtagttggcgtggttatctatgcaatcatcaacagcccaagcatgggtctggttgaaaaaccgctgatgaacaccaccaacgcaatcctgatcatcatgctcagcgttgcaactctgaccaccgttatctgtaaagtcgataccgacaacatcctcaactccagcaccttcaaagcaggtatgagcgcctgtatttgtatcctgggtgttgcgtggctgggcgatactttcgtttccaacaacatcgactggatcaaagataccgctggtgaagtgattcagggtcatccgtggctgctggccgtcatcttcttctttgcttctgctctgctgtactctcaggctgcaaccgcaaaagcactgatgccgatggctctggcactgaacgtttcaccgctgaccgctgttgcttctttcgctgcggtgtctggtctgttcattctgccgacctacccgacgctggttgctgcggtacagatggatgacacgggtactacccgtatcggtaaattcgtcttcaaccatccgttcttcatcccgggtactctgggtgttgccctggccgtttgcttcggcttcgtgctgggtagcttcatgctgtaa

SEQ ID NO: 459013 - DNA, 339 bp, Shigella boydii
atgcttgatgaaaaaagttcgaataccgcgtctgtcgtggtgctatgtacggcaccagatgaagcgacagcccaggatttagctgccaaagtgctggcggaaaaactggcggcctgcgcgaccttgatccccggcgctacctctctctattactgggaaggtaagctggagcaagaatacgaagtgcagatgattttaaaaactaccgtatctcaccagcaggcactgctggaatgcctgaagtctcatcatccatatcaaaccccggaacttctggttttacctgttacacacggagacacagattacctctcatggctcaacgcatctttacgctga

SEQ ID NO: 459014 - DNA, 1698 bp, Shigella boydii
atggctcaacgcatctttacgctgatcctgctactttgcagcacttccgtttttgccggattattcgacgcgccgggacgttcacaatttgtccccgcggatcaagcctttacttttgattttcagcaaaaccaacatgaccttaatctgacctggcagatcaaagacggttactacctctaccgtaaacagatccgcattacgccggaacacgcgaaaattgccgacgtgcagctgccgcaaggcgtctggcatgaagatgagttttacggcaaaagcgagatttaccgcgatcggctgacgcttcccgtaaccatcaaccaggcgagtgcgggagcgacgttaactgtcacctaccagggctgtgctgatgccggtttctgttatccgccagaaaccaaaaccgttccgttaagcgaagtggtcgccaacaacgcagcgtcacagcctgtgtctgtttcgcagcaagagcagcacaccgcgcaattgcccttttccgcgctctgggcgttgttgatcggtattggtatcgcctttacgccatgcgtgctgccaatgtacccactgatttctggcatcgtgctgggtggtaaacagcggctctccactgccagagcattgttgctgacctttatttatgtgcaggggatggcactgacttacacggcgctgggtctggtagttgccgccgcagggttacagttccaggcggcgctacagcacccatacgtgctcattggcctcgccatcgtctttaccttgctggcgatgtcaatgtttggcttgtttactctacaactcccctcttcgctgcaaacacgtctcacgttgatgagcaatcgccaacagggcggctcacctggcggtgtgtttgttatgggggcgattgccggacttatctgttcaccatgcaccaccgcaccgcttagcgcgattctgctgtatatcgcccaaagcgggaacatgtggctgggcggcggcacgctttatctctatgcgttgggcatgggcctgccgctgatgctaattaccgtctttggtaaccgcttgctgccgaaaagcggcccgtggatggaacaagtcaaaaccgcgtttggttttgtgatcctcgcactgccggtcttcctgctggagcgagtgattggtgatgtatggggattacgcttgtggtcggcgctgggtgtcgcattctttggctgggcctttatcaccagcctacaggctaaacgcggctggatgcgcgtggtgcaaataatcctgctggcagcggcattggttagcgtgcgcccacttcaggattgggcatttggtgcgacgcataccgcgcaaactcagacgcatctcaactttacacaaatcaaaacggtagatgagttaaatcaggcgctcgttgaagccaaaggcaaaccggtgatgttagatctttatgccgactggtgcgtcgcctgtaaagagtttgagaaatacaccttcagcgacccgcaggtgcaaaaagcgttagcagacacggtcttacttcaggccaacatcacggccaacgacgcacaagatgtggcgctgttaaagcatcttaatgtccttggcctaccgacaattctcttttttgacggacaaggccaggagcatccacaagcacgcgtcacgggctttatggatgctgaaaccttcagcgcacatttgcgcgatcgccaaccgtga

SEQ ID NO: 459015 - DNA, 576 bp, Shigella boydii
gtgcaacgtgaagatgtactgggagaagccctgaaattattagaattacaagggattgccaacaccacgctggagatggttgctgaacgtgtggattatccactggacgagctacgccgcttctggccagacaaagaggcaatcctctacgatgcgctgcgttatcttagccaacagatagatgtctggcgtcgtcagctgatgctggacgaaacgcaaaccgccgaacaaaagctgctggcacgttatcaggcgttatcagagtgcgttaaaaacaaccgctatccgggctgtctatttatcgctgcctgtacgttttatcccgatcctggccaccctattcatcaactggccgatcagcaaaaaagcgcggcctacgatttcacccacgaactgttaaccacactggaagttgacgatccggcgatggtagcaaagcagatggaactggtgctggaaggctgtttaagccgaatgctggtgaatcgtagccaggcggatgtcgacactgcacatcggctggcggaagatatcctgcgcttcgcccgctgccgccagggtggtgcattgacctga

SEQ ID NO: 459016 - DNA, 1005 bp, Shigella boydii
atggcactgactgacgcaaaaatccgggctgcaaagcccactgacaaggcttataaactcactgacggggctggcatgttcctgctggtacatcctaatggctcccgttactggcgtctccgttatcgtattctgggtaaggagaagactctggcacttggtgtgtatccagaagtttctctctccgaagctcgtacaaaacgggatgaggcccgaaaactgatttcggagggggttgacccttgcgaacagaaaagagctaaaaaagtagtccctgatttacagctctcttttgaacatattgcgcgacgctggcatgccagtaataaacaatgggcacaatcacacagcgataaagtactcaaaagcctcgagactcacgttttcccctttatcggcaaccgggatatcacaacactcaataccccggatctgcttatccctgttcgtgctacagaagctaaacaaatttatgaaatcgccagtcgtctgcagcaaagaatatctgccgtaatgcgttatgccgtacagtctggcatcatcagatataatcctgctctggatatggctggcgcattgactacggtaaaacgccagcatcgccccgctcttgatctttctcgcctgcctgaacttttgtcgcgtattggcagttacaaagggcaacctgtcacccagcttgccgttatgctgaatttactggtttttattcgttccagtgaactcagatacgcccgctggtctgaaattgatattgacaatgccatgtggactattccagccgaacgcgaacccctgccaggcgtaaaattctcacaccggggctccaagatgcgaacaccacatcttgtgccactcagcaaacaggctgtagccatactgacagaactacagacatgggctggtgaaaatggtctgatctttacgggagcacatgacccgcgtaaaccaatcagtgaaaatgtaatgaacgcatctcacacaattaaacacggagcagtatga

SEQ ID NO: 459017 - DNA, 456 bp, Shigella boydii
ttgtgcggtccggaacttcaccagttgcatgcgggtacggtgcagaaccagtaccgactgctgttcttctgtttttacggcgatttctttacccggctgctgaaccgccatccagatagcccgggcatccatcacatcattcttattgcccatgacgaatgccttaacgaagcgggcctgcaacaaccgaactttatgaccaagttttgtcagttcccgtgcccagtgctgagaacctccacaggcctccataccaatcaggcatggctcacggttgccgaagaacgtcagaaaatcctgtctacgcaactgtttatcaaccacttcacctgtgtgctcattgatgaagtgaatctgaatgacatgttttgcgatatcaacgccaaccggtgtatatttcatttgtggagtctccagtctgagggagctttatgcatcccgtattgggcactatga

SEQ ID NO: 459018 - DNA, 1536 bp, Shigella boydii
atggctacatcagtacagacaggtaaagctaagcagctcacattactcggattctttgccataacggcatcgatggtaatggctgtttatgaataccctaccttcgcaacatcgggcttttcattagtcttcttcctgctattaggcgggattttatggtttattcccgtgggactttgtgctgcggaaatggccaccgtcgacggctgggaagaaggtggtgtcttcgcctgggtatcaaatactctggggccgagatggggatttgcagcgatctcatttggctatctgcaaatcgccattggttttattccgatgctctatttcgtgttaggggcactctcctacatcctgaaatggccagcgctgaatgaagaccccattaccaaaactattgcagcactcatcattctttgggcgctggcattaacgcagtttggtggcacgaaatacacggcgcgaattgctaaagttggcttcttcgccggtatcctgttacctgcatttattttgatcgcattagcggctatttatctgcactccggtgcccccgttgctatcgaaatggattcgaagaccttcttccctgacttctctaaagtgggcacactggttgtatttgttgccttcattttgagttatatgggcgtagaagcttccgcaactcacgtcaatgaaatgagcaaccccgggcgcgactatccactggctatgttactgctgatggtggcggcaatctgcttaagctctgttggcggtttatctattgcgatggtcattccgggtaatgaaatcaacctctccgcaggggtaatgcaaacctttaccgttctgatgtcccatgtggcaccggaaattgagtggacggttcgcgtgatctccgcactgctgttgctgggtgttctggcggaaatcgcctcctggattgttggtccttctcgcgggatgtatgtcacagcgcagaaaaacctgctgccagcggcattcgctaaaatgaacaaaaatggcgtaccggtaacgctggtcatttcgcagctggtgattacttctatcgcgttgatcatcctcaccaataccggtggcggtaacaacatgtccttcctgatcgcactggcgctgacggtggtgatttatctgtgtgcttatttcatgctgtttattggctacattgtgttggttcttaaacatcctgacttaaaacgcacatttaatatccctggtggtaaaggggtgaaactggtcgtggcaattgtcggtctgctgacttcaattatggcgtttattgtttccttcctgccgccggataacatccagggtgactctaccgatatgtatgttgaattactggtcgttagtttcctggtggtacttgccctgccctttattctctatgctgttcatgatcgtaaaggcaaagcgaataccggcgtcactctggagccaatcaacagtcagaacgcaccaaaaggtcacttcttcctgcacccgcgtgcacgttcaccacactatattgtgatgaatgacaagaaacactaa

SEQ ID NO: 459019 - DNA, 1320 bp, Shigella boydii
atggatatctgctcccgaaacaagaaattaacgattagaagaccagcgatactggttgcactggcacttttactgtgtagttgtaaaagcacgcctccagagtccatggtgacaccaccagcaggttcaaagccaccagccacgacgcaacaatcgtcacaaccgatgcgtggcatctggctggccacggtgtctcgcctcgactggccaccggtttcctcggttaacattagtaaccccaccagccgggcccgtgtacaacaacaggcgatgatcgacaaactggatcatctgcaacgtctcggtataaacacggtctttttccaggtcaagccggacggtaccgccctgtggccatcgaaaattttgccgtggtccgatcttatgaccggtaagattggtgaaaatccgggttacgatccgctgcaatttatgctcgacgaagcccacaagcgtgggatgaaagtacacgcctggtttaacccctatcgcgtatcggttaatacgaagcccggtactatcagggaactgaatagcactctgtctcaacaaccggcgagcgtctatgtgcaacaccgtgactggatcagaacgtctggcgatcgctttgtcctcgacccgggcatccctgaggttcaggactggatcacatcaatagtcgccgaagtggtttcccgctatccggtagatggcgtgcagtttgacgactatttctatacggagtcaccgggttcacggctaaatgataacgaaacgtaccgtaaatacggaggcgcatttgcgtcaaaagcagactggcggcgcaacaatactcagcagttaattacaaaagtatcgcacaccattaaaagcattaagccgggagtcgaatttggcgttagcccggcaggcgtgtggcgtaaccgatcacacgatccgctcggttccgatacccgaggcgcggcagcctatgacgaatcctacgctgacacccgtcgatgggtggaacaaggattgctggattacattgctccccaaatttactggccgttctcacggagtgccgcgcgttatgacgtgttggcaaaatggtgggcggatgtcgttaaaccgaccaggacccgcctgtatatcggtatcgccttctataaagtgggtgaaccttcaaagatagagccagactggatgattaacggcggcgtaccggaactgaaaaagcagctcgatcttaacgatgcggtaccagaaattagcggcaccatcttgttccgtgaggactatctgaataaaccgcagactcaacaagcggtcagctatctgcaaagtcgttggggcagttaa

SEQ ID NO: 459020 - DNA, 723 bp, Shigella boydii
atggagatgtattttaaaagaatgaaagatgagtggaccggacttgtcgaacaggcagatccactcattcgtgctaaagccgcggaaattgccgttgcgcatgctcattatctgagtatcgagttttatcgaattgtccgcatcgacccgcatgccgaagaattcttgagtaatgaacaagttgagcggcagttgaaaagtgcgatggaacgctggattattaacgtgctttctgcccaggttgacgatgtcgaaaggctaatacaaatccagcataccgtcgcggaagtgcatgcccgcataggaattccggtagaaattgtcgagatggggtttcgggtgctgaaaaaaatcctctatccggtaatcttctcttcggattattctgccgcagaaaaacttcaggtctaccatttctcgattaacagtattgatatcgctatggaagtgatgacccgcgcgtttacctttagtgacagtagtgcctcaaaggaagatgaaaactatcgtatcttctcgttactagaaaacgccgaagaagaaaaagaacggcaaatagcctcaatactttcatgggaaatagatattatctataaaatcctgctggattctgatttaggcagtagtttgcctttaagccaggctgattttggcctgtggtttaaccataaaggtcgacattattttagtggcattgccgaagtaggcatatctcccgtctga

SEQ ID NO: 459021 - DNA, 627 bp, Shigella boydii
atgcgtaacaccaggaatttgaataacagaagtctgcgggtgaaatttttattacagataagaaatactgtatcgcaaattattaccttgctgcgtgaattgtttgaagaagtatcgcgccacgaagtcggtatggatgtactgacgaaattacttaaccgccgcttcctgccgactatcttcaaacgcgaaattgcccatgccaacctgaccggtacaccgctgtcagtgctgattattgacgttgataaattcaaagagatcaacgatacgtggggccataacactggcgatgaaattctgcgtaaagtctctcaggccttttatgacaacgtccgcagtagtgattatgtttttcgctacgggggcgatgaatttatcattgttttgactgaagcttctgaaaacgaaacgttacgtaccgcagaacgtattcgcagtcgggcggagaaaaccaaactgaaagccgcaaacggcgaggatattgccctctcactttccatcggtgccgccatgtttaatggtcatcctgactatgagcgcctcattcaaatagccgatgaagctctgtatatcgccaaaagacgaggtagaaaccgtgttgaactctggaaagccagtctttag

SEQ ID NO: 459022 - DNA, 2400 bp, Shigella boydii
atgaagctaaccgatgcggaaaatgccgccgatggcatttttttccccgcccttgaacaaaatatgatgggcgcggtgttaattaacgaaaatgatgaagtgatgtttttcaaccccgccgcagagaagctctgggggtacaaacgtgaagaagtcattggcaataacattgatatgctgattccgcgggatttgcgtcctgcgcatcctgaatacattcgtcataaccgtgaaggtggtaaagcgcgcgtcgaggggatgagtcgggagctgcagctggagaaaaaagacggcagtaaaatctggacccgttttgcgctatcgaaagtgagcgccgaggggaaagtttattacctggcgctggtacgggatgccagcgtagaaatggcgcaaaaagaacagacccgacaattgattattgccgttgaccatctcgaccgaccggtgattgtcctcgatccggaacgccatattgtgcagtgcaatcgcgcatttaccgaaatgtttggttactgcattagcgaagcctgcggtatgcagcccgatacactcctgaacattcctgaattccctgccgataaccgcattcgtttacaacagttgctatggaaaaccgcccgcgatcaggacgaatttctgctgttgacgcgcaccggtgaaaaaatctggattaaagcctctatcagcccggtttatgacgtgctcgcgcatctgcagaacctggtaatgactttctcggatatcaccgaagaacggcaaatccgccagcttgaaggcaatattctcgccgccatgtgcagcagcccgccatttcatgaaatgggggaaatcatttgtcgtaacatcgaatctgttctcaacgaatcgcatgtttcgctgttcgcactgcgcaacgggatgccgatacactgggcgtcatcttcgcacggtgcagaagttcaaaatgcgcaaagctggtcagcgaccattcgtcagcgtgatggcgcgcctgcggggatcctgcaaattaaaacctcgtcaggagcagaaaccagcgcctttatcgaacgcgtggcagatatcagtcagcatatggccgcgctggcgctggaacaggaaaaaagccgccagcatattgaacaactcatccaatttgatccgatgaccggtctgccaaatcgcaataacctgcacaattacctcgatgacctggtcgacaaagccgtctctccggtggtgtatctcatcggtgttgaccatattcaggatgtgattgatagccttggctatgcgtgggccgatcaggcattgctggaagtggtcaatcgctttcgtggaaaactcaaaccggatcagtatctctgtcgtatcgaaggtacgcagtttgtcctcgtgagcctggaaaacgacgtcagtaacattacccagatcgccgatgagctacggaatgtggtcagcaagccgataatgattgacgataaaccattcccgcttaccttgagtattggcatcagctacgacgtgggtaaaaaccgcgattacctactctccactgctcacaatgcaatagattatattcgcaagaatggcggtaacggctggcagttcttcagcccggcgatgaacgaaatggtaaaagagcgtttggttttaggcgcagcgctgaaagaagcgattagcaataaccaactgaaacttgtttaccagccgcaaatcttcgcagaaacgggtgaactgtacggcatcgaagcccttgcgcgctggcacgatccccagcatggtcatgtgcccccttcacggtttattcctctcgcagaagagattggtgaaatcgaaaatattgggcgctgggtcatcgcggaagcttgccgtcagttagcagaatggcgtagccagaatattcatatcccggcgctttccgttaacttgtcggcactgcactttcgcagtaatcaactgcctaatcaggtgtctgatgcaatgcacgcctggggtattgacggccaccagctgacggtagaaatcacggaaagcatgatgatggaacacgataccgaaatctttaagcgcattcagatcctgcgtgatatgggcgtgggcttatcggtagatgattttggtacgggcttttccggattatcccgcttagtcagtcttccggtaacggaaatcaaaattgacaaaagttttgtcgatcgttgtctgaccgaaaaacgcatccttgccttacttgaagccattaccagcattgggcaaagcctcaatttaaccgtcgtggcggaaggcgtcgaaaccaaagagcaatttgagatgctacgcaagatccactgtcgcgttattcagggatatttcttttcccgccccctacccgccgaagaaattccaggctggatgagcagcgtgttaccgctgaaaatctga

SEQ ID NO: 459023 - DNA, 582 bp, Shigella boydii
atgttggataccaccgaactggttgatttagccgtaatcttccctgatctggagatcgaattgaaatacgcctgcgctgataacatcacaggtaaagctatttatcagcaagcgcgttgtctgctacacaaggatgcgattaccgcgctggcgaaaagtatcagtatcgcccagctgtcaggcttacaactggtgatttacgatgcgtatcgcccacaacaagcacaggcgatgttgtggcaagcctgcccagacccgcaatatgttgttgatgtgacggtcggttctaatcacagccgtggcacggcgatcgacctgacgcttcgtgatgagcacgggaacatcctcaatatgggcgcagggttcgatgaaatgcacgagcgctcccatgcctatcacccttccgtcccgcccgccgctcagcgcaatcggctgttgctgaatgcgattatgactggtggcggttttgtcggtatctccagcgaatggtggcacttcgaattaccccaggcagcgagttacccactgctcgctgatcaattcacctgttttatatcccctggcacacagcacgtcagttaa

SEQ ID NO: 459024 - DNA, 1551 bp, Shigella boydii
atgaagagatcgataccgtttcgtcctacattgctcgcgctcgtccttgccacaactttcccggttgcgcacgccgccgtaccgaaagatatgctggtgattggtaaggccgccgatccacaaaccctcgccccggcggtaacaatagataataacgactggacggtgacctacccgtcttatcagcggctggttcagtacaaaacggacggtgataaaggctcaaccgacgttgaaggcgatctggcaagtagctggaaagcgtctgacgatcaaaaagagtggacgttcaccctgaaggacaatgctaaatttgccgatggcacaccggtcactgccgaagcagtaaaactctcttttgagcggctactaaaaatcggccaggggccagcagaagcatttcccaaagatttaaagattgatgctcccgacgaacatacggtgaagtttacccttagccagccattcgcaccgttcctctacacgctggcgaatgacggtgcatccattatcaatccggcggtgttaaaggaacatgcagcggatgatgcccgcggcttcctcgcgcaaaataccgccggttccggaccatttatgctgaaaagctggcaaaaaggtcagcaattagttctggtgccaaatccgcattaccctggcaataaaccgaactttaagcgagtatcggtaaaaattattggtgaaagtgcctcccgtcgcctgcagctctcccgtggtgatattgacattgccgatgcgctgccggtggatcaactcaacgccctgaagcaggaaaacaaagtcaatgtggcagagtatccgtcactgcgcgtcacctacctgtatctgaataacagcaaagcgcctcttaatcaggcggatctgcgtcgggccatttcctggtctaccgattatcagggcatggttaacggcattctgagtggtaacggaaaacagatgcgcggcccgattccggaaggcatgtggggctacgatgcgacggcaatgcaatacaaccatgacgaaacgaaagccaaagccgaatgggataaagtgacgagcaaacccaccagcctgacgtttctctactccgataaggatccgaactgggagcctattgctctggcgacacaatccagtctcaacaagctggacatcaatgtgaagctggaaaaactggcgaacgccaccatgcgcgacagagtgggtaaaggtgattacgacattgcgattggcaactggagtccagattttgccgacccgtatatgtttatgaattactggtttgagtcagacaaaaaaggtctgccgggtaaccgctcgttctatgaaaacagtgaggtcgataagttactgcgcaatgcgcttgcgaccaccgaccagacgcagcgtacccgggactaccagcaggcacagaaaatcgtcattgatgacgctgcttatgtgtacctgttccagaaaaactaccaactggcgatgaacaaagaggtgaaaggctttgtgttcaatcccatgctggaacaggtcttcaatatcaataccatgagtaaataa

SEQ ID NO: 459025 - DNA, 345 bp, Shigella boydii
atgctggaacaattgagtgaagactacattcgtaccgcccgggccagcggcttgcccggctggtatatcgttttatgttatgcgctacccaatgcgttgatcccatcgattaccgtattgggtctggcgctgggcgatttgttgtatggcgcagtgctcaccgaaaccgtttttgcctggcccggaatgggtgcatgggtagtaacatcaatacaggcgctcgacttcccggcagtgatgggctttgccgtcgtggtttcatttgcttatgtgctggtcaacctggtggtggatttgctctatttgtggattgatccgcgtatcggacgtggaggtggtgaatga

SEQ ID NO: 459026 - DNA, 885 bp, Shigella boydii
atgatgctaagcgaggaaacgtccgccgtacgcccacaaaaacaaacgcgatttaacggtgcaaaactggtatggatgctgaaaggcagtccgctcaccgtgaccggcgcagtcatcattgtattaatgctattgatgatgtttttttcaccgtggcttgcgacgcatgatcccaacgccattgatttaaccgcccgccttttgccgccttctgcggcgcactggtttggcaccgatgaagtgggacgcgatctgttcagccgcgtactggtcggcagtcagcaatcaattctcgccggattagtcgtggttgccattgcgggtatgattggttcgctactcggtgtgcttggcggacgcgcagacgccatcatcatgcgcatcatggacattatgctgtcgattccttcgttggtactgacaatggcactggctgccgctctcgggccgagtttatttaacgccatgctggcgattgctattgtgcgaattcccttttatgtgcgcctggcgcgggggcaagcattagttgtacgccagtatacctatgttcaggcggcgaaaacctttggtgcgtcgcgttggcatctgatcagctggcatattttacgtaactccctgccgccgctgatcgtgcaggcatcgctggatatcggtagcgcgattttaatggccgccacgttgggatttattggcctgggtgctcaacaaccgagtgctgaatggggcgcgatggtagcgaatggtcgcaactatgtactcgatcagtggtggtattgcgcatttccgggggcagcgattttgcttaccgccgttgggtttaatctctttggtgatggtattcgcgatctgcttgacccgaaagcaggaggaaagcagtcatga

SEQ ID NO: 459027 - DNA, 987 bp, Shigella boydii
atgacccagcccgttctggacattcaacagctgcatttgagtttccccggttttaacggtgatgttcacgcgctcaacaatgtgtccttgcagattaaccgcggtgaaattgtcggtctggtgggagaatccggctcaggtaaatcagtcaccgcaatgctgattatgcgtctgctaccgacgggcagttattgcgtacatcgggggcagatttcactgctgggagacgatgttcttaacgctcgggaaaaacagcttcgtcagtggcgcggcgcacgagtggcgatgatctttcaggaaccgatgaccgccctcaatccgacacgtcgaataggtcttcagatgatggacgtgatccgccatcatcaaccaataagtcgtcgggaagccagagctaaagcgattgtcctgctggaagagatgcaaatcccggatgccgtggaagttatgtcgcgctatccgtttgagctttcaggtggtatgcgccagcgggtaatgattgcgctggcattctcctgcgagccgcaattgattattgccgacgaaccgactacggcgctggacgtcacggtgcagttgcaggtactgcgtttgcttaaacataaagcccgcgccagtggaactgcggttctgttcatcagccatgatatggccgtggtgtcgcaactgtgcgatagcgtttacgtgatgtatgccggaagcgtaattgaaagcggcgtgagggcagacgttatccatcatccccggcatccgtataccattggtttgctccaatgtgcaccagaacatggagtaccacgccagctattacccgccattccagggacggtaccaaacctcacccatttgcctgacggctgcgcttttcgcgatcgttgctatgcggcaggtgcacagtgtgaaaacgtcccggcgctgacagcgtgtggtgacaacaaccagcgctgcgcctgttggtatccgcagcaggaggtcataagtgtctga

SEQ ID NO: 459028 - DNA, 927 bp, Shigella boydii
gtgtctgacacgttattaacgttacgcggcgtccatatcaatttcccggcccgtaaaaactggcttggtaaaactacggaacatgttcatgcgattaatggtattgatttacagatccgccgtggtgaaaccttagggatcgtcggcgagtcaggctgcggcaaaagcaccctcgcacagcttttaatgggtatgctgcaaccgagccacgggcagtacatccgttctggctcacaacgcattatgcagatggtgtttcaggacccgctctcttcgctcaatccgcgcttaccggtgtggcgcatcatcacagaaccgctctggatagctaagcatagtagtgaacaacagcggcgagcgttggcagaggagctggctgtgcaggtgggtattcgtccggagtatctcgaccgcctgcctcatgcgttctccggcgggcagcggcaacgtatcgccattgccagagcactctcttcgcagcctgacgtgattgtgcttgatgagccaacctctgcgctggatatctccgtgcaggcgcagatcctcaatttactggtaacgctacaggaaaatcacgggctgacctatgtgctgatttcacacaatgtctcggtgatacgtcatatgagcgatcgggtggcggtgatgtatctcgggcagattgtagaactgggcgacgcgcaacaggtgctaacggctccggcacatccatacacccgattattgctggattccctccccgccattgataaaccgctggaggaagaatgggcattacgtaaaacggatctgccgggaaaccgcacgttgccgcaaggctgttttttctacgaacgttgcccccttgcaaccagcggatgtgaagtccggcaatcattagcaataagggaggacggacgtgagctccggtgctggcgggcgctgtag

SEQ ID NO: 459029 - DNA, 432 bp, Shigella boydii
atgacaatccataagaaaggtcaggcacactgggaaggcgatatcaaacgcgggaagggaacagtatccaccgagagtggcgtgctgaaccaacagccgtatggatttaacacgcgttttgaaggcgaaaaaggaactaaccctgaagaactgattggcgcagcgcatgccgcatgtttctcaatggcgctttcattcatgctgggggaagcgggatttacgccaacatcgattgataccatcgccgatgtgtcgctggataaagtggatgccggttttgcgattacgaaaatcgcactgaagagtgaagttgcggtgccgggtattgatgcctctacctttgacggcatcatccagaaagcaaaagcaggatgcccggtctctcaggtactgaaagcggaaattacgctggattaccagttgaaatcgtaa

SEQ ID NO: 459030 - DNA, 216 bp, Shigella boydii; identical to SEQ ID NO: 262705

SEQ ID NO: 459031 - DNA, 138 bp, Shigella boydii; identical to SEQ ID NO: 262704

SEQ ID NO: 459032 - DNA, 1698 bp, Shigella boydii
atggaaccaaaaacaaaaaaacagcgttcgctttatatcccttacgctggccctgtactgctggaatttccgttgttgaataaaggcagtgccttcagcatggaagaacgccgtaacttcaacctgctggggttactgccggaagtggtcgaaaccatcgaagaacaagcggaacgagcatggatccagtatcagggattcaaaaccgaaatcgacaaacacatctacctgcgtaacatccaggacaccaacgaaaccctcttctaccgtctggtaaacaatcatcttgatgagatgatgcctgttatttataccccaaccgtcggcgcagcctgtgagcgtttttctgagatctaccgccgttcacgcggcgtgtttatttcttaccagaaccgccacaatatggacgatattctgcaaaacgtaccgaaccataatatcaaagtgattgtggtgactgacggtgaacgtattctggggcttggtgaccagggcatcggcgggatgggcattccgatcggtaaactgtcgctctataccgcctgtggcggcatcagcccggcgtatacccttccggtggtgctggatgtcggaacgaacaaccaacagctgcttaacgatccgctgtatatgggctggcgtaatccgcgtatcattgacgacgaatactatgaattcgttgatgaatttatccaagctgtgaaacaacgctggccagacgtgctgttgcagtttgaagactttgctcaaaaaaatgcgatgccgttacttaaccgctatcgcaatgaaatttgttcttttaacgatgacattcagggcactgcggcggtaacagtcggcacactgatcgcagcaagccgagcggcaggtggtcagttaagcgagaaaaaaatcgtcttccttggtgcaggttcagcgggatgcggcattgccgaaatgatcatcgcccagacccagcgcgaaggattaagcgaggaagcggcgcggcagaaagtctttatggtcgatcgctttggcctgctgacggacaagatgccgaacctgctgcctttccagaccaaactggtgcagaaacgcgaaaacctcagtgactgggataccgacagcgatgtgctgtcactgctggatgtggtgcgcaatgtaaaaccagatattctgattggcgtctcaggacagaccgggctgtttacggaagagatcatccgtgagatgcataaacactgtccgcgtccgatcgtgatgccgctgtctaacccgacgtcacgcgtggaagccacaccgcaggacattatcgcctggaccgaaggtaacgcgctggtcgccactggcagcccgtttaatccagtggtatggaaagataaaatctaccctatcgcccagtgtaacaacgcctttattttccctggcatcgggctgggtgttattgcttccggcgcgtcacgtatcaccgatgagatgctgatgtcagcaagtgaaacgcttgctcagtattcgccgctggtgctgaacggcgaaggtctggtactaccggaactgaaagatattcagaaagtctcccgcgcaattgcgtttgcggttggcaaaatggcgcagcagcaaggcgtggcggtgaaaacgtctgctgaagctttgcaacaagccattgacgataatttctggcaagccgaataccgcgactaccgccgtacctccatctaa

SEQ ID NO: 459033 - DNA, 312 bp, Shigella boydii
atggcggaagagtgcatcgtggtcgccgattacgcggtaaaagtgccagatggtctggactcggcggcggccaacagcattacctgtgcgggggtcaccacctacaaagccgttaaactgtcaaaaattcgtcccggtcagtggattgctatctacggtcttggcggtctgggtaacctcgccctgcaatacgcgaagaatgtctttaacgccaaagtgatcgccattgatgtcaatgatgagcagttaaaactggcaaccgaaatgggtgcagatttagcgattaactcacgcaccgaagacgccgcctaa

SEQ ID NO: 459034 - DNA, 348 bp, Shigella boydii
gtgcaggagaaaaccggtggcgctcacgctgcggtggtaacagcagtagctaaagctgcgtttaactcggcagttgatgctgtccgtgcaggcggtcgtgttgtggctgtcggtctgccgccggagtctatgagcctggatatcccacgtcttgtgctggatggcattgaagtggtcggttcgctggtcggcacgcgccaggatctaaccgaagccttccagtttgccgccgaaggcaaagttgtgccgaaagtcgccctgcgtccgttagcggacatcaacaccatctttaccgagatggaagaaggcaaaatccgtggccgtatggtgattgatttccgtcactaa

SEQ ID NO: 459035 - DNA, 285 bp, Shigella boydii
atgaaaatggccaatcatccccgcccgggggacattattcaggaatcactggacgaacttaatgtcagcctgcgcgagtttgccagagcaatggaaattgcgccctcaacggcaagccgattgctgaccggaaaagcagctttgacgccagaaatggcaattaaactttccgtggtgatcggcagttcgccgcaaatgtggctgaatctgcaaaacgcctggagtctggcagaggctgaaaaaacggtggatgtgtcgcgactgcgccgtctggttacgcaataa

SEQ ID NO: 459036 - DNA, 654 bp, Shigella boydii
atgagtaagtcgaaaatgattgtgcgcaccaaatttattgatcgcgcctgtcactggaccgtggtgatttgcttcttcctggtggcgctgtccgggatttcgttcttcttcccgacgctgcaatggctgacgcaaaccttcggtacgccgcagatgggacgcattttgcacccgttcttcggcattgcgattttcgtcgcgctgatgtttatgtttgtgcgttttgtgcatcacaacatcccggataagaaagatattccgtggctattgaacattgtcgaagtattaaaaggcaatgagcacaaagtggcggatgttggtaagtacaacgccgggcaaaagatgatgttctggtcgatcatgagcatgattttcgtgctgttggtgaccggggtgattatctggcgtccgtactttgcgcagtacttcccgatgcaggttgttcgctacagcctgctgatccacgcggctgccggtatcatcctgatccacgccatcctgatccatatgtatatggcattctgggtgaaaggatcgattaaagggatgatcgaagggaaggtaagccgtcgctgggcgaagaaacaccatccgcgctggtatcgtgaaatcgagaaggcagaagcgaaaaaagagagtgaagaagggatataa

SEQ ID NO: 459037 - DNA, 885 bp, Shigella boydii
atggctatggaaacgcaggacattatcaaaaggtccgcaactaactccatcacgccgccttctcaggtgcgtgattacaaagcagaagtcgcaaaacttatcgacgtttccacctgtatcggctgtaaagcctgtcaggtggcgtgttcggagtggaacgacatccgtgatgaagtggggcactgcgtcggggtttacgataaccccgccgatctgagcgccaagtcctggacggtgatgcgctttagcgaaaccgaacagaacggcaagctggagtggctgatccgtaaagacggctgtatgcactgtgaagatcccggctgcctgaaggcgtgcccgtctgctggtgcaatcattcagtacgctaacgggattgtcgatttccagtcggaaaactgcatcggctgtggttactgcattgccgggtgtccgtttaatattccgcgcctcaacaaagaggataaccgggtatataaatgcacgctctgcgtcgatcgcgtcagcgtcggccaggaaccggcttgtgtgaaaacctgtccgaccggggctatccacttcggcaccaagaaggagatgctggagctggcggaacagcgcgtggcgaaactgaaagcgcgtggttacgaacatgctggcgtctacaacccggatggggtcggtggtacgcacgttatgtacgtgctgcatcacgccgatcagccggagctgtatcacggtctgccgaaagatccgaagatcgacacctcggtaagcctgtggaaaggcgcgttgaaaccgctggcagcggctggctttattgccacttttgccgggttgattttccactacatcggtattggcccgaataaggaagtggacgatgacgaggaggatcatcatgagtaa

SEQ ID NO: 459038 - DNA, 2412 bp, Shigella boydii
atgaccaaccactgggtggatatcaaaaacgctaacgtcgtaatggtaatgggcggtaacgctgctgaagcgcatcccgtcggtttccgctgggcgatggaagcgaaaaacaacaacgatgcaaccttgatcgctgtcgatcctcgttttacgcgtaccgcttctgtggcggatatttacgcacctattcgttccggtacggacattacgttcctgtctggcgttttgcgctacctgatcgaaaacaacaaaatcaacgccgaatacgttaaacattacaccaacgccagcctgctggtgcgtgatgattttgctttcgaagacggcctgttcagcggctacgacgctgaaaaacgccagtatgataagtcgtcctggaactatcagttcgatgaaaacggctatgcaaaacgcgatgaaacactgactcatccgcgctgtgtgtggaacctgctgaaagcgcacgtttcccgctacacgccggacgtcgttgaaaacatctgcggtacgccaaaagccgacttcctgaaagtgtgtgaagtgctggcctccaccagcgcaccggatcgcacaaccaccttcctgtacgcgctgggctggacgcagcacaccgtgggtgcgcagaacatccgtactatggcgatgatccagttgctgctcggtaacatgggtatggccggtggcggcgtgaacgcattgcgtggtcactccaacattcaggggctgactgacttaggtctgctctctaccagcctgccaggttatctgacgcttccgtcagaaaaacaggttgatttgcagtcgtatctggaagcgaacacgccgaaagcgacgctggctggtcaggtgaactactggagcaactatccgaagttcttcgttagcctgatgaaatctttctatggcgatgccgcgcagaaagagaacaactggggctatgactggctgccgaagtgggaccagacctacgacgtcatcaagtatttcaacatgatggacgaaggcaaagtcaccggttatttctgccagggctttaacccggttgcgtccttcccggacaaaaacaaagtggtgagctgcctgagcaagctgaagtacatggtggttatcgatccgctggtgactgaaacctctaccttctggcagaaccacggcgagtcgaacgatgtcgatccggcgtctattcagactgaagtattccgtctgccttcgacctgctttgccgaagaagatggttctatcgctaactccggtcgctggttgcagtggcactggaaaggtcaggacgcgccgggcgaagcgcgtaacgacggcgaaattctggcgggtatctaccatcatctgcgcgagctgtaccaggccgaaggtggtaaaggcgtagaaccgctgatgaagatgagctggaactacaagcagccgcacgaaccgcaatctgacgaagtggctaaagagaacaacggctacgcgctggaagatctctatgacgctaatggcgtgcttattgcgaagaaaggtcagttgctgagtagctttgcgcatctgcgtgatgacggtacaaccgcatcttcttgctggatctacaccggtagctggacagagcagggcaaccagatggctaaccgcgataactccgacccgtccggtctggggaatacgctgggatgggcctgggcgtggccgctcaaccgtcgcgtgctgtacaaccgtgcttcggcggatatcaacggtaaaccgtgggatccgaaacggatgctgatccagtggaacggcagcaagtggacgggtaacgatattcctgacttcggcaatgccgcaccgggtacgccaaccgggccgtttatcatgcagccggaagggatgggacgcctgtttgccatcaacaaaatggcggaaggtccgttcccggaacactacgagccgattgaaacgccgctgggcactaacccgctgcatccgaacgtggtgtctaacccggttgttcgtctgtatgaacaagacgcgctgcggatgggtaaaaaagagcagttcccgtatgtgggtacgacctatcgtctgaccgagcacttccacacctggaccaagcacgcattgctcaacgcaattgctcagccggaacagtttgtggaaatcagcgaaacgctggcggcggcgaaaggcattaataatggcgatcgtgtcactgtctccagcaagcgtggctttatccgcgcggtggctgtggtaacgcgtcgtctgaaaccgctgaatgtaaatggtcagcaggttgaaacggtgggtattccaatccactggggctttgagggtgtcgcgcgtaaaggttatatcgctaacactctgacgccgaatgtcggtgatgcaaactcgcaaacgccggaatataaagcgttcttagtcaacatcgagaaggcgtaa

SEQ ID NO: 459039 - DNA, 588 bp, Shigella boydii
atggacgtcagtcgcagacaattttttaaaatctgcgcgggcggtatggctggaacaacggtagcggcattgggctttgcccctaaacaagcactggctcaggcgcgaaactacaaattattacgcgctaaagagatccgtaacacctgcacatactgttccgtaggttgcgggctattgatgtatagcctgggtgatggcgcgaaaaacgccagagaagcgatttatcacattgaaggtgacccggatcatccggtaagccgtggtgcgctgtgcccaaaaggggccggtttgctggattacgtcaacagcgaaaaccgtctgcgctacccggaatatcgtgcgccaggttctgacaaatggcagcgcattagctgggaagaagcattctcccgtattgcaaagctgatgaaagctgaccgtgacgctaactttattgaaaagaacgagcagggcgtaacggtaaaccgttggctttctaccggtatgctgtgtgcctccggtgccagcaacgaaaccgggatgctgacacagaaatttgcccgctccctcgggatgctggcggtagacaaccaagcgcgcgtctga

SEQ ID NO: 459040 - DNA, 432 bp, Shigella boydii
atggtaggattgattcgcggtgtcagcgaggggctcggcccggtcggcggcgcagctgctatctattcattaagcgggctgctgttaatcttcacggttggatttccgcgtattcggcagattccgaaaggctatttactcgccgggagtctgttattcgtcagctatgaaatctgtctggcgctttccttagggtatgcggcgacccgtcatcaggcgattgaagtgggtatggtgaactatctgtggcccagcctgacaattctctttgccattctgtttaatggtcagaaaaccaactggctgattgtaccaggattattattagccctggtcggcgtctgctgggtgttaggcggtgagaatgggttacattatgatgaaatcatcaataatatcaccaccagcccggtaatgctgccaacttactga

SEQ ID NO: 459041 - DNA, 237 bp, Shigella boydii
atgctcgatgaaccgacgcgcggtattgatgtcggggcgaagtttgaaatttatcagttaattgccgaactggcgaagaaaggcaaagggattattattatctcctctgaaatgcctgagttgttagggataacagaccgtattctggtcatgagcaacggtctcgtttccggaattgtcgacacaaaaacaacaacgcaaaacgaaattctgcgtcttgcgtctttgcacctttaa

SEQ ID NO: 459042 - DNA, 1011 bp, Shigella boydii
atgagtgcgttaaataagaaaagttttcttacttacctgaaagagggcggtatttacgtcgttcttttagttttgctggcgattattattttccaggacccaacatttttaagtctgttgaacttaagtaatattctcacccagtcatcggtgcgtattattatcgcgctcggtgtggcagggttaattgtcacccaggggaccgacctttctgcggggcgtcaagtagggctggcggcagtggtggcagcgacattattgcagtccatggataacgccaacaaagtgttcccggaaatggcgacgatgccgattgcgctggttattctgattgtctgtgccattggtgcggtgatcggtttgatcaacggtctgattatcgcttatctcaacgtgacgccgttcattaccacgctcggcacgatgatcatcgtctatggcatcaactcgctctattacgactttgtcggggcgtcgccaatttctggttttgacagtggcttctctacctttgctcagggctttgtcgcgctggggagtttccgtctctcttacatcaccttctacgcgttgattgcggtggcgttcgtctgggtgttgtggaacaaaacccgcttcggtaagaacatttttgccattggcggtaacccggaagcggcaaaagtatctggtgtcaacgtcggcctgaacctgctgatgatctacgcgttgtctggtgtgttctatgccttcggcgggatgttagaagccggacgtatcggctctgccaccaacaacctcggctttatgtatgaactggatgctatcgcggcgtgcgtggtaggcggtgtatcgttcagcggcggtgtggggacggtgattggcgtggtgaccggggtaattatttttaccgtcatcaactatggcctgacgtatatcggcgtaaacccatactggcagtacatcatcaaaggggcgattattatcttcgccgtagcgctggattcactgaaatacgcgcgtaagaagtga

SEQ ID NO: 459043 - DNA, 1236 bp, Shigella boydii
atgttaacgaaagatctttcgattactttttgcggcgtgaagtttcccaacccgttctgcctctcttcttcgccggtaggcaactgctatgagatgtgtgccaaagcctacgacacaggttggggcggtgtggtgtttaaaacgatcggcttttttaccgccaacgaagtctcgccgcgttttgatcatctggtgaaagaagataccggttttatcggcttcaaaaatatggagcagattgctgaacatccgttggaagagaatctggccgccctgcgtcggctgaaggaagattacccggacaaagtattgatcgcttcgatcatgggggaaaatgagcagcaatgggaggagctggcgcgcctggtgcaagaagctggcgcggatatgatcgagtgtaacttctcctgtccgcaaatgacttctcatgcgatgggtagcgatgtcgggcaaagcccggagctggtagaaaaatattgtcgggcagtgaaacggggttccacgctgccaatgctggcgaagatgacgccgaatatcggtgatatgtgcgaagtggcgctggcggcgaagcgcggcggcgcagatggcattgcggcgattaacaccgttaaatccatcaccaatatcgatcttaatcagaaaatcggtatgccgatcgttaacggaaaatcgagtatttccggatattccggtaaagcggtaaaaccgatcgccctgcgcttcattcagcaaatgcgcacccatccagaactgcgcgatttcccaatcagcggtatcggcggcattgaaacctgggaggatgcggcggagtttttattgctcggcgcagcaacgttacaggtcaccaccggcattatgcagtacggctatcgcatcgtagaagatatggcgagcgggttgtcgcattatctcgccgatcagggatttgattcgttgcaggagatggtaggtctggcgaataacaatattgtcccggcggaagatttagaccgcagttatattgtctatccccgtatcaatcttgataaatgtgttggctgtggacgctgttatatttcctgttacgacggcggtcaccaggcgatggaatggagcgagaaaacccgcacaccgcattgtaataccgagaaatgtgtgggttgtctgctttgtggccacgtctgcccggtgggttgtattgatctcggagaagtgaagtttaagaagggagagaaagaacacccggtaacgttgtaa

SEQ ID NO: 459044 - DNA, 1239 bp, Shigella boydii
atgccgcaacaaaattatctggatgaactcactccggcttttacgcctttactggcgattaaagaagcctctcgctgtttattatgtcatgacgctccctgtagtcaggcttgcccggcacagaccgatccggggaaatttattcgctcaatctactttcgtaattttaaaggcgctgccgagacaattcgcgaaaataatgccctcggtgccgtttgtgccagagtgtgcccgacggagaaattatgtcaaagcggttgtacccgtgccggtgttgatgctcccattgatatcggccgcttacagcgttttgttactgattttgaacaacaaaccgggatggaaatttatcagcccggtactaaaacgctcggcaaagtcgcgattattggcgcaggtcctgccggattgcaggccagtgtgacactgacaaaccagggttatgacgtcacgatttatgagaaagaagcgcaccccggtggctggttgcgtaacggtattccgcaattccggttaccgcaatcagtgctggatgcagagatcgcccgtattgaaaaaatgggcgtgaccattaagtgcaataacgaaatcggtaaaacactcaccctggagcaactgaaagcggaaaaccgcgcggtactggtcaccgtggggttatcaagcggttccgggctaccgctgtttgagcatagcgacgttgagattgccgtcgacttcctgcaacgtgtacgacaggcgcaaggcgatatcagcattccacaaagcgcattaattatcggtggcggtgatgtcgcgatggacgtagccagcacgctgaaagttctcggctgtcaggcggtaacttgcgtagcgcgtgaagagttagatgagtttccggcaagcgaaaaagagtttaccagcgcccaagagctgggcgtttcgatcatcgatggattcacgccagtagccgtggaaggcaataaagtcacgtttaagcatgtacggttaccgggcgaactgacgatggcggcagataaaattattctcgccgtcggtcagcatgccagactggatgcctttgcggagttagagccgcagcgtaacactatcaatacacaaaattaccagacccgcgatccgcaagtctttgctgcgggcgatattgttgagggtgacaaaaccgtggtctatgccgtgaaaaccgggaaagaagccgccgaggcgattcatcactatttagagggagcttgctcatgttaa

SEQ ID NO: 459045 - DNA, 240 bp, Shigella boydii
atggatgtacagcagttttttgtcgttgccgtttttttccttatcccgatattttgtttccgcgaagcatggaaaggctggcgcgcaggcgcgattgataaacgggttaaaaatgcaccggaaccggtgtatgtctggcgagcaaaaaatcccggactctttttcgcttatatggtggcatatatcggcttcgggattttatctatcggcatgattgtttatcttattttctatcgttaa

SEQ ID NO: 459046 - DNA, 720 bp, Shigella boydii
atgttaaagcgcgtgttcctcagcctgttagtccttatcggcttgctgctgttgactgtgctcggcctcgatcgctggatgagctggaaaaccgcgccttatatctacgacgaattgcaggatctcccctaccgccaggtcggtgtggtgctcggaacagcaaaatattatcgtactggcgtaattaatcagtattatcgctaccgcattcaaggagcgattaatgcctataacagcggtaaggtaaattatctattactgagcggcgataacgcattgcaaagttataatgagccgatgaccatgcgcaaagatttaatcgctgctggtgtcgccccatcagatattgttctcgattacgcaggctttcgtacgctggattccatagtgcgtacacgcaaagttttcgatactaatgatttcattattatcacccaacgtttccactgtgagcgggcattatttattgcgctgcatatggggattcaggctcagtgttatgccgtaccgtcaccgaaagatatgctgtcagtacgtattcgcgaatttgccgcccgtttcggtgcgctggctgacctttatatttttaaacgtgaaccgcgttttttagggccgctggtccctattccggctatgcaccaggtgccggaagatgcgcaggggtatcccgccgtcacacccgaacagttacttgaattacaaaagaaacaaggaaagtag

SEQ ID NO: 459047 - DNA, 885 bp, Shigella boydii
atgcatccacgttttcaaaccgcttttgcccaacttgcggataacttgcaatctgcactggaacctattctggcagacaagtacttccccgctttgttgaccggggagcaagtctcatcgctgaagagcgcaacggggctggacgaagacgcgctggcattcgcactacttccgctggcggcggcctgtgcgcgtacgccattgtcgaattttaatgttggcgcaattgcgcgcggtgtgagcggaacctggtattttggtgccaatatggaatttattggtgcgacaatgcagcaaaccgttcatgccgaacaaagcgcgatcagccacgcctggttgagtggtgaaaaagcgcttgcagccatcaccgttaactacacgccttgtggtcactgccgtcagtttatgaatgaactgaacagcggtctggatctgcgtattcatctgccgggccgcgaggcacacgcgctacgtgactatctgccggatgcctttgggccgaaagatctggagattaaaacgctgctgatggacgagcaggatcacggctatgcgctgactggtgatgcgctttctcaggcggcgattgcggcggcaaaccgttcgcacatgccttacagtaagtcgccaagcggtgtcgcgctggaatgtaaagacggtcgtattttcagcggcagctacgctgaaaacgccgcattcaacccgactctgccaccgttgcagggagcgttaattctgttgaatctcaagggttatgattacccggatatccagcgcgcggttctggcagaaaaagccgatgcgccgttgattcagtgggatgccacctccgcaacgctgaaagcgctcggctgtcacagtatcgaccgcgtgcttctcgcttaa

SEQ ID NO: 459048 - DNA, 696 bp, Shigella boydii
atgatggcgaatatctggtggtcattaccgctgacgttgattgtcttttttgccgcccgcaaactggcggcacggtataagtttcccctgcttaacccgttgctggtagcaatggtggtgatcattccttttttaatgctgaccggcatctcttacgacagttactttaaaggtagcgaagtgctaaacgatctgctgcaaccggcggtcgtcgcgctggcctatcctttatatgagcagctacaccagatccgcgcgcgctggaaatcgatcatcaccatctgttttatcggcagcgtggttgcgatggtgacggggacttccgtggcattgttgatgggcgcttcaccggaaatcgccgcgtcaatcctgccgaaatcagtcaccacgcctattgcaatggcggttggcggcagtattggcggtattccggcaatcagcgcagtttgcgtgattttcgtcggcatcctcggcgcggtatttggccatacattgcttaatgcgatgcgtattcgtaccaaagctgcgcgcggtctggcaatggggactgcctcgcacgccctcggtacagcgcgctgcgccgagctggattatcaggaaggtgcatttagttcgctagcgctggtgttatgcgggataattacttcgctgatcgcaccgttccttttcccgattattctggcagtaatgggctaa

SEQ ID NO: 459049 - DNA, 399 bp, Shigella boydii
atgagtaagacactgaacattatctggcaatatttacgcgctttcgtcctgatttatgcctgcctgtatgcaggcattttcattgcttccctgctaccggtaaccattccgggcagcatcatcgggatgctgatcctgtttgtcctgctggccttgcaaattcttccggcaaaatgggtcaatccggggtgctacgtactgattcgctatatggcgctattgtttgtgccgattggcgtaggcgtcatgcaatattttgatttgctccgcgcgcagtttggcccggtagtggtttcctgtgctgtcagtacgctggtggtttttctggtggtgagctggagttcacaactggtacacggcgaacgtaaagtcgtaggtcagaaaggatcagaagaatga

SEQ ID NO: 459050 - DNA, 747 bp, Shigella boydii
atggcgcctcatttttttgcgggtgaagatatgcgtgtgttactggctccgatggagggtgtgcttgctccgatggagggagtgcttgactctctggtgcgtgaattgctgaccgaagttaacgactacgatctgtgcatcaccgagtttgtccgcgtggtggatcaactgctgccggtaaaagtttttcatcgcatttgccctgagctacaaaacgccagccggacaccatccggtacgctggtgcgcgtgcagttgttgggtcagttcccacaatggctggcagagaacgccgcccgtgcggtggaattaggttcctggggcgtggatctcaattgcggttgcccgtcgaaaacggtcaacggtagcggtggtggggcgacgttactcaaagatcctgaactcatctaccagggtgcaaaagcgatgcgtgaagctgtaccggcgcatttgcccgtcagcgtgaaagtgcgtctgggctgggacagcggtgagaagaagtttgaaatcgccgatgcggttcaacaggctggtgctacggagctggtggtgcatggacggacaaaagagcagggttaccgcgcggagcatattgactggcaggcgattggcgagattcgccagcggctgaatattccggtgattgccaacggcgaaatctgggactggcagagtgcgcaacaatgcatggcgatcagcggctgcgacgcaggattggtcgcggggcgctcaatattcccaacctga

SEQ ID NO: 459051 - DNA, 222 bp, Shigella boydii
atgccgtggccggaggtggttgctttgctgcaaaaatatacccgtctggaaaagcagggcgataccgggttatatcacgtagcgcggattaaacagtggttgagttatttgcgtaaagaatacgatgaagcaacagaattatttcagcatgttcgggtgttgaataattcccatgatattgcaagggctattcaggcaattgatatcgataagctgcgataa

SEQ ID NO: 459052 - DNA, 1437 bp, Shigella boydii
atgaatcgtgattccttttatccagccatcgcctgttttccgctgttactgatgctggccgggtgtgcgcctatgcatgaaacccgccaggcgttaagccagcaaacgtccgctgcacaagttgacaccgcattacccacggcgctgaaaaatggttggccagacagccaatggtggctggagtatcacgataatcagctcacttcattaattaacaatgcactacagaacgcaccggatatgcaggtggctgaacagcgcattcagctagctgaagcccaggcgaaggcagttgccactcaggatggtccgcagatcgacttttcggcggatatggagcggcaaaaaatgtcggcagaagggctaatggggccgtttgctctgaacgatccggccgcaggtacgaccggtccgtggtacaccaacggaacttttggcttaacggcgggctggcatctcgatatctggggaaagaatcgggcggaggttactgcccgcctgggtacggttaaagcacgggcggcggaacgcgagcaaacccgccaattgctggctggcagcgtagcccgcctgtactgggagtggcaaacccaggcggcgttaaacacggtcttgcagcaaatagaaaaagagcagaacaccattatcgcgaccgatcgccagctatatcagaacgggattacttcttcagttgacggtgtggaaaccgatattaatgccagcaaaacccggcagcagctcaacgatgtcgcggggaaaatgaaaattattgaggcacggttaagcgcacttacaaatcaccagacaaagtcattgaagcttaaaccggtcgcgttgccgaaagtggcaagccagcttcctgatgaactggggtactccttactggcccggcgggcagatttgcaggcggcgcactggtacgttgagtcatcgctaagcaccattgatgcggcaaaagcggcattttatcctgacatcaacctgatggccttcctgcaacaggatgcgttgcacttaagcgatctgttccgtcattccgcgcagcaaatgggcgttacggcaggcctgacgctacctattttcgatagtggtcgtcttaacgccaatctcgatatcgcaaaagccgaaagcaacttgtctatcaccagctacaacaaagcggtggttgaagcggtgaatgacgtggcgcgggcagccagtcaggttcagacacttgcggagaaaaaccagcatcaggcgcaaattgagcgcgatgccttgcgtgtggtaggtcttgcgcaggcgcgctttaacgcgggcatcattgctggttcccgcgtcagcgaagccagaatccccgcgctgcgtgagcgggccaatggcctgttattgcaagggcagtggctggatgcttccattcaactcactggtgcgttgggcgggggttacaaacgctga

SEQ ID NO: 459053 - DNA, 762 bp, Shigella boydii
atggcacaggttgcgattattaccgcctccgattcggggatcggcaaagagtgcgcgttattactggcgcagcaggggtttgatattggtattacctggcactcagatgaagaaggggcaaaagatactgcgcgtgaggtagttagccacggcgtacgtgcggagattatgcagctggatctcggtaaactgccagaaggtgcgcaggcgctggagaaactcattcaacggctggggcgtattgatgtgctggtgaataatgcgggcgcaatgaccaaagcgccgtttcttgatatggctttcgatgagtggcgcaagatttttaccgttgatgtcgatggtgcatttttatgctcacaaattgcggcccgccagatggtgaaacaagggcagggcggtcgcatcatcaacattacgtcggtacatgaacatacgccgctgccggatgccagcgcctacacagccgctaaacatgcgctcggtgggttaaccaaagcgatggcgctggagctggtcaggcataagattttggtgaacgcagtcgcgcctggggcgatcgccacgccaatgaatggcatggatgacagcgacgtgaagcccgacgcggagccttcgattcctctgcggcgttttggcgcaacgcatgagattgccagcctggtagcgtggctgtgctcagagggcgcaaattacaccaccgggcagtcgttgatagtggatggcggctttatgttggcgaatccgcagttcaacccagaatag

SEQ ID NO: 459054 - DNA, 579 bp, Shigella boydii
atggatctcaatacactcatctcacaatatggttatgccgcgctggtgatcggtagcctggcggaaggtgaaaccgtgactttgctgggaggcgttgcggcacatcaggggctattaaagttcccgctggtggtactttctgtggcgcttggcggcatgattggcgaccaggtgctttatctgtgcggacggcggtttggcggcaagctgttacgccgtttctcgaaacatcaggataaaattgagcgggcgcagaaacttatccaacgccatccgtatctgtttgtcattggtacgcgctttatgtatggctttcgggtgattggcccgacgctgattggtgccagccagctgccgccgaaaatctttctgccgctgaatattctcggcgcatttgcctgggcgttgatttttaccactattggttacgctggtggtcaggtgattgcgccgtggttgcacaatctcgaccagcatttgaagcactgggtctggttgattctggtcgtggttctggtggtgggcgtgcgctggtggctgaaacggcgcgggaagaaaaagccggatcatcaggcgtaa

SEQ ID NO: 459055 - DNA, 576 bp, Shigella boydii
atgagccatgtctggggactgttttcccatcccgatcgtgaaatgcaggtgattaatcgcgaaaacgaaacgatttctcaccattacacccaccacgttttgctgatggcggcgattccggtgatttgcgccttcattggcactacacagattggctggaattttggcgatggcactatcctgaagttatcctggtttaccggactggcgctggctgtcctgttttatggcgttatgctggctggggttgcggtaatggggcgggtcatctggtggatggcgcgtaattatccgcagcgtcactgcatggtcttcgcgggctacgttgcaactccgctgtttttaagcggtctggtggcgctttatccgctggtctggttgtgtgcgctggtcggcacggtggcgctgttttacaccggctacctgctttaccttggtattccgagcttcctgaatatcaacaaagaggaaggccttagcttctctagttcgacgctggcgattggcgtgctggtactggaagtgctgctcgccctaaccgttatactatggggctacggttatcgtttgttctag

SEQ ID NO: 459056 - DNA, 933 bp, Shigella boydii
atgccgaaatttcgagtttctttatttagcctggccctgatgctggctgtgcctttggcaccgcaggccgttgcgaaaacggcagccgctaccaccgcttcacaaccggaaattgcctccggtagcgcgatgattgttgatctgaataccaacaaagtgatctattcgaaccacccggatctggtgcgtccgattgcgtctatcagcaaattaatgaccgcgatggttgtgctggatgcacgactgccgctggatgaaaaactaaaagtggatatcagccagacgccggagatgaaaggggtctattcgcgcgtacgactgaatagcgaaatcagccgtaaagatatgctgttgctggcgctgatgtcttcagaaaaccgcgcggcggcaagccttgcgcaccattatcccggtggttacaaagcctttattaaggcaatgaatgcgaaagcgaaatcgctcggaatgaacaacacgcgctttgttgaacctaccggattgtcggtgcataacgtttcaactgcccgtgacttaaccaaactgctcattgccagcaaacaatatccgttgatcgggcagttaagtactacccgggaagatatggcaatcttctctaacccgacgtatacgctgccgttccgcaatactaatcatctggtgtatcgcgataactggaatattcagttaaccaaaaccggctttaccaatgcggcgggccattgtctggtgatgcgtacggttatcaataataaaccggtggcgctggtagtgatggacgcgtttggcaaatatacccattttgccgatgccagccgcctgcgtacctggattgaaaccggtaaagtgatgcctgtgccggcagcagcgttgagctataaaaaacaaaaagccgcccaaatggcggcggcggggcagacggcacagaacgattaa

SEQ ID NO: 459057 - DNA, 1716 bp, Shigella boydii
atgtcttccatgacaacaactgataataaagcctttttgaatgaacttgcccgtctggtcggtcattcacacctgctcaccgatcccgcaaaaacggcccgctatcgcaagggcttccgttctggtcagggcgacgcgctggctgtcgttttccctggctcactactggaattgtggcgggtgctgaaagcctgcgtcaccgccgacaaaattattctgatgcaggctgccaatacaggcctgaccgaaggatcgacgccaaacggtaacgactatgatcgcgatatcgtgatcatcagcaccctgcgtctcgacaagctgcacgttctcggcaagggcgaacaggtgctggcctatccgggcaccacgctctattcgctggaaaaagccctcaaaccgctgggacgcgaaccgcactcagtgattggatcatcgtgtataggcgcatcggtcatcggtggtatttgtaacaactccggcggctcgctggtgcaacgtggcccggcgtataccgaaatgtcgttattcgcgcgtataaatgaagacggcaaactgacgctggtgaaccatctggggattgatctgggcgaaacgccggagcagatccttagcaagctggatgatgatcgcatcaaagatgacgatgtgcgtcacgatggtcgtcacgcccacgattatgactatgtccaccgcgttcgtgatattgaagccgacacgcccgcacgttataacgccgatccggatcggttatttgaatcttctggttgcgccgggaagctggccgtctttgcagtacgtcttgataccttcgaggcggaaaaaaatcagcaggtgttttatatcggcaccaaccagccggaagtgctgaccgaaatccgccgtcatattctggctaacttcgaaaatctgccggttgccggggaatatatgcaccgggatatctacgatattgcggaaaaatacggcaaagacaccttcctgatgattgataagttaggcaccgacaagatgccgttcttctttaatctcaagggacgcaccgatgcgatgctggagaaagtgaaattcttccgtccgcattttactgaccgtgcgatgcaaaaattcggtcacctgttccccagccatttaccgccgcgcatgaaaaactggcgcgataaatacgagcatcatctgctgttaaaaatggcgggcgatggcgtcggtgaagccaaatcgtggctggtagattatttcaaacaggccgaaggcgatttctttgtctgtacgccggaggaaggcagcaaagcgtttttacaccgtttcgccgctgcgggcgcagcaattcgttatcaggcggtgcattccgatgaagtcgaagacattctggcgttggatatcgctctgcggcgtaacgacaccgagtggtatgagcatttaccgccggagatcgacagccagctggtgcacaagctctattacggccattttatgtgctatgtcttccatcaggattacatagtgaaaaaaggcgtggatgtgcatgcgttaaaagaacagatgctggaactgctacagcagcgcggcgcgcagtaccctgccgagcataacgtcggtcatttgtataaagcaccggagacgttgcagaagttctatcgcgagaacgatccgaccaacagcatgaatccggggatcggtaaaaccagtaaacggaaaaactggcaggaagtggagtaa

SEQ ID NO: 459058 - DNA, 2268 bp, Shigella boydii
gtgagtctggccctgcagccagcactggcggatgatttattcggcaaccatccattaacgcccgaagcgcgggatgcgttcgtcaccgaactgcttaagaaaatgacagttgatgagaaaattggtcagctgcgcttaatcagcgtcggcccggataacccgaaagaggcgatccgcgagatgatcaaagacggtcaggttggggcgattttcaacaccgtaacccgtcaggatatccgcgccatgcaggatcaggtgatggaattaagccgcctgaaaattcctcttttctttgcttacgacgtgctgcacggtcagcgcacggtgttcccgattagcctcggtctggcctcgtcttttaacctcgatgcagtgaaaacggtcggacgtgtctctgcttatgaagcggcagatgatggcctgaatatgacctgggcaccgatggtcgatgtctcgcgcgatccgcgctggggacgtgcttccgaaggttttggcgaagatacgtatctcacctcaacaatgggtaaaaccatggtggaagcgatgcagggtaaaagcccggcagatcgctactcggtgatgaccagcgtcaaacactttgccgcatacggcgcggtagaaggcggtaaagagtacaacaccgtcgatatgagtccgcagcgcctgtttaatgattatatgccgccgtacaaagcggggctggacgcaggcagcggcgcggtgatggtggcgctgaactcgctgaacggcacgccagccacctccgattcctggctgctgaaagatgttctgcgcgaccagtggggctttaaaggcatcaccgtttccgatcacggtgcaatcaaagagctgattaaacatggcacggcggcagacccggaagatgcggtgcgcgtggcgctgaaatccggaatcaacatgagtatgagcgacgagtactactcgaagtatctgcctgggttgattaaatccggtaaagtgacgatggcagagctggacgatgctgcccgccatgtactgaacgttaaatatgatatggggttgtttaacgacccatacagccatctcggtccgaaagagtctgacccggtggataccaatgccgaaagccgcttgcaccgcaaagaagcgcgtgaagtggcgcgtgaaagcctggtgttgctgaaaaaccgtctcgaaacgttaccgctgaaaaaatccgcaaccattgcggtggttggcccgctggcagacagcaagcgtgacgtgatgggaagctggtcggcggcaggtgttgcagatcaatccgtgaccgtgctgaccgggattaaaaatgccgtcggtgaaaacggtaaagtgctgtatgccaaaggggcgaacgttaccagtgacaaaggcattatcgatttcctgaatcagtatgaagaagcggtcaaagtcgatccgcgttcgccgcaagagatgattgatgaagcggtgcagacggcgaaacaatctgatgtggtggtggctgtagtcggtgaagcacaggggatggcgcacgaggcctccagccgtaccgatattactattccgcaaagccaacgtgacttgattgcggcgctgaaagccaccggtaaaccgctggtgctggtgctgatgaacgggcgtccgctggcgctggtgaaagaagatcagcaggctgatgcgattctggaaacctggtttgcggggactgaaggcggtaatgcaattgccgatgtgttgtttggcgattacaacccgtccggcaagctgccgatgtccttcccgcgttctgtcgggcagatcccggtgtactacagccatctgaacaccggtcgtccgtataatgccgacaagccgaacaaatacacttcgcgttattttgatgaagctaacggggcgctttatccgttcggctatggtctgagctataccactttcaccgtctctgatgtgaaactttctgcgccgaccatgaagcgtgacggcaaagtgacggccagcgtgcaggtgatgaacaccggtaaacgcgaaggggccacggtagtgcagatgtacttgcaggatgtgacggcttccatgagtcgtccggtgaaacagctgaaaggctttgagaaaatcaccctgaaaccgggcgaaactcagaccgttagcttcccgattgatatcgaggcgctgaagttctggaatcaacagatgaaatatgacgccgagcctggcaagttcaatgtctttatcggcactgattccgcacgcgttaagaaaggcgagtttgagttgctgtaa

SEQ ID NO: 459059 - DNA, 603 bp, Shigella boydii
atgccactctcaaaggtctgggcaggttcactggttttgttggcagccgtgagcctgccgctgcacgcggcttcccccgttaaagtcggttcaaaaatcgatactgaaggcgcgctgctcggcaatatcattttgcaggtactggaaagccacggcgtaccgacggtcaataaagtgcaactcggaacgactcctgtggtgcgcggggcgattacttccggtgaactggatatctatccggaatataccggcaatggcgcgtttttctttaaagatgaaaacgatgcagcgtggaaaaacgcgcagcaaggttacgagaaagtcaaaaaactcgatgcagagcaaaacaagttaatctggctgacgcccgcacctgcaaataacacctggaccatcgccgtgcgtcaggatgtggcagagaaaaacaaactcacttcgcttgctgacctgagtcgttatctgaaagagggcgcaccttcaaactggcagcctcggcagagtttatcgaacgcgccgatgccttacccgcgtttgaaaaagcctatggctttaagctcggtcaggatcagttgctgtcactggctggtggcgacacggcggtga

SEQ ID NO: 459060 - DNA, 1158 bp, Shigella boydii
gtgacttatctacgtattaatcctgttctggcgctgctgctgttgctgacggcaatcgcagcagcgctgccgtttatcagctacgcgcctaatcgtttagtctcgggtgaagggcgtcatctctggcaactgtggccgcaaacgatctggatgctggtgggcgttggttgcgcctggctgacagcctgttttattcccgctaaaaaaggcagcatttttgcactcattctggcgcaattcgtcttcgtattgctggtgtggggagctggaaaggcggcgacccaactggcgcaaaatggcagtgcgctggcgcgtaccagcctcggcagtggtttctggctggctgcggcgctggcattgctggcctgtagcgatgccatccgccgaatctccacgcatccgctgtggcgctggttgttgcatatgcagattgccattattccgctgtggttgctttactccggcacgcttaacgatctctcgctaatgaaagaatacgccaaccgtcaggatgtgtttgacgacgcgctggctcaacatctgacgttgctgtttggtgcggtgctgcctgcgttagtgattggtgtgccattgggcatctggtgctacttttccaccgcgcggcagggggagattttttctctgctcaatgtcattcagaccgtgccttcggtggcgctctttggcctgttgattgcgccgcttgccgcgctggtgacggcctttccgtggctggggaagctcggcatagcaggaaccggaatgacacccgcactgattgcgctggtgctctatgccttgctgccgctggtgcgcggcgtggtagtaggcttgaaccagatcccgcgcgatgtgctggagagcgccagagcgatggggatgagcggggcgcagcgattcctgcatgttcagttaccgctggcgttaccggtatttctgcgcagcctgcgggtggtgatggtgcaaattgtaggcatggcggtgattgcggcgttaatcggcgcaggcggttttggtgcgctggttttccaggggctgctaagcagcgccattgatttagtgttgctgggggtgatcccggtaattgttctggcggtgctgatcgatgcgctgttcgatttacttatcgcactgttgaaggtgaaacgtaatgattga

SEQ ID NO: 459061 - DNA, 927 bp, Shigella boydii
atgattgaatttagccatgtcagcaaactgtttggcgcacaaaaagccgttaacgatctcaatctcaattttcaggaagggagtttttcggtgctgattggcacatctggctccggcaaatccaccaccctgaaaatgattaaccgcctggtggaacatgacagcggagagatccgctttgccggagaagaaattcgctcgctgccagtactggagttgcgccgccgtatgggctatgccattcaatctattggcctgtttccccactggagcgtggcacaaaacattgccaccgtgccgcaattacaaaaatggtcgcgggcgaggattgacgatcgtatcgacgaattaatggcgctactggggctggagtcaaatttacgtgagcgttatccgcatcagctttccggtggtcagcagcaacgtgtgggagtagcgcgcgcactggctgccgatccgcaagtcttactgatggatgaaccttttggcgcactggacccggtaacgcgcggcgcgttgcaacaagagatgacgcgcattcaccgtttgctggggcgtaccattgtgctggttactcatgatattgatgaggcgctacggctggcagaacatctggtattgatggatcacggtgaagtggtgcagcaggggaatccgctgacgatgctgactcgtccggcgaatgattttgtccgccagttttttggacgtagtgaactgggtgtgcgcctgctttcgttacgtagtgtggcggattacgtgcgtcgcgaagaacgggcagaaggtgaggcactggcagaagagatgacgctgcgcgatgcgctctccctgtttgtcgcgcggggatgcgaggtgctgccggtggtgaacacgcagggccagcctagcggcacgctgcattttcaggatctgctggaggaggcgtaa

SEQ ID NO: 459062 - DNA, 732 bp, Shigella boydii
atgaagatgttgcgcgatccgctgttctggctcattgctttgtttgtggcactgattttctggctgccttacagccagccgctgtttgctgccttgttccctcaactgccacgacccgtttatcagcaagaaagttttgccgctctggcactggctcatttctggctggtgggaatttcgagtttgtttgcggtgatcattggtactggtgccggaattgctgtcactcgcccgtggggcgcggaatttcgcccactggtggaaactattgccgccgttggacagacttttccgcccgtcgcagtgctggcgatcgccgttccggtgatcgggtttggtctgcaaccagcgattatcgccttgatcctttacggtgtgctgcccgtcctgcaggcgacacttgccgggctgggagcgattgatgccagcgtgacagaagttgcgaaaggtatgggaatgagtcgtggtcagcgactgcgtaaggtcgagctaccgctggcggctccggtgattctggcgggcgtgcgaacttcggtgattatcaacattggtacggcgacgatcgcctcaacggtaggggccagcacgctgggtacgcccatcatcatcgggcttagcggatttaataccgcgtatgtgatccagggggcgttactggtggcactggcggcgatcatcgcagaccgcctgtttgaaaggctggtgcaggcgcttagccagcacgcaaaataa

SEQ ID NO: 459063 - DNA, 420 bp, Shigella boydii
atggaacagaaagcattatctgcagaaccccgcagatcattttcaaatgagtttaaacttcaaatggttaaactggcttcacaaccaggagcctctgttgcccgtattgcccgggaacacgatatcaatgataacctgctgttcaaatggctcaggctctggcagaacgaagggcgcatatcgcggcgtcttccggtaacaacctcttctgacactggcgttgaattattacctgtggagataacgccggatgagccgaaagaaccggtggctgctcttactccgtctttatctactcagactacagttagtgccagctcctgcaaggtggagttccgtcacggtaacatgacgctggaaaatccttcaccagagctgctcacagtgttgatccgtgaactgaccgggaggggacgatga

SEQ ID NO: 459064 - DNA, 1920 bp, Shigella boydii
atgagtggcgcttttaacaacgatggtcggggcatatctcccttaattgcaacctcctgggagcgatgcaataagctgatgaaacgggagacatggagcgtaccacatcaggcccagggcgtgacatttgcttctatttatcggcgtaagaaagcgatgctgacgctcgggcaggctgcgctggaagatgcctgggaatatatggcaccgcgagagtgtgcgctgtttatcctcgatgaaaccgcctgcattctcagccgtaatggcgatccgcaaaccttgcagcagctaagtgcacttggattccatgacggcacgtattgcgccgagggaattattggtacttgtgcgctatcgttagcggctatctctggtcaggccgtgaaaacgatggccgatcaacatttcaaacaggcactctggaactgggccttttgtgcaacgctgttgtttgacagcaagggccgattgacgggaacaatagcgctggcgtgtccggttgagcaaactaccgcagctgatttgccgttgacgttggcaatcgcccgcgaggtcggaaatttactgctgacggacagtttgctcactgaaactaaccgtcatttaaatcaacttaatgccctgttagaaagtatggatgatggcgtgattagctgggacgagcagggtaatttgcaatttatcaatgcccaggcggcgcgggtcttgcgccttgacgcgacggcaagtcagggacgggcaatcactgaactcttaacgttacccgccgtattgcaacaagcaataaaacaggcacatccgctcaaacacgtagaagcaacctttgaaagtcagcatcagtttattgatgcggtgataacccttaaaccgataatagaaacgcagggaaccagctttattttgttgctccatcctgtggaacagatgcggcagttgatgaccagtcaattaggaaaagtcagccatacctttgctcatatgccacaggacgatccgcaaacccgccgcttgattcattttggtcgccaggcggcgcgcagtagctttcctgtcctgctttgtggagaagagggcgtgggcaaggcactgctaagtcaggcaattcataatgaaagcgagcgtgctgcaggtccttatatcgccgtcaattgtgagttatatggtgatgcggcactggcggaagaatttattggtggcgatcgtacggacaatgaaaatggccgtctgagtcggctggaactggcgcacggcggcacgctgtttcttgaaaagattgaatatctggcggtggagttacagtctgctttgcttcaggttatcaagcagggtgttatcacgcgactggatgcgcggcgtttaataccaattgatgtcaaagtgattgcaacaacgaccgcggacctcgcaatgctggtggaacaaaatcgttttagtcgccagctgtattacgcgctgcatgcatttgaaattaccatcccgcctctgcgtatgcggcgtggcagcattccggcgctggtgaataacaaattacgcagtcttgaaaaacgcttctctacgcggctgaaaattgatgacgatgccctcgctcgcctggtttcttgtgcatggccaggcaacgattttgaactttacagcgtcatcgagaatcttgctctgagtagtgataatgggcgcattcgcgtcagtgatttgccggaacatctgtttaccgagcaggcaacagatgatgtcagcgccacccgcctttccaccagtctgtcatttgcggaagttgaaaaagaggcaattattaacgcagcccaggtcacaggcggtcgcattcaggaaatgtcggctttacttggaatcggccgcactacgctgtggcggaaaatgaagcaacatggcattgatgcagggcagtttaagcgccgggtatga

SEQ ID NO: 459065 - DNA, 1110 bp, Shigella boydii
atgaaaaaattgatcaatgatgtgcaagacgtactggacgaacaactggcaggactggcgaaagcgcatccatcgctgacactgcatcaggatccggtgtatgtcacccgagctgatgcccctgttgcaggaaaagtcgccctgctgtcgggtggcggcagcggacacgagccgatgcactgtgggtatatcggtcaggggatgctttcgggggcctgtccgggcgaaattttcacctcaccgacgcccgataaaatctttgaatgcgccatgcaagttgatggcggcgaaggtgtactgttgattatcaaaaattacaccggcgatattcttaactttgaaacagcgaccgagttactgcacgatagcggcgtaaaagtgaccactgtggtcattgatgacgacgttgcggtaaaagacagtctttatactgccgggcgacgcggcgttgccaacaccgtattaattgaaaaactcgtaggcgcagcggcggagcgtggcgactcactggacgcctgtgcggaactggggcgtaagttgaataatcaaggccactcaataggtatcgctctcggtgcctgtaccgttcctgccgcgggcaaaccttcttttaccctggcggataatgagatggagtttggcgtcggcattcatggtgagccgggtattgaccgccgctccttctcttcccttgatcaaaccgtcgatgaaatgttcgacaccctgctgggaaatggctcataccatcgcactttacgtttctgggattatcaacaaggcagttggcaggaagaacaacaaaccaaacaaccgctccagtctggcgatcgggtgattgcgctggttaacaatcttggcgcaactccgctttctgagctgtacggcgtctataaccgcctgaccacacgttgccagcaagcgggattgactatcgaacgtaatttaattggcgcgtactgcacctcactggatatgaccggtttctcaatcaccttactgaaagttgatgacgaaacgctggcactctgggacgccccggtccacaccccggcccttaactggggtaaattaggagaaagcaatgtcactgagcagaactcaaattgttaa

SEQ ID NO: 459066 - DNA, 633 bp, Shigella boydii
atgtcactgagcagaactcaaattgttaactggctcactcgttgtggcgatattttcagcaccgagagcgagtatcttaccggactggatcgcgaaattggcgacgctgaccacgggctaaatatgaaccgaggctttagcaaagtggtggaaaaactccctgctatcgcagataaagatatcggtttcattctcaagaataccggtatgacgctgctttccagcgtcggtggtgccagtggtccgctgttcggtaccttctttatccgcgccgcacaggcgacccaggcacggcaaagcctgacactggaagagctttatcagatgttccgcgatggcgcggacggcgtaatcagtcgcgggaaagccgaacctggcgataaaaccatgtgtgatgtgtgggtgccggtggtggaatcgttacgtcagtccagcgagcaaaatctctctgttccggtggcgctcgaagctgccagtagcatcgccgaatccgctgcacaaagtacgattacgatgcaagcccgcaaaggccgcgccagttatctcggtgaacgcagtattggtcaccaggatcccggcgcgacctcggtgatgtttatgatgcaaatgttggcgttagccgcaaaagagtaa

SEQ ID NO: 459067 - DNA, 1419 bp, Shigella boydii
atggtaaacctggtcatagtttcacatagcagccgactgggagaaggtgtcggtgaattagcccgtcagatgttaatgagtgatagttgtaaaatcgccattgccgcgggaattgacgatccacaaaatcctattggtaccgatgccgtcaaagtgatggaggccatcgaatctgttgctgatgccgaccatgtgctggtcatgatggatatgggtagcgcattattgagtgctgaaactgcgctggaattgctggctcccaagatcgccgcaaaagtacgtttgtgtgctgcgccgttggtcgaaggtacactggcagcaacggtcagcgcggcctcgggagcggatatcgacaaagttatctttgacgctatgcatgcgctggaagccaaacgtgaacaactgggtttaccgtcctccgacactgaaatctctgacacatgtcctgcgtacgatgaagaagcccgttctctggcggtggtcataaaaaaccgtaacggcctgcatgtacgtccggcctcccggctggtttataccttatcgacatttaatgccgatatgttgctggaaaaaaacggcaaatgcgtcacaccagagagtattaaccagattgcgttactacaagttcgctataacgatacgctgcgcctgattgcgaaagggccagaagctgaagaggcactgatcgctttccgtcagctggctgaagataactttggtgaaacggaggaagtcgctccacctactctgcgtcccgttccgcctgtttcgggtaaagccttttattatcaaccagttttatatacggtacaggcaaaatcaaccctgaccgtggaagaagaacaagatcgattacgccaggctattgacttcacgttattagatctgatgacgttaacagcgaaagcagaagccagcgggcttgacgatattgccgcaatcttttctggtcaccatacactgttagatgatccggaactgctggcggcggcaagcgaactccttcagcatgaacattgcacggcagaatatgcctggcagcaagttcttaaagaacttagccagcaataccagcaactggatgatgaatatctacaagctcgctatattgatgtggacgatcttctgcatcgcaccctggtccacctgacccaaacgaaagaagaactcccgcagtttaactcgccaactattctactggcggagaacatttatccttccacagtactgcaactggatccggcggttgtaaaaggtatctgccttagcgccggaagtccggtatcccacagcgccctaatcgcccgtgaactggggattggctggatttgccagcagggtgagaaactgtatgcgatacaaccagaagaaacgctaacgctggacgttaaaacgcaacgtttcaaccgtcagggttaa

SEQ ID NO: 459068 - DNA, 1221 bp, Shigella boydii
atgcagcaaaaccagagcggatttgatctgcgccatttcgttaacgtcaatttcaccctgccgaaagaaggcgagaaatatgttccgccagaggggcagtcactgcgcgaacatattgacggactttggccggtattaacgcgttctaccgaaaacaccgaaaaatgggattctctgttaccgctgccggaaccttatgtcgtgccgggcggacgttttcgcgaggtatattactgggacagttacttcaccatgttaggacttgccgaaagcggtcactgggataaagtcgcggatatggtggccaattttgctcatgaaatagacacttacggtcatattcccaacggcaaccgcagttactatttaagccgctcgcaaccgcccttctttgccctgatggtagagttactggcgcagcatgaaggcgatgccgcgttgaagcaatacctgccgcaaatgcaaaaagaatatgcttactggatggacggtgttgaaaacctgcaagccggacaacaggaaaaacgcgttgtcaaacttcaggatggtacccttctcaaccgctactgggacgatcacgatacgccacgaccagagtcatgggtggaagatattgccaccgccaaaagcaatccgaatcgacctgccactgaaatttaccgcgacctgcgctctgccgctgcgtctggctgggatttcagctcgcgctggatggacaacccgcagcagttaaataccttacgcaccaccagcatcgtaccggtcgatctgaacagcctgatgtttaaaatggaaaaaatcctcgcccgcgccagcaaagctgcaggagataacgcgatggcaaaccagtacgaaacgctggcgaatgcccgtcaaaaaggaatcgaaaaatacctgtggaacgatcaacaaggctggtatgccgattacgacctgaaaagtcataaagtgcgcaatcagttaaccgcggccgccctgttcccgctgtacgtcaatgcggcagcgaaagatcgcgccaacaaaatggcgacggcgacgaaaacacatctgctgcaacccggcggcctgaacaccacgtcggtgaaaagtgggcaacaatgggatgcgccaaatggctgggcaccgttacagtgggtcgcgacagaaggattacaaaacaacgggcaaaaagaggtggcgaatatccattacaggatggctttggctggaccaatggcgtga

SEQ ID NO: 459069 - DNA, 441 bp, Shigella boydii
gtgattcagaaaataaatattttagacagtagccagtcaggcgttaaaaatggggcggatagtgaggcggttttggctgcgcttattgaacatttagaattgatcaatccttctggcagattaagccaaaatacccgttcggcaatgcttcagttacgcgaagaggaatggtctgaattctttttttggttgctaaattctctggagtgtctggattatgtgattattaatttaactccagaaagcaaaaaaacgttgatgagtgaacaccgtaacaatattcaggtagcaatcgatgctttatataggcaacgtcggtgtaaatcaccgggggatgatagtgaaacacttacccgtagaaatgacgctatcttcggcaaccacgtatggcaaacatttgcgcaatacttcccgccaggacttgaaaaaccgtctgtgtag

SEQ ID NO: 459070 - DNA, 255 bp, Shigella boydii
atgggaattattgcctggattatttttggcctgatagccggcattatcgccaagctaatcatgccggggcgtgatggtggtggatttttccagacctgtattctcgggatagtcggtgcggtggtcggcggctggctggcgaccatgtttggcattggcggctccatcagcggttttgatttgcacagcttcctggtggcggtggtgggagctattctcgttctgggcgtattccgcctgctgcgaagagaataa

SEQ ID NO: 459071 - DNA, 735 bp, Shigella boydii
gtgagtcattaccatgagcagttcctgaaacaaaatccgttagccgtcctgggcgtgttacgcgatttgcacaaagccgcaattcctttgcgtctcagttggaatggcgggcagctgatcagcaaaatactggcaataaccccggataaactggtgctggatttcggcagtcaagccgaagacaacatcgccgtgctaaaggcgcagcatattaccattaccgccgaaactcagggtgcgaaagtcgagtttactgttgaacaactacagcagagtgaatacttgcagcttccggcatttattaccgtaccgcctcccaccttatggtttgtacaacgacgccgatatttccgcatctccgccccactccatccgccttatttttgccagaccaaactggcggataacagtacgttacgtttccgcctgtatgatttgtcgttaggcggcatgggcgcattactggaaacagcaaagcctgccgaattacaagaaggcatgcgcttcgctcagattgaagtcaacatggggcaatggggtgtttttcactttgacgcccagttaatctccatcagcgagcgcaaagtgattgatggcaagaatgaaaccatcaccactccccgtctgagcttccgttttcttaacgtcagcccgacggtggagcggcaattacaacggattattttctctctcgagcaggaagcccgggagaaagcggacaaagtacgcgactga

SEQ ID NO: 459072 - DNA, 612 bp, Shigella boydii
gtgaaattgagatggtttgcctttttgattgtgttattagcgggttgttcatcaaagcatgactatacgaacccgccgtggaacgcgaaagttccggtgcaacgtgcgatgcagtggatgccaataagccagaaagccggtgcagcctggggcgtcgatccacaattgatcacggcgattatcgctatcgaatcgggtggtaatccgaacgcggtgagtaaatcgaatgccattggtttgatgcagttaaaagcttcaacctccggacgtgatgtttatcgccgtatgggctggagtggtgagccgacgaccagcgagctgaaaaatccagagcgtaatatttcaatgggggcggcttacctgaatattctggaaaccggcccgctggcaggcattgaagatccgaaggtactgcaatatgcgctggtggtgtcatacgctaacggggcaggtgcgctgctacggactttctcgtcagatcggaaaaaggcgatcagcaaaatcaacgatttggatgctgacgagttcctcgatcacgtagcgcgcaatcatcctgcgccgcaggctccgcgctatatctacaaacttgagcaggcactggacgcgatgtaa

SEQ ID NO: 459073 - DNA, 915 bp, Shigella boydii
atgtctctgtttcacttaattgccccatcgggttacagcattaaacagcacgccgcgctgcgtggtatccagcgccttaccgacgcggggcatcaagtcaataacgtcgaggttattgcccgtcgttgtgagcgttttgcgggtacggaaacggagcgtctggaagatctcaattcccttgccagactgactacacccaacaccatcgtgctggctgtacgcggcggttacggtgccagtcgtttactggcagatattgactggcaggcactggtggctcgccaacaacatgacccgttactcatttgcggacatagcgattttaccgccattcagtgcggtcttctggcgcaaggcaatgtcatcacctttagcggccccatgctggtagtaaactttggtgcggatgaactgaacgcctttaccgagcaccatttctggctggcgttacgcaataaaaccttcaccattgaatggcaaggggaaggcccgacatgtcagaccgaaggcacgttgtggggaggcaatcttgcgatgctgatttcactgattggtacaccgtggatgccaaaaattgagaacggtatcctggtactggaagatattaacgagcaccctttccgcgtcgaacgtatgctgttgcagctctatcatgcgggaattttgccacgtcagaaggcgattattctcggtagctttagcggcagcacgcccaatgattatgacgcaggttacaacctggagtcagtgtacgcgtttttgcgttcccgcctgtcgattccactcattaccggcctcgattttggtcatgaacaacgcacggttacgctgccgttgggcgcacatgccattctgaataacacccgggaaggcactcagttgacgattagcggtcatcctgttcttaaaatgtaa

SEQ ID NO: 459074 - DNA, 1737 bp, Shigella boydii
ttggatgccacaacaataattagccttttcatcttaggatccatccttgtcaccagcagtatattacttagttcattttcttcccgtcttggcattcctattctggttatttttctggcgatcggcatgctggcaggagtcgatggcgtcggcggtatcccgtttgataattaccccttcgcctacatggtaagtaacctggcactggcgattattttgctcgacggcgggatgcgcactcaggccagttcctttcgtgtggcgttaggaccggcactgtcgctggcgacgctgggcgtgcttatcacctctggtttaaccggcatgatggcggcgtggctgtttaatcttgatttgattgaaggcttattaatcggcgctatcgtcggctctaccgatgctgcagcggtcttttctctgctgggtggtaaggggcttaacgaacgtgttggctcgacgctggaaattgaatccggcagtaatgatccaatggcggtctttctgacgattaccctgattgcgatgatccagcaacatgaaagcagtgtcagttggatgttcgtggtcgatattctgcagcaatttggcctcgggattgtcatcggacttggcggtggttatttactgctgcaaatgattaatcgcatcgccctgcctgccggattatatccattgctggcattaagcggcggtattttaatttttgctttaaccacggcgctggaaggcagcggtattctggctgtttatctgtgcggttttctgctgggtaatcggccgattcgcaaccgctacggcatcctgcaaaatttcgacggcctcgcctggctggcgcaaatcgccatgttcctggtgctggggctattggttaacccaagcgatctgctgcctattgccattccggcgctcattttgtcggcatggatgatattcttcgcccgtcccctttcggtatttgctggattgctccccttccgcggtttcaatctgcgtgagcgcgtgtttatcagctgggtaggattacgcggcgcggtgccaatcatcctggccgtgttcccgatgatggcggggctggagaatgcacgtctgttctttaatgtcgccttctttgtggttctggtttcactgctcttgcagggaacatcactctcgtgggcggctaaaaaagccaaagtggtggttccgccagtgggacgtccggtgtcacgcgttggcctggatattcatccggaaaatccgtgggagcagtttgtttatcaattgagtgccgataaatggtgcgtgggcgcggcactgcgcgatttgcatatgccaaaagagacgcgtattgcggcactgtttcgtgataaccagttgcttcatcctaccggcagcacccgactgcgcgaaggcgatgtgttgtgtgtaattggtcgggaacgcgatcttccggcgctcggtaaactgttcagccagtcgccgccggtcgcgctggatcaacgcttctttggtgacttcattctcgaagccagcgccaaatatgctgatgttgcgctgatatatggcctggaagacgggcgagaatatcgtgataagcagcaaacgctgggtgaaattgtccagcagttgttaggcgcggcaccggttgtcggtgaccaggtagagtttgccgggatgatctggacggtggccgagaaagaagataatgaagtgttgaagattggcgtacgggtggctgaagaggaagctgaatcttaa

SEQ ID NO: 459075 - DNA, 150 bp, Shigella boydii
atgatagtgtccattaaaaggatggacactatttccccggaacctgaactcaccgcacaggggttctacataaaacgcttacgcttcattgttgactcggagtcgacttcagataaatcacgctttacccttgatggagcctgtacatag

SEQ ID NO: 459076 - DNA, 975 bp, Shigella boydii
gtggtaaaagcgaacgcttacgggcatggtattgagcgtatctggagcgcgctcggggccaccgatggctttgcattacttaacctggaagaggcaataacgttacgtgagcgcggctggaaggggccgatcctgatgctggaaggatttttccatgctcaggatctggagatttatgaccagcaccgcctgaccacctgcgtacacagcaactggcagctcaaagcactgcaaaatgcgcggctaaaagcaccgttggatatttatcttaaagtgaacagtgggatgcatcggttgggcttccagcccgatcgcgtgcttaccgtctggcagcagttgcgggcaatggcgaatgttggcgagatgaccctgatgtcgcattttgccgaagcggaacatcctgatggaatttccagcgcgatggcgcgtattgagcaggcggcggaagggctggagtgtcggcgttcgttgtccaattcggcggcgactctgtggcatccggaagcgcattttgactgggttcggcctggcattattttgtatggcgcttcgccgtccggtcagtggcgtgatatcgccaataccggattacgtccggtgatgacgctaagcagtgagattattggtgtccagacgctaaaagcgggtgagcgtgtgggctacggcggtcgctatactgcgcgcgatgaacagcgaatcggcattgtcgccgcagggtacgccgacggttatccgcgccacgcgcctaccggtacccctgttttagtggacggcgtgcgcaccatgacggtggggaccgtctcgatggatatgctggcggtcgatttaacgccttgcccgcaggcgggtattggtacgccggttgagctgtggggcaaggagatcaaaattgatgatgtcgccgccgctgccggaacggtgggctatgagttgatgtgcgcgctggcgctacgcgtcccggttgtgacggtgtaa

SEQ ID NO: 459077 - DNA, 1299 bp, Shigella boydii
atgcgagttgtcatactgggaagtggtgtggtaggcgttgccagcgcctggtacttaaatcaggcaggacatgaggtcaccgtcattgatcgggagccgggggccgccctggaaaccagcgccgcgaatgccgggcaaatctcccccggatatgctgcaccgtgggcggcaccaggtgtgcctttaaaagcgatcaaatggatgttccagcgccatgcgccgctggcggttcgtctcgacggtacgcagtttcagttgaaatggatgtggcaaatgttacgtaactgcgacaccagccactacatggaaaacaaagggcggatggtgcgtctggcggaatacagccgtgattgcctgaaagcattgcgcgccgaaaccaatattcagtatgaagggcgtcagggtgggacgctgcaactgttccgtaccgaacaacagtatgaaaatgcgacccgcgatatcgtcgtgctggaagatgccggcgtaccgtatcagctgctggaatccagccgcctggcggaagtggagccagcgctggcagaagtagcgcacaaactgacggggggtctgcaactgcccaatgatgaaaccggagactgccagctgtttacccagaatctggcgcggatggcagagcaggcgggggttaaattccgctttaatacgcccgttgaccaactgctttgcgacggcgagcaaatctacggcgtgaagtgtggcgatgaagtgattaaggccgatgcgtatgtgatggcgtttggttcttactcgacggcgatgctcaaaggcattgttgatattccggtgtatccgctgaaaggctactcgctgactattccaattgcgcaggaagatggtgcgccagtatccaccattcttgatgaaacctacaaaatcgccattacccgtttcgataaccgcattcgtgttggcggaatggcggaaattgttggttttaacaccgagctgttgcaaccgcgtcgtgaaacgctggaaatggtggttcgcgatctctatccacgcggcggtcatgtcgagcaggcgactttctggacgggtttgcgcccgatgacgccagacggtacgccggttgtcgggcgtacacgctttaaaaatctgtggctgaataccggtcacggcacgctcggctggacgatggcttgcggttccggtcagttgttaagcgatctgctctctggtcgcacgccagcgatcccatatgaggatctaagcgtagcgcgctacagccgtggatttacgccatcacgtccgggccatttacatggcgcacacagctaa

SEQ ID NO: 459078 - DNA, 1533 bp, Shigella boydii
atggcgacgatcgattctatgaataaggacaccacacggttgagcgatggacccgactggacgttcgacctgctggatgtttatctggcagagatagaccgggtggcgaaactctaccggctggatacctacccgcaccagattgaagtgataacctcagaacagatgatggatgcctactccagcgtcggcatgccaattaactatccgcactggtcattcggtaaaaagtttatcgagactgaacggctgtataagcacggtcagcaaggactggcctatgaaatcgtcattaactctaacccgtgtatcgcttacctgatggaagagaacaccattaccatgcaagcgctggtgatggcacacgcctgctatgggcataactctttctttaaaaacaattacttattccgcagttggaccgacgccagttcgattgtcgattatctgatttttgcccgtaaatatattaccgagtgcgaagaacgttatggcgtggatgaagtagaacggcttctggactcgtgccacgcgctgatgaactacggcgtggaccggtacaaacgcccgcaaaaaatctcgctgcaagaagagaaagcccggcagaaaagtcgcgaagagtatctacaaagtcaggtcaatatgctctggcgtaccctgccgaagcgcgaggaagagaaaacggttgctgaagcgcgccgctatccgtccgaactacaagaaaacctgctctattttatggagaaaaatgcgccactgctggaatcatggcagcgtgaaatcctgcgtattgtgcgtaaggtgagccagtatttttatccgcaaaaacagactcaggtgatgaacgaaggctgggccaccttctggcactacaccatccttaaccatctgtatgatgaagggaaagtaacggaacgttttatgctggagtttttgcacagccacaccaatgtggtcttccagcccccctataacagcccgtggtacagcggcatcaacccgtatgccctcgggttcgccatgttccaggatattaaacggatttgtcagtcgccaacggaagaagacaaatactggttcccggatatcgccggttccgactggctggaaacgctgcatttcgcgatgcgtgatttcaaagatgagagttttatcagccagtttctgtcaccgaaagtgatgcgtgatttccgcttcttcaccgtgctggatgacgatcggcataattatctggagatttccgctattcataatgaagaaggttatcgggagatccgtaaccggttatcgtcgcaatataacttaagtaatctggagccgaatattcagatctggaacgtggatttgcgcggtgaccgttcgctgacgctgcgttacattccacataatcgcgcaccgctggatcgggggcgcaaagaagtgctgaagcatgtgcatcgcctgtggggatttgatgtgatgctggaacagcaaaacgaagatggcagcgtcgagttgctggaacgttgcccgccaagaatgggaaatctgtaa

SEQ ID NO: 459079 - DNA, 720 bp, Shigella boydii
atggtcattaaggcgcaaagcccggcgggtttcgcggaagagtacattattgaaagtatctggaataaccgcttccctcccgggactattttgcccgcagaacgtgaactttcagaattaattggcgtaacgcgtactacgttacgtgaagtgttacagcgtctggcacgagatggctggttgaccattcaacatggcaagccgacgaaggtgaataatttctgggaaacctctggtttaaatatccttgaaacactggcgcgactggatcacgaaagtgtgccgcagcttattgataatttgctgtcggtgcgtaccaatatttccactatttttattcgcaccgcgtttcgtcagcatcccgataaagcgcaggaagtgctggctaccgctaatgaagtggccgatcacgccgatgcctttgccgagctggattacaacatattccgcggcctggcgtttgcttccggcaacccgatttacggtctgatccttaacgggatgaaagggctgtatacgcgcattggtcgtcactatttcgccaatccggaagcgcgcagtctggcgctgggcttctaccacaaactgtcggcgttgtgcagtgaaggcgcgcacgatcaggtgtacgaaacagtgcgtcgctatgggcatgagagcggcgagatttggcaccggatgcagaaaaatctgccgggtgatttagccattcaggggcgataa

SEQ ID NO: 459080 - DNA, 1542 bp, Shigella boydii
atggagatctcctggggccgcgcgctatggcgcaattttttgggccagtcccccgactggtacaaactcgccctcatcattttcttaatcgtaaatccgttaattttcctcatcagccctttcgtcgctggctggttgctggtagcggaatttattttcactctggcgatggccctgaaatgctacccgctactccccggtggtctgttggctattgaagcggtattcatcggcatgaccagcgcggaacacgtccgtgaagaggtggcggcaaatcttgaagtcttgctgttactgatgtttatggtggcgggtatctattttatgaaacagctattgctgttcatatttacccgtttgctgttaagcattcgttccaaaatgctgctgtcgctctctttttgcgtggcggcggcgttcctctccgcgttcctcgatgccttaaccgtcgtggcggtggtgatcagcgttgcagtcggtttttatggtatttatcaccgcgtagcctcttcccgtactgaagataccgacctgcaagacgatagtcatatcgacaagcattacaaagtggttctggaacagttccgtggctttctgcgtagcctgatgatgcatgccggtgtcggcaccgcattaggcggcgtaatgaccatggtgggcgaaccacagaacctgatcatcgctaaagcggctggctggcattttggcgatttcttcctgcgcatgtcgccggtgaccgttccggttctgatttgtggcctgttaacctgcctgctggtagagaagctgcgttggtttggctacggtgaaacgctgccggagaaagtccgcgaagtgttgcaacagtttgacgatcaaagccgccaccagcgtacccgtcaggataaaatccgtctgattgtccaggcgattatcggcgtctggctggtgactgcgctggcgttgcatctggcggaggttggcttgattggtttgtcggtcattattctggcgacatcattgaccggtgtcaccgatgaacatgctatcggtaaagccttcaccgaatctctgccattcaccgcactgttgacggtgtttttctcggtagtcgcggtgattatcgaccaacaactgttttcgccgattattcagtttgtgttgcaggcatcggaacatgctcagctgtcgttgttctatattttcaacggcctgctgtcatccatttcggataacgtcttcgtggggacgatttatatcaacgaagcgaaagcggcaatggaaagtggcgctatcacgttgaagcaatacgagctgctggcggtcgccattaataccggtaccaatctgccctctgtcgctacgccgaacggtcaggctgcgttcctgttcctgctgacctctgcactcgcgccattgattcgcctctcttatggccgcatggtgtggatggccctgccttacaccctcgtcctgacactcgtcgggctgctctgcgtcgagtttacgcttgcccctgtaaccgaatggtttatgcaaatgggctggatagcaacgctttga

SEQ ID NO: 459081 - DNA, 531 bp, Shigella boydii
atgttgcgatttttgaaccaatgttcacaaggccggggcgcgtggctgttgatggcgtttactgctctggcactggaactgacggcgctgtggttccagcatgtgatgttactgaaaccttgcgtgctctgtatttatgaacgctgcgcgttattcggcgttctgggtgctgcgctgattggcgcgatcgccccgaaaactccgctgcgttatgtagcgatggttatctggttgtatagtgcgttccgcggtgtgcagttaacttacgagcacaccatgcttcagctctatccttcgccgtttgccacctgtgattttatggttcgtttcccggaatggctgccgctggataaatgggtgccgcaagtgtttgtcgcctctggcgattgcgccgagcgtcagtgggattttttaggtctggaaatgccgcagtggctgctcggtatttttatcgcttacctgattgtcgcggtgctggtgatgatttcccagccgtttaaagcgaaaaaacgtgatctgttcggtcgctaa

SEQ ID NO: 459082 - DNA, 804 bp, Shigella boydii
atggcagcggcagacgggggggtggtggatttatcaaatctggaacgccagcgtaaattaatgtctgctctccccgtggatgacgtctgggggattggacggcggatcagcaaaaaactggacgcgatggggatcaaaaccgttcttgatttggcggatacagatatccggtttatccgtaaacattttaatgtcgtgctcgaaagaacggtgcgtgaactgcgcggtgaaccctgtttgctactggaagaatttgcaccgacaaagcaggaaattatctgttcccgctcgtttggtgaacgtatcacggattatacgtcgatgcggcaggccatttgtagttacgctgcccgggcggcggaaaaacttcgcagtgagcatcaatattgtcggtttatctccacatttattaagacgtcaccatttgcgctcaatgaaccttattacggcaatagcgcgtcggtaaaactgctgacgcccactcaggacagcagggatatcattaacgccgctacgcgatctctggatgccatctggcaagcgggccatcgctaccaaaaagcgggcgtgatgctgggggatttcttcagtcagggagtcgcgcagctcaatttattcgatgacaacgcaccgcgccccgggagtgagcaattgatgacggtaatggatacactgaatgctaaagagggcagaggaacactctattttgccgggcaggggatccaacaacaatggcagatgaagcgagccatgctttcaccacgttatacaacgcgaagttctgatttactgcgggtcaaataa

SEQ ID NO: 459083 - DNA, 420 bp, Shigella boydii
atgttgtttatcaagcctgcggatctccgcgaaattgtgacttttccgctatttagcgatcttgttcagtgtggctttccttcaccggcagcagattacgtcgaacagcgcatcgatctgaatcaactgttgatccagcatcccagcgcgacttacttcgtcaaagcaagtggtgattctatgattgatggtggaattagtgacggtgatttactgattgtcgatagcgctattaccgccagccatggtgatattgtcatcgctgctgttgacggcgagtttacggtgaaaaaattgcaactacgcccgacggtacagcttattcccatgaacagtgcgtactcgcccattaccatcagtagcgaagatacgctggatgtctttggtgtggtgatccacgtcgttaaggcgatgcgctga

SEQ ID NO: 459084 - DNA, 141 bp, Shigella boydii
atggacgatgagcggctgaagaatccgcctgtcggttcttctgtcctcgaacgcatccgcgatatgcgcgccagcatgtgccgtgtttatttgcaggtgatttgccccctgctggctctcagccaactgtatcgccattaa

SEQ ID NO: 459085 - DNA, 1383 bp, Shigella boydii
atgaagagtgaagtgttgtccgttaaagagaaaattggttatggcatgggagacgccgccagccacattattttcgataacgtaatgttatatatgatgttcttttataccgatatttttggcattcctgccggttttgtcggaaccatgtttttggtcgctcgtgcactggatgcgatttccgatccttgcatggggttgttggccgatcgaacgcgctctcgctggggtaaatttcgtccgtgggtactgtttggcgcactgccattcgggatcgtctgtgtactggcctatagcacgccagatctcagtatgaacggcaaaatgatctatgcagcaattacttacaccctacttaccttactttataccgtcgtcaatatcccttactgcgcattgggtggtgtaatcaccaatgacccgactcagcgtatctcgctgcaatcctggcgttttgtgctggcgaccgcgggaggcatgctttctactgttctgatgatgccactggttaatttaattggcggtgataataaaccactcggtttccagggcggtatcgcggtcctttccgtggtggcattcatgatgctggcattttgtttcttcaccactaaagaacgcgttgaagcaccacctacaacaacgtctatgcgggaagatttacgtgatatctggcaaaacgaccagtggcggattgtcggtttactaaccattttcaatatcctggcggtgtgcgtactcggtggggcgatgatgtattacgtcacatggattttgggcacgccggaagtgtttgtcgcttttctcaccacttattgcgtgggtaacctgattggttccgcactggcaaaacctctgaccgactggaaatgtaaagtcactatcttctggtggacgaacgccctgctggcagtgattagcctcgcgatgttctttgttcccatgcaggccagcatcactatgtttgtcttcatcttcgtgattggtgtgttgcatcaactggtgacacctatccagtgggtaatgatgtccgataccgtcgactacggcgagtggtgcaatggtaaacgcctgaccgggatcagttttgctggcacgctgtttgtgctcaaactggggttggccttcggcggcgctcttatcggctggatgctggcttatggcggatatgatgcggcagaaaaagcgcagaacagcgccacgattagcatcattattgcgctattcacgattgttccggcgatctgttatttgctgagcgcgattatcgctaaacgctactactcactcacgacgcacaatctgaaaaccgttatggaacagctggctcagggtaaacgccgttgccagcaacaattcacctctcaagaagtgcagaactaa

SEQ ID NO: 459086 - DNA, 1839 bp, Shigella boydii
atgaaaattagcgatggaaactggttgattcaacctggcctcaatttgattcacccgcttcaggtgttcgaggttgaacagcaggataatgaaatggtggtctatgctgccccccgtgatgtgcgtgaacgtacctggcagcttgatacgcctttatttacgctgcgctttttctccccacaggaaggtattgtcggtgtgcggattgagcattttcagggagcgctgaataacggtcctcattatccgctcaatattttgcaggacgtgaaggtcacaatcgaaaacacagaacgttatgctgagtttaaaagtggcaacttaagcgcgcgtgtcagcaaaggtgagttctggtcactcgattttctgcgcaacggtgaacgtattaccggtcaggacacgaataatcaacgaaattatatgtttgagcggcttgatcttggcgttggcgaaacagtttatggtctgggagagcgttttactgccctggtgcgcaatggtcagacggtagagacctggaaccgggacggcggcacaagtactgaacaggcgtataaaaatatcccgttctatatgactaaccgtggctatggggtgctggtcaatcacccccagagtgtctcttttgaagtgggatcggagaaagtctccaaagtgcagttcagcgttgagagcgaatatctcgaatactttgttatcgacggtccgacgccgaaagcggtacttgatcgttatacccgttttactggtcgtccggcgctgccgcccgcatggtccttcggcctgtggctaaccacttcatttaccaccaactacgacgaagcgacggtaaacagctttatcgatggtatggcggaacgcaatctgccgctgcatgttttccactttgactgtttctggatgaaagccttccagtggtgcgattttgagtgggacccgctgactttcccggacccggaagggatgatccgccgcctgaaagcgaaagggctgaaaatctgcgtctggattaacccctatatcggtcaaaaatcccccgtctttaaagagttacaagagaaaggctatttactcaaacgcccggacggttcgctatggcagtgggataaatggcagccaggtctggcgatttatgactttaccaatccggatgcctgcaaatggtacgccgacaaactgaaaggtctggtcgcgatgggcgttgattgctttaagaccgactttggcgaacgtatcccaactgatgttcagtggtttgacggttccgatccgcagaaaatgcataaccattatgcgcacatctacaacgaactggtgtggaacgtgctcaaggacaccgttggtgaggaagaagctgtcttgtttgcccgctcggcctccgtcggtgcgcagaaattcccggtacactggggtggcgattgttacgctaactacgaatcaatggcggaaagcctgcgcggtggtttgtctattggcctttcaggttttggcttctggagccactatatcggcggctttgaaaataccgctccggcgcacgtttacaaatgctggtgcgcgtttggtttgctctccagccatagccgtttacacggtagcaaatcttatcgtgtgccgtgggcctacgatgatgagtcctgtgatgtggtgcgcttcttcacgcaactgaaatgccgcatgatgccgtatctgtatcgtgaagctgcgcgtgcaaacgcgcggggtacgccgatgatgcgggccatgatgatggagttcccggacgatccggcttatgattaccttgaccgtcaatacatgttaggcgacaacgttgatggttgcgccggtgttcactga

SEQ ID NO: 459087 - DNA, 477 bp, Shigella boydii
atggttgcgccggtgttcactgaagcgggcgatgtgcagttctacctgccggaaggtcgctggacacacctgtggcacaacgatgagctcgacggttgttgctggcataaacagcagcacagcttcctgagtctgcccatttatgtgcgtgataacaccctactggcgctgggcaacaacgatcaacgtcccgattacgcgtggcacgaaggcacggcattccacctctttaatctgcaagacgggcatgaagccgtctgtgaagtgcccgctgctgacggatcggtgatctttactttaaaagcagcacgtactggcaacacgattactgtgactggtgcgggcgaggcgaagaactggacactgtgcctgcgcaatgttgtgaaagtaaatggtctgcaagacggttcgcaggctgaaagtgagcaggggctggtggtgaagcctcaagggaatgcgctgacaattacgttgtaa

SEQ ID NO: 459088 - DNA, 1710 bp, Shigella boydii
atgaaatttattgggaagctgcttctctacattctcatcgctctgttagtggtgatcgctggcctctattttcttctgcaaacccgctggggagcagaacatatcagcgcatgggtttccgagaatagcgactatcatctggccttcggggcgatggatcaccgtttttccgcgccatctcatatcgtgctggagaatgtcacgtttggtcgtgatggtcagcccgcgaccctggtggccaaaagtgtcgacattgcgctaagcagtcggcaactgaccgaaccacgccatgtcgataccatcctgctggaaaacgggacgctgaatctcaccgaccagaccgcgccgctaccgttcaaagccgatcgtctgcaactgcgtgatatggcgtttaatagcccgaatagcgaatggaaactgagcgcgcagcgggtaaatggcggcgtagttccgtggtcaccaaaagccggtaaagtgctgggtacgaaggcgcagattcagtttagtgccggatcgctttcgctcaatgatgttcctgccaccaatgtactgattgaaggcagtattgataacgatcgcgttacgctgactaacctgggtgccgacatcgcccgcgggacattaaccggaaacgcgcagcgtaacgccgacggcagctggcaagtggaaaacctgcgcatggcggatatacgtctacaaagcgaaaaatcgctaaccgacttctttgcgccattacgctctgtcccgtcgttgcagattggtcgcctggaagtgatcgatgctcgtttgcaaggtccggactgggcggtgaccgacctcgatctcagcttgcacaacatgaccttcagtaaagatgactggcagacacaagaaggcaaactgtcgatgaacgctagcgagttcatttatggttcgctgcatttatttgacccgattataaacgcggaattttccccgcagggcgtagcgctgcgccagttcaccagccgctgggaagggggtatggtcagaacgtcagggaactggctgcgtgacgggaaaacgttgatccttgatgatgcggcaattgccgggctggaatataccttgccgaaaaactggcaacagttgtggatggaaacgacacccggttggttaaacagcctgcaactgaagagatttagcgccagccgcaatctgatcattgatatcgaccctgacttcccgtggcagctcaccacgctcgatggttacggtgccaacctgacgctggttaccgatcataaatggggcgtctggagtggctcggcgaatctgaatgccgccgccgcgacattcaatcgtgttgatgttcgtcgcccgtcgctggcgctgaccgccaacagcagcacggtgaatatcagcgaactgagtgcatttactgaaaaaggcattctggaagccactgccagtgtttcacaaacgccacaacgtcagacccatatcagcctgaatggacgcggtgtgccggtgaatattttgcaacaatggggatggcctgaattaccgttgactggcgacggcaatattcagcttaccgccagtggagatattcaggccaatgccccgctgaaacctacggttagcgggcaattgcatgccgtgaacgccgcaaagcagcaagtgactcaaaccatgaatgctggcatcgtttccagcggtgaagttacgtcggcagagctggtgcagtaa

SEQ ID NO: 459089 - DNA, 1392 bp, Shigella boydii
atgtctgtttccaccctcgagtcagaaaatgcgcaaccggttgcgcagactcaaaacagcgaactgatttaccgtcttgaagatcgtccgccgcttcctcaaaccctgtttgccgcctgtcagcatctgctggcgatgttcgttgcggtgatcacgccagcgctattaatctgccaggcgctgggtttaccggcacaagacacgcaacacattattagtatgtcgctgtttgcctccggtgtggcatcgattattcaaattaaggcctggggtccggttggctccgggctgttgtctattcagggcaccagcttcaactttgttgccccgctgattatgggcggtaccgcgctgaaaaccggtggtgctgatgttcctaccatgatggcggctttgttcggcacgttgatgctggcaagttgcaccgagatggtgatctcccgcgttctgcatctggcgcgccgcattattacgccgctggtttctggcgttgtggtgatgattatcggcctgtcgctaattcaggttgggttaacgtccattggcggcggttacgcagccatgagcgataacaccttcggcgcaccgaaaaatctgctgctggcaggcgtggtcttagccttaattatcctgcttaaccgtcaacgtaacccttacttacgcgtggcctcactggtgattgcgatggcggccggatatgcgctggcgtggtttatgggcatgttgccagaaagcaacgaaccgatgacgcaagaactgattatggtgccaacgccgctctattacggtcttggcattgaatggagtctgctgctgccgctgatgctggtctttatgatcacttcgctggaaaccattggcgatatcacgtcgacctctgacgtttccgaacagccagtgtccggtccgctgtacatgaaacgcctgaaaggcggcgtgctggcaaacggcctgaactcgtttgtttcggcggtgtttaacaccttcccgaactcctgcttcgggcaaaacaacggagtgatccagttgactggtgttgccagccgctatgtcggttttgtcgtcgcgctgatgttgatcgtgctgggtctgttcccggcagtgagcggttttgtacaacacattccagaaccggttctgggcggcgcaacgcttgtaatgtttggcaccatcgccgcctccggtgtgcgtatcgtttctcgtgagccgctgaaccgtcgggcgattctgattatcgcgctgtcgctggcggttggtctgggcgtgtctcagcagccgctgattttgcagtttgcccctgaatggctgaaaaacctgctctcctccgggatcgccgcgggcggtattactgccatcgtgctgaatctgattttcccaccagaaaaacagtaa

SEQ ID NO: 459090 - DNA, 1206 bp, Shigella boydii
atgtttcatctcgatactttagcaacgcttgttgccgcaacgctgacgttgctgctcgggcgtaagttggtccattccgtctcctttttgaagaaatacaccataccggaacctgttgcgggtggtttgttggtggcgctggcgctactagtactgaaaaaaagcatgggctgggaagtcaactttgatatgtccctgcgcgatccgttaatgctggctttcttcgccaccattggcctgaacgccaacattgccagtttgcgtgccggtgggcgtgtggttggcatcttcttgattgtggttgttggtctgttggtgatgcaaaatgccattggcattggtatggctagcctgttagggcttgatccgctgatggggctgttggccggttctattacgctttccggcggtcacggtacgggcgctgcatggagtaaattgttcattgaacgttatggcttcaccaatgcgacggaagtggcgatggcctgtgcaacgttcggtctggtgctgggcggcttgattggcggtccggtggcgcgctatctggtgaaacactccaccacgccgaacggtattccggatgaccaggaagtcccgacggcgtttgaaaagccggatgtgggacgcatgatcacctcgttggtgctgattgaaactatcgcgctgattgctatctgcctgacggtggggaaaattgttgcgcaacttttggctggcactgcttttgaactgccgaccttcgtctgtgtactgtttgttggcgtgattctgagcaacggtctgtcaataatgggcttttaccgcgtctttgagcgtgcggtatccgtgctgggtaacgtaagcttgtcgttgttcctggcgatggcgttgatggggctgaaactgtgggagctggcttcgctggcgctgccgatgctggcgattctggtggtacagaccatcttcatggcgttgtatgccatcttcgttacctggcgcatgatgggcaaaaactacgatgcggcagtgctggctgcgggtcactgtggttttggcctcggtgcaacgccaacggcaatcgccaacatgcaggcgatcactgaacgctttggcccgtcgcacatggcgtttttggtggtgccgatggtcggtgcgttctttatcgatatcgtcaatgcgctggtaattaagttgtatttgatgttgccgatttttgccggttaa

SEQ ID NO: 459091 - DNA, 2082 bp, Shigella boydii
atgacaggtcgcctgttagatgctgtcccactcagttccctaacgggcgttggcgcagcacttagtaacaaactggcgaaaatcaacctgcataccgtgcaggatctactcttacaccttcccctgcgctacgaagatcgcacccatctctaccccatcggagaactactgccgggcgtttatgccacggtggaaggcgaagtgctgaactgcaatatctccttcggcggtcggcggatgatgacctgccagatcagcgacggttccggcatcctcaccatgcgctttttcaatttcagcgcggcaatgaaaaatagcctggcgacgggccgccgtgtactggcttatggcgaagcaaagcgcggtaaatatggtgcggagatgatccacccggaataccgcgtgcagggcgatctcagcacgccagaattacaggaaacgctcacgccggtttatccaacaacggaaggcgtaaagcaggccacgctgcgtaaattaaccgaccaggcgctggatctgctcgacacctgcgccattgaagaactcctgccgccggaactgtcacaaggaatgatgacgctaccggaagcgttgcgcactttgcaccgcccgccaccgacgctacagcttagcgatctggaaaccgggcagcatccggcgcaacgtcgtctgattctggaagaactgctggcgcacaacctcagcatgttagccttacgtgccggagcacagcgttttcatgcccagccgctgagcgccaatgatgcgctgaaaaataaactcctcgcagccttaccgttcaagccaacgggcgcacaggcacgcgtagtggcggagatcgagcgcgatatggcgctggatgtgccgatgatgcgcctggtacagggcgatgtaggttccggtaaaacgctggtcgccgccctcgccgcgctgcgtgcgattgcccacggcaaacaggtggcattgatggcaccaaccgaattactcgccgaacagcacgccaataacttccgcaactggtttgaaccgctcggtatcgaagtgggctggctcgccggtaagcagaaaggcaaagcgcgactgtctcagcaggaagccatcgccagcggtcaggtgcagatgattgttggtacgcacgccatcttccaggaacaggtgcagtttaacggtctggcgctggtgattatcgacgaacaacatcgctttggcgtgcatcagcgtctggcgttatgggagaaaggccagcagcaaggcttccatccgcatcagttgatcatgaccgccacgccgatcccccgcacgctggcaatgacggcgtatgccgatctcgatacctcgatgatagatgagctgccgccaggccgcacgccagtgactacggtcgctattcctgatacccgccgtaccgacatcattgaccgcgtgcgccatgcctgcataactgaaggtcgtcaggcgtactgggtttgtacgttgattgaagagtcagagttactggaagcgcaggcggcggaagctacctgggaagagttgaaactggcgctaccagaattgaatgttggcctggtacacgggcggatgaaaccagccgagaaacaggcggtgatggcgtcgtttaaacaaggtgagctacatctgctggttgccactaccgttattgaagtcggtgttgatgtgcctaacgccagcctgatgattatcgaaaaccctgagcgtctgggtctggcgcagttacaccagctgcgcgggcgcgtaggtcgtggcgcggtggcttctcactgcgtgctgctctacaaaacgccgctttctaaaacggcgcaaattcgcctgcaagtgctgcgcgacagtaacgacggttttgtgattgcgcaaaaagatctggagattcgcggccctggcgaattgttaggcacgcgtcagacgggtaatgctgaatttaaagtggcggatttactgcgcgatcaggcgatgatcccggaagttcagcgcctggcgcgacatattcacgaacgttacccacaacaggcaaaagccttgatagaacgctggatgccggagacagaacgttactcgaatgcgtaa

SEQ ID NO: 459092 - DNA, 690 bp, Shigella boydii
atgaacccaacacgttatgcacgcatctgcgaaatgctcgccaggcggcagcctgatctgaccgtctgcatggagcaggtccacaaacctcataacgtttctgcgattattcgtaccgcagatgccgttggcgtacatgaagttcacgccgtctggcctggtagccgcatgcgcaccatggcttcggcagcggcgggtagtaacagctgggtacaggtgaaaacacaccgcaccattggcgatgccgtcgctcatctcaaaggccagggcatgcagattctggcaacccatctttctgataacgctgtcgatttccgcgaaattgattacactcgcccgacctgcattttgatgggacaggagaaaacgggcatcacgcaggaagcattggccctggcggatcaggacatcatcattccgatgatcggcatggtgcagtcgctgaatgtttccgttgcctcagccctcattctttacgaagcccagcgtcagcggcaaaatgcaggcatgtacctgcgtgaaaacagcatgttgccggaagcagagcaacaacacctgttgtttgaaggcggctatccggtgctggcgaaagtcgcaaaacgcaaaggcctgccttatccccacgtcaatcagcaaggcgagatcgaagctgatgccgactggtgggctactatgcaggctgcagggtaa

SEQ ID NO: 459093 - DNA, 2109 bp, Shigella boydii
ttgtatctgtttgaaagcctgaatcaactgattcaaacctacctgccggaagaccaaatcaagcgtctgcggcaggcgtatctcgttgcacgtgatgctcacgaggggcaaacacgttcaagcggtgaaccctatatcacgcacccggtagcggttgcctgcattctggccgagatgaaactcgactatgaaacgctgatggcggcgctgctgcatgacgtgattgaagatactcccgccacctaccaggatatggaacagctttttggtaaaagcgtcgccgagctggtagagggggtgtcgaaacttgataaactcaagttccgcgataagaaagaggcgcaggccgaaaactttcgcaagatgattatggcgatggtgcaggatatccgcgtcatcctcatcaaacttgccgaccgtacccacaacatgcgcacgctgggctcacttcgcccggacaaacgtcgccgcatcgcccgtgaaactctcgaaatttacagcccgctggcgcaccgtttaggtatccaccacattaaaaccgaactcgaagagctgggttttgaggcgctgtatcccaaccgttatcgcgtaatcaaagaagtggtgaaagccgcgcgcggcaaccgtaaagagatgatccagaagattctttctgaaatcgaagggcgtttgcaggaagcgggaataccgtgccgcgtcagtggtcgcgaaaagcatctttattcgatttactgcaaaatggtgctcaaagagcagcgttttcactcaatcatggacatctacgctttccgcgtgatcgtcaatgattctgacacctgttatcgcgtgctgggccagatgcacagcctgtacaagccgcgtccgggccgcgtgaaagactatatcgccattccaaaagcgaacggctatcagtcgttgcacacctcgatgattggcccgcacggcgtgccggttgaggtccagatccgtaccgaagatatggatcagatggcggagatgggtgttgccgcgcactgggcttataaagagcacggcgaaaccagtactaccgcacaaatacgcgcccagcgctggatgcaaagcctgctggagctgcaacagagcgccggtagttcgtttgaatttatcgagagcgttaaatccgatctcttcccggatgagatttacgttttcacaccggaagggcgcattgtcgagctgcctgccggtgcaacgcccgtcgacttcgcttatgcagtgcataccgatatcggccatgcctgcgtgggcgcacgcgtcgaccgccagccttacccgctgtcgcagccgcttactagcggtcagaccgttgaaatcattaccgctccgggcgctcgcccgaatgccgcttggctgaactttgtcgttagctcgaaagcgcgcgccaaaattcgtcagttgctgaaaaacctcaagcgtgatgattctgtaagcctgggccgtcgtctgctcaaccatgctttgggtggtagccgtaagctcaatgaaatcccgcaggaaaatattcagcgcgagctggatcgcatgaagctggcaacgcttgacgatctgctggcagaaatcggccttggtaacgcaatgagcgtggtggtcgcgaaaaatctacaacatggggacgcctccattccaccggcgactcaaagccacgggcatctgccgatcaaaggcgctgatggcgtgctgatcacctttgcgaaatgctgccgccctattcctggcgacccgattatcgcccacgtcagccccggtaaaggtctggtgatccaccatgaatcctgccgtaacatccgtggctaccagaaagagccagagaagtttatggctgtggaatgggataaagagacggcgcaggagttcatcaccgaaatcaaggtggagatgttcaatcatcagggtgcgctggcaaacctgacggcggcaattaacaccacgacttcgaatattcaaagtttgaatacggaagagaaagatggtcgcgtctacagcgcctttattcgtctgaccgctcgtgaccgtgtgcatctggcgaatatcatgcgcaaaatccgcgtgatgccagacgtgattaaagtcacccgaaaccgaaattaa

SEQ ID NO: 459094 - DNA, 276 bp, Shigella boydii; identical to SEQ ID NO: 1759

SEQ ID NO: 459095 - DNA, 624 bp, Shigella boydii
atggctcaaggcacgctttatattgtttctgcccccagtggcgcgggtaaatccagcctgattcaggctttattaaaaacccaaccgttgtatgacacccaggtttctgtttcacacaccacacgccaaccgcgtcctggtgaagtccacggtgaacattatttctttgttaatcatgatgaatttaaagaaatgattagcagagatgcgttcctcgaacacgcagaagtttttggtaattactatggcacttcgcgtgaggccattgagcaagtactggcgaccggtgtcgatgtttttctcgatatcgactggcagggcgcgcagcaaattcgccagaagatgccgcacgcgcggagtatctttattttaccgccgtctaaaattgaactggaccgccgtctacgcggtcgcggtcaggacagcgaagaggtcattgcaaagcgtatggcgcaagctgttgcagaaatgagccattacgccgaatatgattacctgattgtgaatgatgacttcgataccgcgttgaccgatttgaagaccattattcgcgccgaacgtctgcgcatgagccgccaaaagcagcgtcatgacgctttaatcagcaaattgttggcagactga

SEQ ID NO: 459096 - DNA, 1527 bp, Shigella boydii
atgaaagtatggatggcgatattaataagtatcttgtgctggcaatcatctgtgtgggcggtctgtccggcctggtcgccagccagagcacaggaagaaattttccgccagcaacagcaaataaaacagtgggacgatgactactggaaggaaggaaaaagtgaggtggaagacggtgtttacgatcagttaagcgcccgtcttacgcagtggcaacgctgctttgtgagcgagccccgcgacgtgatgatgccgcctttaaatggtgcggttatgcatccggttgcccatacgggtgtacgcaaaatggcggataaaaacgcattaagtctgtggatgcgagaacgtagcgatctttgggtgcagccaaaagttgatggcgttgcggtaaccctggtttatcgggacgggaaactgaacaaagcaatcagtcgcggtaatggcctgaaaggcgaggactggacgcagaaagttagcttaatttccgctgtgccgcaaaccgttagcgggcctttagccaacagtacgcttcagggggaaatatttctccagcgcgaggggcatatccaacaacaaatggggggaataaatgcccgcgcaaaagttgctggcttgatgatgcgccaggacgatagcgacacgctgaattctctgggcgtttttgtctgggcatggccggatggaccgcagttaatgtctgatcgtttaaaagagctggctaccgcaggttttactctaacgcagacgtatacccgtgcggtgaaaaatgctgatgaagttgcgcgcgtacgcaatgagtggtggaaagcggaattacccttcgtcaccgatggcgtagttgtacgagcggcgaaagagccagaatcccgccattggctaccgggccaggcagagtggctggtggcttggaaatatcaacctgtagctcaggttgccgaagtgaaggcgattcagtttgcggtgggtaagagcggtaaaatatcggtggttgcgtcactcgcatctgtcatgctggatgataaaaaagtccagcgggtgaatattggttccgtcaggcgctggcaggagtgggatattgcgcctggtgatcagattctcgtcagccttgccggtcagggtattcctcgcattgatgatgtggtgtggcgcggtgcagaacgtacaaaaccgacaccgccagaaaaccgctttaactcgttgacctgctactttgcttctgatgtttgtcaggaacagttcatttcacgcttagtctggctggggtcaaaacaggttcttgggctggatggcattggtgaggccggttggcgcgcgctgcatcagactcatcgctttgagcatatcttttcttggcttttattaacgccagagcaattacagaacacgccggggatcgcgaaaagtaaaagtgcgcagttatggcatcagtttaatctggctcgtaagcagccttttactcgctgggtgatggcaatgggaataccgctaacccgggcggcgcttaatgccagtgatgaacggtcctag

SEQ ID NO: 459097 - DNA, 618 bp, Shigella boydii
atgctgttacacattttgtatttggttggcatcactgccgaagccatgacgggggcgctggcggccggacgacggcgcatggatacatttggcgtaattattattgcgaccgccaccgcaattggcggagggtcagtgcgcgatattctgctgggccactatccgctcggctgggtcaaacacccggaatatgtgattatcgtcgctaccgccgcagtactcaccactatcgttgctcctgtaatgccttacctgcgcaaagtgtttctggtgctcgatgcgctcggactggtggtcttttctatcatcggcgcacaggttgcactggatatggggcacggcccaattattgccgttgtcgcggcggtaaccaccggcgtgtttggcggcgttttgcgcgatatgttctgtaaacgcatcccactggtattccagaaagagttgtatgctggtgtctcatttgcctccgccgtgctgtacatcgcgctgcaacactatgtttctaaccatgatgtggtgattatctccaccctggtattcggcttttttgcccgcttactggcgctacgtcttaagctgggattaccggtcttttactacagccacgaaggtcactaa

SEQ ID NO: 459098 - DNA, 825 bp, Shigella boydii
atgaacgaacatcatcaaccttttgaagaaatacggcattatggcactgaagggcaagaattttggtcagctagagaattggcaccgttactggattatcgggactggcgcaattttcaaaaggtactggcccgcgcgactcaagcgtgcgaagccagcaatcaagctgcatctgaccatttcgttgaaaccaccaaaatggttgtattaggttcaggggctcaacgagaacttgaagatgttcatctctcccgctatgcctgttacctggtagtacaaaacggcgaccctgcgaaaccggttattgcggcagggcaaacttattttgctatccagacccgacggcaggagctggctgacgatgaagctttcaggcaacttcgtgaagacgaaaagcgtctttttctgagaaatgaattgaaagaacataacaaacaattggttgaggcagcgcagcaagctggggtagcgacagctatcgatttcgccatatttcagaatcatggttaccgggggctgtatggtggattagatcagaaagctattcatcagcggaaggggctgaaaaagaatcagaatatcctggatcatatgggttcaacagaactggcggctaatctctttcgagctacccaaacagaagaaaaactcaagcgggatggcgtgaattcaaaacagcaagcaaacaccacacactttgacgtgggtcgcaaggtgaggcaaaccattcaggaacttggcggaaccatgcctgaggagttgccgaccccgcaggtcagcatcaagcagttggaaaacagtgtaaaaattacagagaagaaatag

SEQ ID NO: 459099 - DNA, 360 bp, Shigella boydii
atgagaatgaccagccgcaaaaaagagatacttagctactttgaaccggataacctcgaatgggtgactggtgagattggtgcgccgccgttcgatgtgtcgggtgtggcctacctgcttcatggcatggtgtcgttcgataagcgtcaccagctcgaatcaacccggcgcacactggaaagcatggttgctggtggactgcttgagcgggtgacagtgtatgaatcgcgccagatacggcgcggcggtgagactaacgcaacggtcgtgcgctacggtttgcccggtcagtgcgctgttatgcgcgatactggcggcgctgataacgcaatatcaggcgaatatatgcgggtcagttaa

SEQ ID NO: 459100 - DNA, 543 bp, Shigella boydii
atgtaccagctaaagataaccatccgagacagcaaaccacctatatggcggcgtgtgctggttccagagcaaatcccctttagtgaacttcacgcggtgatccagttggcttttggctggaatgacgaacacctgtatatgttcgagaaagggcgtaaaggtgatcccggtagcgagtatcgcgtatggggtgaggatgaaagcatgggtaatgcggcaatcacaccactatgggcagcgctccagaatgatggtgacaagctggtttacacgtatgactttggcgactggtgggattgcgtcattgtgctggagaagcaaacacacgatacgagcaatcagcccattagctgcctgcgtgggaaaggcaccaccccagtggaaaactcaggcggcttgcatggttacaatgaattgctattacaggccagagagtctgataatcctgagcaggccgagatccacaatttcctgatgctggatattgagcgccgggtttacgacctgagcagcatcaacgacagattgcaggctcttaactga

SEQ ID NO: 459101 - DNA, 186 bp, Shigella boydii
atgacaccacgcgaaatagccttattgaccatcgccaaacttgagcatggaggccaccagcttacacaggcagatcaacgggagatagaacgctcagttaatgccgatatagcccggcgcgacaggttccgcgaaatgatgcgagcacctgcctaccagtggaagaagccagcgccgcgcaggtag

SEQ ID NO: 459102 - DNA, 612 bp, Shigella boydii
gtgagagacagaacgcgcagctataccaccgacctgccccgtatagggttgccattccttgcgaacatgcgtagcaggctggcggatgctgaaccgggtacgcagctttatacccagaccgaaagcggaacgttgtatgccttccggcaagccgacagctacgccatgacaatcaacggcgtgacgcgggctattcgcaccacaaccacgaaggccgggtatggcgtccgggaatggtacgcttgcccccactgtatgaagcgggctgcaaagctgtatatcggcaagaaagacattggctgccgggcgtgctggaaacttcactataaaagccagagtgccgacatactggacaggatgcgcatgaagatacgccagcagcgatgcgcgatatggggcagcaatgaccttgccaataatctgtttaatgacattcgcatgttcccaaaaccaaaggggatgcgctgggctacgtttgacaggaagcgggcagagttatcagttatggagatggcttactggcaggcattcagcccggtagtggacagaatcacgggcgttattgagcgtaaagcaggaaaagcagccagaggcattggcctgactctataa

SEQ ID NO: 459103 - DNA, 351 bp, Shigella boydii
atgaagccatacattctggcagccggcctgatctcctcggcaccggcactatctgctatccattgtgggggctttaccatacagccagaccgttatcggacaacgattaacggcgatgtggttcatattgttgatgcgcaattttacggcgcaccgcgagactttagccaggccgccataaagttattgccggatgccattaccactaccgataggcaataccgcctagagacgcagggaggcaatgccttgcttgagttgatgaccagagaaaacccgccacgtgtgcttaatcgtgagcgctgcgatgccgggttaacaagtttcggttggtacacttctgcgccgtga

SEQ ID NO: 459104 - DNA, 564 bp, Shigella boydii
gtgttgattgatggtaaggaagtcaggatcactaatcctaaacaggctattgatcatggcattgcttttgtgaccgaaaaccgcaaggaagaagggttagtgctgatgcacgacgtcaatatgaacacgcaccatgtggcgtttcaatataacgcttcgcggatgggactcatcaatcaccgacaagaagaggcgaagacgctgcaatcaattgccagaatgaacactaaagtgagttctgtacatcaggcagtgggagcgctgagcggcggtaatcaacagaaaatcgtgttatcgaagtggctggagaaaactccgcgtattttattgctcgatgagccaacgcgcggagtggatgtcggcgcaaaatttgaaatctataacgtgatacgtcaactggctgcggcagggacagcaattattctggtgtcctctgaactgccagaagtcatggcacttagcgatcgtctggtggtaatgcgtaataaaacgattgccgatatttattcatgtgaaaatttaacgcagacacaggtaatgaccgctgcaacaggagtacgttaa

SEQ ID NO: 459105 - DNA, 750 bp, Shigella boydii
atgacagagaaaactcttgccagtccgaaaccttcggaaattcccattgcaaataattttaaaaaagtcttcaggcaatatggcggtatcctcagtggaatggtggtgttaatcattctgttcagttttattaatgacagtttttttaccgccaacaacattactaatattattcttcaggtttcgataattgcaattaccgcctatggaatgacttatgtacttttgcttggcgatattgatttatcggtcggttcaaccattgcattgattggcacatttgctgcgcttggggcttcatggggaattccatttatgttattggtcccattatccattattgcagcactggctctggggatgataaatggtggcttgacggctatagcggggatcccgtcgtttattgtcaccgttgctactatggggatcttccgtggtatcgcttatatagtgaccgatggtatgcccatcatgattaaagatgatgcctttctggcactggggaatggagaatttctctatatacctattccaatctggatattaatcatcttattgctgattaaccacttcattcttactaaaacaacctttggacgaaaaatttatatcactggtggtaataaagaagcggcaatttattcaggggtaaatgtcacccgcttgaaaattaaagtctttatgattacagccgtgctggcaggtatcagcgggatgatcctcgcctcacgcctctattccgggtaa

SEQ ID NO: 459106 - DNA, 963 bp, Shigella boydii
atgagtaaggtcttcacaattggagaaattctggttgaaattatggcgagtaaaatcggccagccatttgatcaaccaggtatctggaacggcccttatcccagtggtgcgcccgctatttttatcgaccaggtgacacgtcttggcgttccgtgcggcatcattagctgtgtggggaatgatggctttggtgatattaatatacatcgtctggctgctgacggtgtggatatcagggggatttcagtcttacctctggaagctaccgggagtgcctttgttacttatcataactctggcgatcgcgattttatttttaatattaagaatgccgcttgcggtaaattatcggcgcagcatgttgatgaaaatattctgaaggactgtacccattttcatattatgggctcttccctgttttcgtttcatatggtagacgcagtaaaaaaagcggtaactatcgttaaagcaaatggtggtgttatttctttcgaccctaatattcgtaaagagatgctcgatattccagaaatgcgtgacgccctccactttgttcttgagttaacggatatctatatgcccagcgagggcgaagtgttgctcttgtcgccacattcgacgccggagcgtgcaatcgcaggttttcttgaagaaggtgttaaagaggtgattgtgaagcgcggcaatcaaggtgccagttactactccgcgaatgagcagtttcatgttgagagctatccggtggaagaagttgacccgaccggtgcgggagactgctttggtggcgcgtggattgcctgccgccagctagggtttgacgtccatcgagcgctgcaatatgccaatgcctgcggtgcgctggcggtaaccagacgtggcccaatggagggaacgtctcgccttgcggaaatcgaagcgttcatccagcgccatgacatgtccattcgggaagcagcacaatga

SEQ ID NO: 459107 - DNA, 633 bp, Shigella boydii
atgaaaaacgaaatttggtcgtggattggcgatctctcgcaggttgccggaattaaacactatgagttacgtagtggcagagcaaagggtacagaagcgtttgatgtccgtactggtgcgggactggcatttacggtggtaaaagatcgcgcgctggatattgcatgggccagctacaaggacacggcgctttcttttatcacccccaacggcattgtcgcccccgctttttttgagtctcagggcaacggatttttacgtagcttttacgcggggttactgactacctgcggacttagctacattggcacgccttgtgaggatgaaggagaaacgctggggttacacgggcgtttggctgcgactccagcagaagaggtggggtatcgcacagaacggaccgacgacggcattgaatttgtcatcaatggcaaagtacgggaaacgcgactgttcggcgaaaatctgacgctggaaaggaccattcgctgccgttatggcgaaaatgtgctgcgcattgaagacaaggtgactaatcatggtttcacccgccagccgctgcaaattctttatcactttaattacggctggcctttattatcgccacaggccagaaatcttgctgtcggctaa

SEQ ID NO: 459108 - DNA, 429 bp, Shigella boydii
ttgctgtcggctaaaagcgtaacgccacgaactccgcatgcggcggaagggttaaccagtcatctggagatttgtaccccacagcccggttttgacgagcaggtttactatctcacgttgaatagcgacagtcaggggatgagtaaagttgctctggtgaacgccgaactggggtggggaatttacgagaaattcgacaccatgcagctacccaactttatccagtggaaaaatttaggcgcgggtgagtatgttatgggactggaggtcagtaatagttttcctgacggtcgtgataaagaacgagcgcaggggcgtctgccctttattgagccaggggaaacaaagaaatactgctttgagctgggaattgttgatggcgatgctgaaatgagcgcgttgaaagcggaaattgcaggctaccgttag

SEQ ID NO: 459109 - DNA, 1350 bp, Shigella boydii
atgctggataaaattgttattgccaaccgcggcgagattgcattgcgtattcttcgtgcctgtaaagaactgggcatcaagactgtcgctgtgcactccagcgcggatcgcgatctaaaacacgtattactggcagatgaaacggtctgtattggccctgctccgtcagtaaaaagttatctgaacatcccggcaatcatcagcgccgctgaaatcaccggcgcagtagcaatccatccgggttacggcttcctctccgagaacgccaactttgccgagcaggttgaacgctccggctttatcttcattggcccgaaagcagaaaccattcgcctgatgggcgacaaagtatccgcaatcgcggcgatgaaaaaagcgggcgtcccttgcgtaccgggttctgacggcccgctgggcgacgatatggataaaaaccgtgccattgctaaacgcattggttatccggtgattatcaaagcctccggcggcggcggtggtcgcggtatgcgcgtagtgcgcggcgacgctgaactggcacaatccatctccatgacccgtgcggaagcgaaagctgctttcagcaacgatatggtttacatggagaaatacctggaaaatcctcgccacgtcgagattcaggtactggctgacggtcagggcaacgctatctatctggcggaacgtgactgctccatgcagcgccgccaccagaaagtggtcgaagaagcaccagcaccgggcattaccccggaactacgtcgctacatcggcgaacgttgcgctaaagcgtgtgttgatatcggctatcgcggtgcaggtactttcgagttcctgttcgaaaacggcgagttctatttcatcgaaatgaacacccgtattcaggtagaacacccggttacagaaatgatcaccggcgttgacctgatcaaagaacagctgcgtatcgctgccggtcaaccgctgtcgatcaagcaagaagaagttcacgttcgcggccatgcggtggaatgtcgtatcaacgccgaagatccgaacaccttcctgccaagcccaggcaaaatcacccgtttccacgcacctggcggttttggagtgcgttgggagtctcatatctacgcgggctacaccgtaccgccgtactatgactcaatgatcggtaagctgatttgctacggtgaaaaccgtgacgtggcgattgctcgcatgaagaatgcgctgcaggagctgatcatcgacggtatcaaaaccaacgttgatctgcagatccgcatcatgaatgacgagaacttccagcatggtggcactaacatccactatctggagaaaaaactcggtcttcaggaaaaataa

SEQ ID NO: 459110 - DNA, 471 bp, Shigella boydii
atggatattcgtaagattaaaaaactgatcgagctggttgaagaatcaggcatctccgaactggaaatttctgaaggcgaagagtcagtacgcattagccgtgcagctcctgccgcaagtttccctgtgatgcaacaagcttacgctgcaccaatgatgcagcagccagctcaatctaacgcagccgctccggcgaccgttccttccatggaagcgccagcagcagcggaaatcagtggtcacatcgtacgctccccgatggttggtactttctaccgcaccccaagcccggacgcaaaagcgttcatcgaagtgggtcagaaagtcaacgtgggcgataccctgtgcatcgttgaagccatgaaaatgatgaaccagatcgaagcggacaaatccggtaccgtgaaagcaattctggtcgaaagtggacaaccggtagaatttgacgagccgctggtcgtcatcgagtaa

SEQ ID NO: 459111 - DNA, 975 bp, Shigella boydii
atgcaggcgttacttttagaacagcaggacggcaaaactctcgcatcagtacagactctggacgaaagtcgcctgccggagggcgatgtcacggtcgatgttcactggtcgagcctgaactataaagatgcgctggcgattaccggtaagggaaaaatcatccgtaattttccgatgattcctgggatcgattttgccggaactgtacgcaccagcgaagatccgcgttttcatgccggtcaggaggtgttactcactggctggggcgttggtgaaaaccactggggtgggctggcggagcaggcgcgagtgaaaggtgactggctggttgccatgccgcaagggctggacgcgcgtaaagcaataattatcggtactgccggttttaccgccatgctgtgtgtgatggcgctggaagatgccggtgttcgcccgcaggacggggagattgtcgtgacgggtgccagtggtggcgtcggcagtaccgccgtggcgctgctgcataagttgggttatcaggtcgttgccgtttccggtcgcgaaagtacccatgaatatctgaaaagtttaggtgccagccgtattctccctcgtgatgagtttgccgaatcccgtcctctggaaaaacaagtctgggctggggcaattgacactgttggcgacaaagtgctggcaaaagtgctggcgcaaatgaattacggcggctgcgtggcggcctgtggtctggcgggtggttttactctgccaaccacggtcatgccatttattctgcgtaatgtccgtttgcaaggggtggattcagtaatgacgccaccagaacgccgcgcacaagcctggcagcgactggtcgccgatttaccggaatcattctatacccaggcggcaaaagagatatctctgtcagaggcaccgaactttgccgaggccatcattaataaccagatccagggtcgcacgctggtgaaggttaactaa

SEQ ID NO: 459112 - DNA, 1941 bp, Shigella boydii
atgagattaacgacgaaattttcggcctttgttacgctgctcaccgggttaacaatttttgtgactttgctgggctgttcgctaagtttctacaacgcaattcagtataagtttagtcatcgcgttcaggcggtggcgacggcgattgatacccaccttgtgtcgaatgacttcagcacattaaggccacaaattaccgaattaatgatgtcggcagatatcgttcgtgtaggcctgctccatggtgataaacaggtttataccctggccagaaatggtagttatcgtccggttggctccagcgatctgtttcgtgaactgagcgttccgttgataaagcatccggggatgtcgctgcgtctggtttatcaggatccgatgggcaactatttccattcgttgatgaccaccgcgccgctcacgggggcgattagctttatcattgttatgctcttcttggcggtacgctggttacaacggcaacttgccgggcaagaattgctggaaacccgggctactcgtatcttaaacggtgagcgtggctctaatgtgttgggaaccatctatgaatggccgcccagaaccagcagtgcgctggatacgctgcttcgtgaaattcagaacgcacgcgaacaacacagccgtcttgatacgctgatccgctcttatgccgcccaggacgtgaaaaccggcctcaataaccgactctttttcgataatcagttagcaacgttactggaagatcaggagaaagtaggtacccacgggatcgtgatgatgattcgtctgccggatttcaatatgttgagcgatacttgggggcacagccaggttgaagaacagttcttcactctgacgaatctgctgtcgacatttatgatgcgctaccctggcgcactgctggcgcgttaccaccgcagtgattttgctgcgctgttaccgcaccggacgttaaaagaggcagagagcatcgccggtcagttaatcaaagccgtcgataccttgccgaacaataaaatgctcgatcgcgacgatatgatccacattggtatctgcgcctggcgtagtggtcaggataccgagcaggtaatggaacatgcagagtctgccacgcgtaatgcgggattgcagggcggcaatagctgggctatttacgatgactcgttgcctgaaaaaggacgcggtaatgttcgctggcgtacgcttatcgagcaaatgctcagtcgcggcggcccgcgcctttatcaaaaaccggcggttactcgcgaaggtcaggttcatcatcgcgaactcatgtgccgcatcttcgatggtaatgaagaggttagctcggcggagtatatgccgatggtcttgcagtttggcttatcggaagagtatgaccgtctgcaaatcagccgtcttattccactattgcggtactggccagaggaaaatctggcgattcaggttaccgttgagtcgctgattcgcccgcgttttcagcgttggctgcgcgatacgttaatgcaatgtgaaaaatcacaacgaaaacgcataattattgaacttgcagaggccgatgtaggtcaacatatcagtcgtttacaacctgttattcgtttagtgaatgctttaggggtacgggtagccgtcaaccaggctggtttgacgctggtaagcaccagttggatcaaagaacttaatgttgagttactcaagctccatccggggctggtcagaaacattgagaagcgaacggagaaccagctgctggttcaaagcctggtggaagcctgctccgggaccagcacccaggtttacgccaccggtgtgcgttcgcgaagcgagtggcagaccctgattcagcgcggtgttacaggcgggcaaggggattttttcgcgtcctcacagccacttgatactaacgtgaaaaaatattcacaaagatactcggtttaa

SEQ ID NO: 459113 - DNA, 1044 bp, Shigella boydii
atgttgaaaaaatttcgtggcatgttttccaatgacttgtccattgacctgggtactgcgaataccctcatttatgtaaaaggacaaggcatcgtattgaatgagccttccgtggtggccattcgtcaggatcgtgccggttcaccgaaaagcgtagctgcagtaggtcatgacgcgaagcagatgctgggccgtacgccgggcaatattgctgccattcgcccaatgaaagacggcgttatcgccgacttcttcgtgactgaaaaaatgctccagcacttcatcaaacaagtgcacagcaacagctttatgcgtccaagcccgcgcgttctggtttgtgtaccggttggcgcgacccaggttgaacgccgcgcaattcgtgaatccgcgcagggcgctggtgcccgtgaagtcttcctgattgaagaaccgatggctgccgcaattggtgctggcctgccggtttctgaagcgaccggttctatggtggttgatatcggtggtggtaccactgaagttgctgttatctccttgaacggcgtggtttactcctcttccgtgcgcattggtggtgatcgtttcgacgaagctatcatcaactatgtgcgtcgtaattacggttctctgatcggtgaagccactgcagaacgtatcaagcacgaaatcggttcggcttacccgggcgatgaagtccgtgaaatcgaagttcgtggccgtaacctggcagaaggtgttccacgcggttttaccctgaactccaacgaaatcctcgaagcactgcaggaaccgctgaccggtattgtgagcgcggtaatggttgcactggaacagtgcccgccggaactggcttccgacatctccgagcgcggcatggtgctcaccggtggtggcgcactgctgcgtaaccttgaccgtttgttaatggaagaaaccggcattccagtcgttgttgctgaagacccgctgacctgtgtggcgcgcggtggcggcaaagcgctggaaatgatcgacatgcacggcggcgacctgttcagcgaagagtaa

SEQ ID NO: 459114 - DNA, 1086 bp, Shigella boydii
atgaagccaatttttagccgtggcccgtcgctacagattcgccttattctggcggtgctggtggcgctcggcattattattgccgacagccgcctggggacgttcagtcaaatccgtacttatatggataccgccgtcagtcctttctactttgtttccaatgctcctcgtgaattgctggatggcgtatcgcagacgctggcctcgcgtgaccaactagaacttgaaaaccgggcgttacgtcaggaactgttgctgaaaaacagtgaactgctgatgcttggacaatacaaacaggagaacgcgcgtctgcgcgagctgctgggttccccgctgcgtcaggatgagcagaaaatggtgactcaggttatctccacggttaacgatccttatagcgatcaagttgttatcgataaaggtagcgttaatggcgtttatgaaggccagccggtcatcagcgacaaaggtgttgttggtcaggtggtggccgtcgctaaactgaccagtcgcgtgctgctgatttgtgatgcgacccacgcgctgccaatccaggtgctgcgcaacgatatccgcgtaattgcagccggtaacggttgtacggatgatttgcagcttgagcatctgccagcgaatacggatattcgtgttggtgatgtgctggtgacctccggtctgggcggtcgtttcccggaaggctatccggtcgcggttgtctcttccgtaaaactcgatacccagcgcgcttatactgtgattcaggcgcgtccgactgcaggactgcaacgtttgcgttatctgctgctgctgtggggcgcggatcgtaacggcgctaacccgatgacgccggaagaggtgcatcgtgttgctaatgaacgtctgatgcagatgatgccgcaggtattgccttcgccagacgcgatggggccaaagttacctgaaccggcaacggggatcgctcagccgactccgcagcaaccgacgacaggaaatgcagctactgcgcctgctgctaatcgctctccacaaagggctacgccgccgcaaagtggtgctcaaccgcctgcgcgtgcgccgggagggcaatag

SEQ ID NO: 459115 - DNA, 489 bp, Shigella boydii
gtggcgagctatcgtagccagggacgttgggtaatctggctctctttcctcattgcgctgttgttgcaaatcatgccctggccggataacctgattgttttccggccaaactgggtgttacttatcttgttgtattggatcctggccttgccccatcgcgtaaatgtgggcacaggttttgtgatgggtgccatactggatctgatcagcggctcgacgcttggcgtacgcgtattggcgatgagcatcattgcttacctggtggcgctgaaataccagcttttccgcaacctcgcattatggcagcaggcgctagtcgtcatgttgctttcgctggtggtggatattattgttttctgggcagagtttttagtgattaacgtctctttcagaccggaagtgttctggagtagtgtagtcaatggggtgctctggccgtggattttcttgctgatgcgtaaagtccgtcagcagtttgcagtgcaataa

SEQ ID NO: 459116 - DNA, 594 bp, Shigella boydii
atgacttctctgtatttagcttccggttctccgcgtcgtcaggagttacttgcgcaacttggcgtgacctttgaacgtattgttacgggcattgaggagcagcgtcagccgcaggagagcgcgcagcagtatgttgtgcgtctggcacgcgagaaagcacaggcgggtgtcgcgcaaacggcgcaggatctcccggtgctgggtgcggatactatcgttatcctgaatggagaagtgctggagaaaccgcgcgacgcagagcatgcggcgcagatgttgcgcaaattatcgggtcagacccatcaggtgatgacggcagtggtgttggccgacagccagcacattctcgattgcctggtggtcaccgatgtgactttcagaacgttaacagacgaagacatcgcgggctatgtcgccagcggtgaaccgttagataaagcaggtgcatacggtattcaggggctgggtggctgttttgtcaggaagataaatggcagctatcacgccgtagtcggcttaccgctggttgaaacgtatgaattattaagtaattttaacgcactgcgtgagaaaagggataaacatgacggctga

SEQ ID NO: 459117 - DNA, 1470 bp, Shigella boydii
atgacggctgaattgttagtaaacgtaacgccttcggaaacgcgagtggcgtatattgatggcggtattctgcaggaaattcatattgaacgtgaggcgcgacgcggaatagtaggcaatatctacaagggtcgtgtaagtcgtgtacttccgggtatgcaggcggcttttgtagatattgggctggataaagccgcgtttcttcatgcatccgatatcatgccgcacaccgaatgtgtggcgggtgaagaacaaaagcaattcacggtgcgcgacatctcggaactggttcgtcaggggcaagatctgatggtgcaggtggtgaaagatccgcttggcactaaaggtgcgcgcctgaccaccgatatcacgctgccttctcgctatctggtgtttatgccaggggcttctcacgttggggtttcccaacgtattgaaagcgaatcagaacgtgaacgcctgaaaaaagtggtcgcagagtattgcgacgagcagggcgggtttatcatccgtaccgcagcggaaggggttggcgaggctgaactggcctccgatgccgcttatctgaaacgcgtctggaccaaagttatggagcgtaaaaaacgcccgcagacccgttatcagctgtacggcgaactggcgctggcgcagcgtgttctgcgtgatttcgccgacgccgaactggaccgcattcgcgttgactcacgcctgacttacgaagcattgctggagtttacctcggagtacattcccgagatgaccagcaagctggagcattacaccggacgccagccgattttcgatctctttgatgtcgaaaacgaaatccagcgagcgctggaacgcaaagtagaactgaaatccggtggttatctgattatcgaccagaccgaagcgatgaccaccgtggacatcaataccggagcgtttgtcggtcatcgcaatctggacgacaccattttcaataccaatattgaagcgacgcaggctatcgctcgccagttacggttgcgtaatctgggtgggattatcattattgatttcatcgatatgaataatgaagatcaccgccgccgcgtgctgcactcgctggagcaggcgttgagcaaagaccgggtgaaaaccagcgttaatggtttttcggcgctggggctggtggagatgacgcgtaaacgcacccgcgaaagcattgagcacgtactgtgtaacgaatgcccaacctgccacggtcgcggaacggtgaaaaccgtggaaacggtatgctatgaaatcatgcgcgagattgttcgtgtccaccatgcttacgactccgaccgtttcctggtctatgcttctccggcagtagctgaagccttgaaaggcgaagagtcacactcgctggcggaagtggaaattttcgttggcaaacaggttaaagtacaaattgaaccgctctataaccaggagcagtttgacgtcgtaatgatgtaa

SEQ ID NO: 459118 - DNA, 3801 bp, Shigella boydii
gtgaggcgattgccggggattttactgcttactggagccgcgctcgttgtgatcgcagccctgctggttagcggcctgcgtattgctttaccgcatcttgacgcctggcgtccggaaatcctcaacaaaatagaatccgcgactggcatgccggtagaagccagtcagctctcagccagctggcagaattttggcccgacgcttgaagcacacgacatccgtgcagaactaaaagatggcggcgaattttcggttaaacgcgttactctggcgctggatgtctggcagagcttgttacatatgcgctggcagtttcgcgacctcactttctggcagctgcgctttcgcaccaacactcctatcaccagcggtggtggtaatgatagcctggaagccagtcacatcagcgatctgtttcttcgtcaatttgaccatttcgatctccgcgacagtgaagtcagttttctgacgccatccggtcagcgcgccgagctggcgatcccacaactcacctggctgaacgatccacgtcgacaccgtgcggaaggcctggtaagcctctccagccttaccggacagcacggcgtgatgcaggtgcgcatggatttgcgcgatgatgaggggttgttaagcaatggtcgcgtctggctacaggcggatgacatcgacctgaagccgtggctcggtaaatggatgcaggacaatattgctctggaaacggcacagttctcccttgaaggctggatgacgatcgacaaaggcgatgtaaccggcggtgacgtctggctgaaacagggcggtgccagctggttgggcgagaagcaaacgcatacgctgtcggtggataatctgaccgcgcatattacgcgtgaaaatccgggctggcagttctctattcccgatacacggatcacgatggacggcaaaccctggccgagcggagcattgacgctggcctggataccggaacaggacgttggcggcaaagacaataaacgcagtgacgaactccggattcgcgccagtaatctggagctggcaggcctggagggcatacgcccgctggccgcgaaactttcacctgcactgggtgatgtttggcgctccacacaaccgagcggcaagattaacactctggcgctggatatcccgcttcaggcggcagacaagacccgttttcaggcatcgtggagcgatctggcctggaagcaatggaaattattaccgggtgcggaacacttctccgggacgctttccggcagcgttgaaaatggtttgcttaccgcgtcgatgaagcaggcaaagatgccttacgaaacggtattccgtgcgccactggaaatcgccgacggccaggcaactataagctggctgaacaatgacaaaggtttccagctggatgggcgtaatattgacgttaaagccaaagccgtccatgcgcgcggcggttttcgttacctgcaacctgctaacgatgaaccctggctgggtattctggctggcatcagtaccgatgatggttcacaagcctggcgctatttcccggaaaacttgatgggtaaagacctagttgattacttaagtggcgcgattcagggcggtgaagcggataacgcgacgctggtttatggtggcaatccgcaactcttcccctataaacacaacgaaggtcagtttgaagtgctggtgccgctgcgtaacgcgaagtttgccttccagccggactggcctgcattaactaaccttgatattgaactagactttattaacgacggtttatggatgaaaaccgatgacgttaatctgggcggcgtgcgcgcgagtaatctcaccgcagtgatccctgactactcgaaagaaaaactgctgattgacgctgacattaaaggtccgggtaaagccgttggcccttactttgatgagacaccgctgaaagattctctgggtgcgaccctgcaagaactccagctcgacggcgatgtgaatgctcgcttacatcttgatatcccgctgaacggcgaactggtaaccgcgaaaggtgaagtgacgctgcgtaataacagtctgtttatcaaaccactcgacagcaccctgaaaaatttgagcggtaaattcagctttatcaatggcgatctgcaaagtgaaccactgacagcaagctggtttaatcagccgttgaacgtggatttttccaccaaagaaggggcaaaagcctaccaggttgcggtaaacctcaacggtaactggctaccggcgaaaaccggcgttctgcctgcagcggtgaacgaagcattgagtggcagcgtggcgtgggatggtaaagtgggcattgatctgccttatcatgctggcgcgacctataacgtagagctgaacggcgatctgaataatgtgagcagtcacttaccttcaccgttagccaaacctgcgggtgaaccactgccggtaaacgttaaggttgatggcaatctcagcagctttgaattaaccggacaggctggtgcggataaccatttcaatagccgctggttgcttggtcaaaagctgacgctcgatcgtgctatttgggcggcagacagtaaaacgctcccgccgttgccggaacaaagtggcgttgaactcaatatgccgccgatgaatggtgccgagtggctggccctgttccagaaaggcgctgcggagagtgtcggtggtgcagcgagtttcccacaacacataacgttacgtacgcctatgttgtcactgggaaatcagcaatggaataacctgagtattgtttcgcaaccgacggcaaatggcaccctggttgaggcgcaggggcgtgaaatcaatgccacgctggcgatgcgtaataacgcgccgtggctggcgaatatcaaatatctttattacaacccgagcgtggcgaaaactcgtggtgattcaacaccgtcatcacctttcccgacaacggagcgcattaacttccgtggctggtcggacgcacaaatacgatgcacagagtgctggttctgggggcaaaaattcggtcgtattgacagtgatctcaccatttctggcgatacgttaacgctgaccaatggactgattgatactggtttctcgcggcttactgccgatggtgaatgggttaataatccggggaatgaacgtacctcgctgaaaggaaaactgcgcgggcagaaaattgatgccgccgcagaattttttggtgtcacgacgcccatacgccagtcgtcatttaatgtggattacgatttacactggcgcaaagcaccctggcaaccagatgaggcgacgttgaatggcatcattcatactcaactgggtaaaggcgaaattaccgaaatcaataccggacatgccgggcaattgctgcgcttattgagcgttgatgccctgatgcgtaagctgcgttttgatttcagagacacttttggcgaagggttctattttgactccattcgcagcaccgcgtggattaaagacggcgttatgcacaccgacgacacgctggtggatggcctggaggcggatatcgccatgaaagggtcggtaaatctggtacgtcgcgacctgaatatggaagcggttgtcgcaccagagatttctgcgacggtgggcgtggctgcggcttttgcggttaaccccattgttggcgcggcagtatttgcagccagtaaagtgctggggccgctgtggagcaaagtctccattttgcgctatcacatttcgggtccgctggacgatccgcaaatcaacgaagtgttgcgccaaccgcgtaaagaaaaagcgcaatga

SEQ ID NO: 459119 - DNA, 1446 bp, Shigella boydii
atgactcttaacctggtaagtgaacaattgctagcggcgaacggcctgaaacatcaggacttgttcgcgatcctcggtcaactggccgaacgtcgccttgattatggcgatctctattttcagtcgagctatcacgaatcctgggttttagaagaccgcattattaaagatggttcttacaacatcgatcagggcgttggcgtgcgtgcaatcagcggtgaaaaaaccggatttgcttacgctgaccaaatcagcctgctggcgctggaacagagtgcgcaagcggcgcgcaccatcgtccgtgatagtggtgatggcaaagtacagacgctgggcgcggtagggcatagcccgttgtatacctcggtagatccgctgcaaagcatgagccgtgaagagaagctggatatcctgcgtcgcgtcgataaggttgctcgcgaagcggacaagcgcgtacaggaagtgactgccagcctcagtggtgtctatgaattaattctggttgcggccaccgacggcacgctagcggcggatgtccgtccgctggtgcgtctttccgtgagcgttctggtcgaagaagatggcaaacgcgaacgcggtgccggtggcggtggcggtcgttttggttatgagttcttccttgccgatcttgacggcgaagtccgtgcggatgcatgggcaaaagaagcagtgcgtatggcgctggtcaatctttctgccgttgctgcaccagcgggcaccatgccggtagtacttggcgcaggttggccgggcgtgctgttgcatgaagcggtaggtcacggtctggaaggcgacttcaaccgccgcggcacttcagtatttagtgggcaggtcggggagctggtggcttcagaactgtgtaccgtggttgatgacggcacgatggtcgatcgccgtggttcggtggcgattgatgacgaaggtacgccaggccagtacaacgtgctgattgagaacggcattctgaaaggctacatgcaggataaactcaacgcgcgtttgatggggatgacgccgactggcaacggtcgccgtgaatcctacgcccatctgcccatgccgcgtatgaccaacacctatatgctgccgggtaaatcgaccccgcaggaaattattgaatccgttgagtacggtatctatgcaccgaactttggtggcggtcaggtggatatcacctccggcaaattcgttttctccacttcagaagcatatctgattgaaaacggtaaagtaacgaagccggtgagaggcgcaacgttgattggttccggtatcgaaaccatgcagcagatttcgatggttggcaacgacctgaaactggataacggcgtaggtgtctgcggtaaagaagggcaaagtttgccggttggcgtgggccagccaacgctgaaagttgataacctgactgttggcggtactgcgtaa

SEQ ID NO: 459120 - DNA, 930 bp, Shigella boydii
atggaacgactaaaacgcatgtcggtgtttgccaaagtagttgaatttggctcttttaccgccgccgccagacagctacagatgagcgtttcgtccatcagtcagacggtgtcaaaactggaagatgagttgcaggtaaagctgttaaaccgtagcacacgcagcattggcctgaccgaagccggtagaatttactaccagggctgccgtcgtatgcttcatgaagtgcaggatgttcatgagcaactgtatgccttcaataacacccccatcgggacgctacgcattggctgttcttcaactatggcacaaaatgttctcgccgggctgacagccaaaatgctgaaagaatacccaggtttgagcgtcaatctggttaccggaattccagcccccgacctgattgccgacggtctggatgtggtgatccgcgtcggcgcgttgcaggattccagcctgttttcccgccgtcttggcgcgatgccaatggtggtgtgcgccgcgaaaagctatctcacacaatacggcataccggaaaaacccgccgatttaagtagccattcatggcttgaatacagcgtgcggcccgacaatgaatttgaactgattgcaccggaagggatctcgactcgcctgatcccgcaagggagatttgtgactaatgatccgatgacgctggtgcgctggctaacggcgggtgccgggatcgcctacgtgccgctgatgtgggtgatcaacgagatcaatcgtggggagctggagatcctgctgccgcgttatcagtcagatccacgcccggtttatgcgttatataccgaaaaagataagctgccgctgaaggtacaggtcgtgatcaactcgctgacggattattttgttgaggtcggtaaattgtttcaggagatgcacgggcgcgggaaagagaagtaa

SEQ ID NO: 459121 - DNA, 381 bp, Shigella boydii; identical to SEQ ID NO: 458155

SEQ ID NO: 459122 - DNA, 657 bp, Shigella boydii
atgcctgcgatcaatgccaaacgtgtttaccggatcatgcgccagaatgcgctgttgcttgagcgaaaacctgctgtaccgccatcgaaacgggcacatacaggcagagtggccgtgaaagaaagcaatcagcgatggtgctctgacgggttcgagttctgctgtgataacggagagagactgcgtgtcacgttcgcgctggactgctgtgatcgtgaggcactgcactgggcggtgactaccggcggcttcaacagtgaaacagtacaggacgtcatgctgggtgcggtggaacgccgcttcggcaacgatcttccgtcgtctccagtggagtggctgacggataatggttcatgctaccgggctaatgaaacacgccagttcgcccggatgttgggacttgaaccgaagaacacggcggtgcggagtccggagagtaacggaatagcagagagcttcgtgaaaacgataaagcgtgactacatcagtatcatgcccaaaccagacgggttaacggcagcaaagaaccttgcagaggcgttcgagcattataacgaatggcatccgcatagtgcgctgggttatcgctcgccacgggaatatctgcggcagcgggcttgtaatgggttaagtgataacagatgtctggaaatatag

SEQ ID NO: 459123 - DNA, 813 bp, Shigella boydii
atggcaacaacacaacaatctggatttgcacctgctgcatcgcctctcgcttcgaccatcgttcagaccccggacgacgcgattgtggcgggcttcacctctatcccttcacaaggggataacatgcctgcttaccatgccagaccaaagcaaagcgatggcccactgccagtggtcattgtagtgcaggaaatttttggcgtgcatgaacatatccgcgacatttgtcgccgtctggcgctggaggagtatctggctatcgcacctgaactttacttccgcgaaggcgatccgaatgattttgccgatatccccacgttgcttagcggtctggtagcaaaagtgcctgactcgcaggtgctggccgatctcgatcatgtcgccagttgggcttcccgcaacggcggcgatgttcatcgtttaatgatcaccggattcagctggggtggacgtatcacctggctgtatgccgcgcataatccacagctaaaagccgcagtggcgtggtacggcaaactgacgggcgacaagtcgctgaattcaccgaaacaacctgttgatatcgcaaccgatcttaacgcgccgattctcggcttatatggtggtcaggataacagcattccgcaggagagcgttgaaaccatgcgccaggcgctgcgggctgctaatgcgaaagcagagattatcgtgtacccggacgccgggcatgcattcaacgctgattatcgcccgagctatcatgccgaatctgcgaaagatggctggcagcgtatgctggaatggtttaagcagtatggtgggaagcggagttag

SEQ ID NO: 459124 - DNA, 762 bp, Shigella boydii
atgtccaagtctgatgtttttcatctcggcctcactaaaaacgatttacaaggggctacgcttgccatcgtccctggcgacccggatcgtgtggaaaagatcgccgcgctgatggataagccggttaagctggcatctcaccgcgaattcaccacctggcgtgcagagctggatggtaaacctgttatcgtctgctctaccggtatcggcggcccgtctacctctattgctgttgaagagctggcacagctgggcattcgcaccttcctgcgtatcggtacaacgggcgctattcagccgcatattaatgtgggtgatgtcctggttaccacggcgtctgtccgtctggatggcgcgagcctgcacttcgcaccgctggaattcccggctgtcgctgatttcgaatgtacgactgcgctggttgaagctgcgaaatccattggcgcgacaactcacgttggcgtgacagcttcttctgataccttctacccaggccaggaacgttacgatacttactctggtcgcgtagttcgtcactttaaaggttctatggaagagtggcaggcgatgggcgtaatgaactatgaaatggaatctgcaaccctgctgaccatgtgtgcaagtcagggcctgcgtgccggtatggtagcgggtgttatcgttaaccgcacccagcaagagatcccgaatgctgagacgatgaaacaaactgaaagccaagcggtgaaaatcgtggtggaagcggcgcgtcgtctgctgtaa

SEQ ID NO: 459125 - DNA, 1428 bp, Shigella boydii
gtggatttctcaatcatggtttacgcagttattgcgttggtgggtgtggcaattggctggctgtttgccagttatcaacatgcgcagcaaaaagccgagcaattagctgaacgtgaagagatggtcgcggagttaagcgcggcaaaacaacaaattacccaaagcgagcactggcgtgcagagtgcgagttactcaataacgaagtgcgcagcctgcaaagtattaacacctctctggaggccgatctgcgtgaagtaaccacgcggatggaagccgcacagcaacatgctgacgataaaattcgccagatgattaacagcgagcagcgcctcagtgagcagtttgaaaacctcgccaaccgtatttttgagcacagcaattgccgggttgatgagcaaaaccgtcagagtctgaacagcctgttgtcgccgctacgtgaacaactggacggtttccgccgtcaggttcaggacagcttcggtaaagaagcacaagaacgccataccctgacccacgaaattcgcaatctccagcaactcaacgcgcaaatggcccaggaagcgatcaacctgacgcgcgcgctgaaaggcgacaataaaacccagggcaactggggcgaggtagtattgacgcgggtgctggaggcttccggtctgcgtgaagggtatgaatatgaaacccaggtcagcatcgaaaatgacgcccgctcgcggatgcagccggatgtcatcgtgcggctgccgcagggaaaagatgtggtgatcgacgccaaaatgacgctggtcgcctatgaacgctattttaacgccgaagacgactacacccgcgaaagcgcgctacaggaacatatcgcgtcggtgcgtaaccatatccgtttgctgggacgcaaagattatcaacagctgccggggctgcgaactctggattacgtgctgatgtttattcccgttgaacccgcttttttactggcgtttgaccgccagccggagctgatcaccgaagcgttgaaaaacaatatcatgctggttagcccgactacgctgctggtggcgttgcgtactattgccaacctgtggcgttatgagcatcaaagccgcaacgcccagcaaatcgccgatcgtgccagcaagctgtacgacaagatgcgtttgttcatcgatgacatgtccgcgattggtcaaagtctcgacaaagcgcaggataactaccgccaggcaatgaaaaaactctcttcaggtcgcggaaatgtgctggcgcaggcagaagcgtttcgcggtttaggagtagaaattaaacgcgagattaatccggatttggctgaacaggcggtgagccaggatgaagagtatcgacttcggtcggttccggagcagccgaatgatgaagcttatcaacgcgatgatgaatataatcagcagtcgcgctag

SEQ ID NO: 459126 - DNA, 756 bp, Shigella boydii
atggtggataagtcacaagaaacgacgcactttggttttcagaccgtcgcgaaggaacaaaaagcggatatggtcgcccacgttttccattccgtggcatcaaaatacgatgtcatgaatgatttgatgtcatttggtattcatcgtttgtggaagcgattcacgattgattgcagcggcgtacgccgtgggcagaccgtgctggatctggctggtggcaccggcgacctgacagcgaaattctcccgcctggtcggagaaactggcaaagtggtccttgctgatatcaatgaatccatgctcaaaatgggacgcgagaagctgcgtaatatcggtgtgattggcaacgttgagtatgttcaggcgaacgctgaggcgctgccgttcccggataacacctttgattgcatcaccatttcgtttggtctgcgtaacgtcaccgacaaagataaagcactgcgttcaatgtatcgcgtgctgaaacccggcggccgcctgctggtgcttgagttctcgaagccaattatcgagccgctgagcaaagcctatgatgcatactccttccatgtgctgccgcgtattggctcactggtcgcgaacgacgccgacagctaccgttatctggcagaatccatccgtatgcatcccgatcaggataccctgaaagccatgatgcaggatgccggattcgaaagtgtcgactactacaatctgacggcaggggttgtggcgctgcatcgtggttataagttctga

SEQ ID NO: 459127 - DNA, 606 bp, Shigella boydii
atgccttttaaacctttagtgacggcaggaattgaaagtctgctcaacaccttcctgtatcgctcacccgcgctgaaaacagcccgctcgcgtctgctgggtaaagtattgcgcgtggaggtaaaaggcttttcgacgtcattgattctggtgttcagcgaacgccaggttgatgtactgggcgaatgggcaggcgatgctgactgcaccgttatcgcctacgccagtgtgttgccgaaacttcgcgatcgccagcagcttaccgcactgattcgcagtggtgagctggaagtgcagggcgatattcaggtggtgcaaaacttcgttgcgctggcagatctggcagagttcgaccctgcggaactgctggccccttataccggtgatatcgccgctgaaggaatcagcaaagccatgcgcggaggcgcaaagttcctgcatcacggcattaagcgccagcaacgttatgtggcggaagccattactgaagagtggcgtatggcacccggtccgcttgaagtggcctggtttgcggaagagacggctgccgtcgagcgtgctgttgatgccctgaccaaacggctggaaaaactggaggctaaatga

SEQ ID NO: 459128 - DNA, 1641 bp, Shigella boydii
atgacgccaggtgaagtacggcgcctatatttcatcattcgcacttttttaagctacggacttgatgaactgatccccaaaatgcgtatcaccctgccgctacggctatggcgatactcattattctggatgccaaatcggcataaagacaaacttttaggtgagcgactacgactggccctgcaagaactggggccggtttggatcaagttcgggcaaatgttatcaacccgccgcgatctttttccaccgcatattgccgatcagctggcgttattgcaggacaaagttgctccgtttgatggcaagctggcgaagcagcagattgaagctgcaatgggcggcttgccggtagaagcgtggtttgacgattttgaaatcaagccgctggcttctgcttctatcgcccaggttcataccgcgcgattgaaatcgaatggtaaagaggtggtgattaaagtcatccgcccggatattttgccggtcattaaagcggatctgaaacttatctaccgtctggctcgctgggtgccgcgtttgctgccggatggtcgccgtctgcgcccaaccgaagtggtgcgcgagtacgaaaagaccttgattgatgaactgaatttgctgcgggaatctgccaacgccattcagcttcggcgcaattttgaagacagcccgatgctctacatcccggaagtttaccctgactattgtagtgaagggatgatggtgatggagcgcatttacggcattccggtgtctgatgttgcggcgctggagaaaaacggcactaacatgaaattgctggcggaacgcggcgtgcaggtgttcttcactcaggtctttcgcgacagctttttccatgccgatatgcaccctggcaacatcttcgtaagctatgaacacccggaaaacccgaaatatatcggcattgattgcgggattgttggctcgctaaacaaagaagataaacgctatctggcagaaaactttatcgccttctttaatcgcgactatcgcaaagtggcagagctacacgtcgattcaggctgggtgccaccagataccaacgttgaagagttcgaatttgccattcgtacggtctgtgaacctatctttgagaaaccgctggccgaaatttcgtttggacatgtactgttaaatctgtttaatacggcgcgtcgcttcaatatggaagtgcagccgcaactggtgttactccagaaaaccctgctctatgtcgaaggggtaggacgccagctttatccgcagctcgatttatggaaaacagcgaagcctttcctggagtcgtggattaaagatcaggtcggtattcctgcgctggtgagagcatttaaagaaaaagcgccgttctgggtcgaaaaaatgccagaactgcctgaattggtttacgacagtttgcgccagggcaagtatttacagcacagtgttgataagattgcccgcgagcttcagtcaaatcatgtacgtcagggacaatcgcgttattttctcggaattggcgctacgttagtattaagtggcacattcttgttggtcagccgacctgagtgggggctgatgcccggctggttaatggcaggtggtctgatcgcctggtttgtcggttggcgcaaaacacgctga

SEQ ID NO: 459129 - DNA, 270 bp, Shigella boydii
atgggtggtatcagtatttggcagttattgattattgccgtcatcgttgtactgctttttggcaccaaaaagctcggcaccatcggttccgatcttggtgcgtcgatcaaaggctttaaaaaagcaatgagcgatgatgaaccaaagcaggataaaaccagtcaggatgctgattttactgcgaaaactatcgccgataagcaggcggatacgaatcaggaacaggctaaaacagaagacgcgaagcgccacgataaagagcaggtgtaa

SEQ ID NO: 459130 - DNA, 516 bp, Shigella boydii
gtgtttgatatcggttttagcgaactgctattggtgttcatcatcggcctcgtcgttctggggccgcaacgactgcctgtggcggtaaaaacggtagcgggctggattcgcgcgttgcgttcactggcgacaacggtgcagaacgaactgatccaggagttaaaactccaggagtttcaggacagtctgaaaaaggttgaaaaggcgagcctcactaacctgacgcccgaactgaaagcgtcgatggatgaactacgccaggccgcggagtcgatgaagcgttcctacgttgcaaacgatccagaaaaggcgagcgatgaagcgcacaccatccataacccggtggtgaaagataatgaagctgcgcatgagggcgtaacgcctgccgctgcacaaacgcaggccagttcgccggaacagaagccagaaaccacgccagagccggtggtaaaacctgctgcggacgctgaaccgaaaaccgctgcaccttccccttcgtcgagtgataaaccgtaa

SEQ ID NO: 459131 - DNA, 777 bp, Shigella boydii
atgtctgtagaagatactcaaccgcttatcacgcatctaattgagctgcgtaagcgtctgctgaactgcattatcgcggtgatcgtgatattcctgtgtctggtctatttcgccaatgacatctatcacctggtatccgcgccattgatcaagcagttgccgcaaggttcaacgatgatcgccaccgacgtggcctcgccgttctttacgccgatcaagctgacctttatggtgtcgctgattctgtcagcgccggtgattctctatcaggtgtgggcatttatcgccccagcgctgtataagcatgaacgtcgcctggtggtgccgctgctggtttccagctctctgctgttttatatcggcatggcattcgcctactttgtggtctttccgctggcatttggcttccttgccaataccgcgccggaaggggtgcaggtatccaccgacatcgccagctatttaagcttcgttatggcgctgtttatggcgtttggtgtctcctttgaagtgccggtggcaattgtgctgctgtgctggatggggattacctcgccagaagacttacgcaaaaaacgcccgtatgtgctggttggtgcattcgttgtcgggatgttgctgacgccgccggatgtcttctcgcaaacgctattggcgatcccgatgtactgtctgtttgaaatcggtgtcttcttctcacgcttttacgttggtaaagggcgaaatcgggaagaggaaaacgacgctgaagcagaaagcgaaaaaactgaagaataa

SEQ ID NO: 459132 - DNA, 783 bp, Shigella boydii
atgtttgatatcggcgttaatttgaccagttcgcaatttgcgaaagaccgtgatgatgttgtagcgcgcgcttttgacgcgggagttaatgggctactcatcaccggcactaacctgcgtgaaagccagcaggcgcaaaagctggcgcgtcagtattcgtcctgttggtcaacggcgggcgtacatcctcacgacagcagccagtggcaagctgcgactgaagaagcgattattgagctggccgcgcagccagaagtggtggcgattggtgaatgtggtctcgactttaaccgcaacttttcgacgccggaagagcaggaacgcgcttttgttgctcagctacgcattgccgcagaattaaacatgccggtatttatgcactgtcgcgatgcccacgagcggtttatgacattgctggagccgtggctggataaactgcctggtgcggttcttcattgctttaccggcacacgcgaagagatgcaggcgtgcgtggcgcgtggaatttatatcggcattaccggttgggtttgcgatgaacgacgcgggctggagctgcgggaattgttgccgttgattccggcggagaaattgctgatcgaaactgatgcgccgtatctgctcccgcgcgatttcacgccaaagccatcatcccggcgcaacgagccagcccatctgcaccatattttgcaacgtattgcgcactggcgtggagaagatgccgcatggctggctgccaccacggatgccaatgtcaaaacactgtttgggattgcgttttag

SEQ ID NO: 459133 - DNA, 489 bp, Shigella boydii
atgcaatcctggtatttactgtactgcaagcgcgggcaacttcaacgtgcccaggaacacctcgaaagacaggctgtgaattgcctggcaccgatgatcaccctggaaaaaatcgtgcgtggaaaacgtactgcagtcagtgagccattgtttcccaactacctgtttgtcgaatttgatccagaagtgattcataccacgactatcaacgcgacccgcggtgtcagccacttcgtgcgctttggcgcgtcgccagcgatagtcccatcggcggtgattcatcagctatcggtatataaaccgaaagacattgtcgatccggcaaccccttatccgggtgataaggtgattattaccgaaggcgcgttcgaaggctttcaggccattttcaccgaacccgatggtgaggctcgctccatgctattgcttaatcttattaataaagagattaagcacagtgtgaagaacaccgagttccgcaaactctaa

SEQ ID NO: 459134 - DNA, 1494 bp, Shigella boydii
atggacgccatgaaatataacgatttacgcgacttcttgacgctgcttgaacagcagggtgagctaaaacgtatcacgctcccggtggatccgcatctggaaatcactgaaattgctgaccgcactttgcgtgccggtgggcctgcgctgttgttcgaaaaccctaaaggctactcaatgccggtgctgtgcaacctgttcggtacgccaaagcgcgtggcgatgggcatgggacaggaagatgtttcggcgctgcgtgaagttggtaaattattggcgtttctgaaagagccggagccgccaaaaggtttccgcgacctgtttgataaactgccgcagtttaagcaagtattgaacatgccgacaaagcggctgcgtggtgtgccctgccaacaaaaaatcgtctctggcgatgacgtcgatctcaatcgcattcccattatgacctgctggccggaagatgccgcaccgctgattacctgggggctgacagtgacgcgcggcccgcataaagagcggcagaatctgggcatttatcgccagcagctgattggtaaaaacaaactgattatgcgctggctgtcgcatcgcggcggcgcgctggattatcaggagtggtgtgcggcgcatccgggcgaacgtttcccggtttctgtggcgctgggtgccgatcccgccacgattctcggtgcagtcacccccgttccggatacactttcagagtatgcgtttgccggattgctgcgcggtaccaagaccgaagtggtgaagtgtatctccaatgaccttgaagtgcccgccagtgcggagattgtgctggaagggtatatcgaacaaggcgaaactgcgccggaagggccgtatggcgaccacaccggttactataacgaagtcgatagtttcccggtatttaccgtgacgcatattacccagcgtgaagatgcgatttaccattccacctataccgggcgtccgccagatgagcccgcggtactgggcgtggcgttgaacgaagtgtttgtaccgattctgcaaaaacagttcccggaaattgtcgatttttacctgccgccggaaggctgttcttatcgtctggcggtagtgacgatcaaaaaacagtacgccggacacgcgaagcgcgtcatgatgggcgtctggtcgttcttacgccagtttatgtacactaaatttgtgatcgtttgcgatgatgacgtcaacgcacgcgactggaacgatgtgatttgggcgattaccacccgtatggacccggcgcgggatactgttctggtagaaaatacgcctattgattatctggattttgcctcgcctgtctccgggctgggttcaaaaatggggctggatgccacgaataaatggccgggggaaacccagcgtgaatggggacgtcccatcaaaaaagatccagatgttgtcgcgcatattgacgccatctgggatgaactggctatttttaacaacggtaaaagcgcctga

SEQ ID NO: 459135 - DNA, 702 bp, Shigella boydii
atgacaaccttaagctgtaaagtgacctcggtagaagctatcacggataccgtatatcgtgtccgcatcgtgccagacgcggccttttcttttcgtgctggtcagtatttgatggtagtgatggatgagcgcgacaaacgtccgttttcaatggcttcgacgccggatgaaaaagggtttatagagctgcatattggcgcttctgaaatcaacctttacgcgaaagcagtcatggaccgcatcctcaaagattatcaaatcgtggtcgatattccctacggagaagcgtggctgcgcgatgatgaagagcgtccgatgattttgattgcgggcggcaccgggttctcctatgcgcgctcgattttattgacggcgttggcgcgtaatcccaatcgcgatatcaccatttactggggtgggcgtgaggagcaacatctttatgatctctccgagcttgaggcgctttcgctgaagcatcctggcctgcgtgtggtgccggtggttgaacaaccggaagcgggctggcgtgggcgtactggcaccgtgttaacggcggtcttgcaggatcatggtacgctggcagagcatgatatctatattgccggacgttttgagatggcgaaaattgctcgtgacctgttttgcagtgagcgtaatgcgcgggaagatcgtctgtttggcgatgcgtttgcatttatctga

SEQ ID NO: 459136 - DNA, 1164 bp, Shigella boydii
atggaacaggttgtcattgtcgatgcaattcgcaccccgatgggccgttcgaagggcggtgcttttcgtaacgtgcgtgcagaagatctctccgctcatttaatgcgtagcctgctggcgcgtaacccggcgctggaagcggcggccctcgacgatatttactggggttgtgtgcagcagacgctggagcagggttttaatatcgcccgtaacgcggcgctgctggcagaagtgccgcactctgtcccggcggttaccgtcaatcgcttgtgtggttcatccatgcaggcactgcatgacgcagcacgaatgatcatgactggcgatgcgcaggcatgtctggttggcggcgtggagcatatgggccatgtgccaatgagtcacggcgtcgattttcaccccggcctgagccgcaatgtcgccaaagcggcgggcatgatgggcttaacggcagaaatgctggcgcgtatgcacggtatcagccgtgaaatgcaggatgcctttgccgcgcggtcacacgcccgcgcctgggccgccacgcagtcgggcgcatttaaaaatgaaatcatcccgaccggtggtcacgatgccgacggcgtcctgaagcagtttaattacgacgaggtgattcgaccggaaactaccgtggaagccctcgccacgctgcgtccggcgtttgatccagtaaacggtacggtaacggcgggcacatcttctgcactttccgatggcgcagctgccatgctggtgatgagtgaaagccgcgcccatgaattaggtcttaagccgcgcgctcgtgtgcgttcgatggcggtcgttggttgtgacccatcgattatgggttacggcccggttccggcctcgaagctggcgctgaaaaaagcggggctttctgccagcgatatcggcgtgtttgagatgaacgaagcctttgccgcgcagatcctgccgtgcattaaagatctcgggctaatggagcagattgacgagaagatcaacctcaatggtggtgcgatcgcgctgggtcatccgctgggctgttccggtgcgcgtatcagcaccacgctgctgaatctgatggaacgcaaagacgttcagtttggtctggcgacgatgtgtatcggtctgggtcagggtattgcgacggtgtttgagcgggtttaa

SEQ ID NO: 459137 - DNA, 2190 bp, Shigella boydii
atgctttacaaaggcgacaccctgtaccttgactggctggaagatggcattgccgaactggtatttgatgccccaggttcagttaataaactcgacactgcgaccgtcgccagcctcggcgaggccatcggcgtgctggaacagcaatcagatctaaaagggctgctgctgcgttcgaacaaagcagcctttatcgtcggtgctgatatcaccgaatttttgtccctgttcctcgttcctgaagaacagttaagtcagtggctgcactttgccaatagcgtgtttaatcgcctggaagatctgccggtgccgaccattgctgccgtcaacggctatgcgctgggtggtggctgcgaatgcgtgctggcgaccgattatcgtctggcgacgccggatctgcgcatcggtctgccggaaaccaaactgggcatcatgccgggctttggcggttctgtacgtatgccacgtatgctgggcgctgacagtgcgctggaaatcattgccgccggtaaagatgtcggcgcggatcaggcgctgaaaatcggtctggtggatggcgtagtcaaagcagaaaaactggttgaaggcgcaaaggcggttttacgccaggccattaacggcgacctcgactggaaagcaaaacgtcagccgaagctggaaccactaaaactgagcaagattgaagccaccatgagcttcaccatcgctaaagggatggtcgcacaaacggcggggaaacattatccggcgcccatcaccgcagtaaaaaccattgaagctgcggcccgttttggtcgtgaagaagcattaaatctggaaaacaaaagctttgtcccgctggcgcacaccaacgaagcccgcgcactggtcggcattttccttaacgatcaatatgtaaaaggcaaagcgaagaaactcaccaaagacgttgaaacaccgaaacaggccgctgtactgggcgcaggcatcatgggtggcggcattgcttaccagtctgcgtggaaaggcgtaccggttgtcatgaaagatatcaacgacaagtcgttaaccctcggcatgaccgaagccgcgaaactgctgaacaagcagcttgaacgcggcaagatcgatggtctgaaactggctggcgtgatctccacgatccacccaacgctcgactacgccgggtttgaccgcgtggatgttgtggtagaagcggttgtcgaaaacccgaaagtgaaaaaagccgtactggcagaaaccgaacaaaaagtacgcccggataccgtgctggcgtctaacacttcaaccattcctatcagcgaactggccaacgcgctggaacgcccggaaaacttctgcggaatgcacttttttaacccggtacaccggatgccgttggtagaaattattcgcggcgagaaaagctccgacgaaaccatcgcgaaagttgtcgcctgggcgagcaagatgggcaagacgccgattgtggttaacgactgccccggcttctttgttaaccgcgtgctgttcccgtatttcgccggtttcagccagctgctgcgcgacggcgcagatttccgcaagatcgacaaagtgatggaaaaacagtttggctggcctatgggtccggcatatctgctggatgtcgtgggcattgataccgcgcatcacgctcaggctgtcatggcagcaggcttcccgcagcggatgcagaaagattaccgcgatgccatcgacgcgctgtttgatgccaaccgctttggtcagaagaacggcctcggtttctggcgttataaagaagacagcaaaggtaagccgaagaaagaagaagacgccgccgttgaagacctgctggcagaagtgagccagccgaagcgcgatttcagcgaagaagagattatcgcccgcatgatgatcccgatggtcaacgaagtggtccgctgtctggaagagggcattatcgccactccggcggaagcggatatggcgctggtctacggcctgggcttccctccgttccacggcggcgcgttccgctggctggacaccctcggtagcgcaaaatacctcgatatggcacagcaatatcagcacctcggcccgctgtatgaagtgccggaaggtctgcgtaataaagcgcgtcataacgaaccgtactatcctccggttgagccagcccgtccggttggcgacctgaaaacggcttaa

SEQ ID NO: 459138 - DNA, 1332 bp, Shigella boydii
atggaatcactggcctcgctctataaaaatcatatagctaccttacaagaacggactcgcgatgcgctggcgcgcttcaagctggatgcattacttattcactccggcgagctgttcaacgtttttctcgacgatcatccctatccgtttaaagtgaacccgcaattcaaagcgtgggtgccggtaactcaggtgccaaactgctggttgctggtggatggcgtgaacaagccgaaactgtggttctatctgccggttgattactggcacaacgtcgaaccgctgccgacctccttctggactgaagatgtggaagtgatcgcactgccgaaagccgatggcattggtagcctgctgcccgctgcacgcggcaatatcggttatatcggtccggtgccggaacgtgcgctgcaactgggtattgaggccagcaacatcaacccgaaaggggtgatcgactacctgcattactaccgctccttcaaaaccgagtacgaactggcctgtatgcgtgaagcgcagaaaatggcggtcaacggtcatcgtgcggcagaagaagcgttccgttctggcatgagcgagttcgatatcaacatcgcctatctgaccgcgaccggtcatcgtgataccgacgtaccttacagcaacattgtggcgcttaacgaacacgcttcggtgctgcattacaccaaactggatcatcaggcaccggaagagatgcgcagcttcctgctggatgccggggccgaatataacggctatgcggctgacctgactcgtacctggtcggcaaaaagcgacaacgactacgcacagctggtgaaagacgtaaatgatgaacaacttgcgctgatcgccaccatgaaagctggcgtcagctatgtggattaccacctccagttccatcagcgcattgccaaattgctgcgtaaacatcaaatcatcaccgatatgagtgaagaagcgatggtcgaaaacgatctcaccggaccgtttatgccgcacggtatcggccatccgctgggcctgcaggtgcatgacgtagccggttttatgcaggatgatagcggtacacacctcgcggcaccggcaaaatatccgtacctgcgctgcacccgtattctccagccgggcatggtgttaaccatcgaaccgggtatctacttcatcgaatcgctactggcaccgtggcgtgaagggcagttcagcaagcacttcaactggcagaaaattgaagcactgaaaccgttcagcggcattcgtatcgaagacaacgtggtgatccacgaaaataacgtggaaaacatgacccgggatctgaaactggcgtga

SEQ ID NO: 459139 - DNA, 615 bp, Shigella boydii
atggaaagctggttaattcctgcggcaccggtcacggtcgttgaagagatcaaaaagagccgcttcataacgatgttggcgcataccgatggcgttgaggcggcgaaagcgtttgttgaatcggtgcgggcagaacaccccgatgcccgccaccattgcgtggcgtgggtggcgggtgcgccggatgattctcaacagctgggtttctctgacgacggggagccggcgggaacggcaggtaaaccgatgctcgcccagctaatgggcagcggcgtcggggaaattaccgctgtggtagtgcgctactacggcggcatattgcttggcaccggtgggttagtgaaagcgtatggcggcggcgtgaatcaggcgctgcgccagctaacgacccaacgcaagacgccattaaccgaatatactttgcaatgtgaatatagtcagttaaccggcattgaagcgttgctggggcagtgtgacggcaaaattatcaacagtgattatcaggcattcgttctgctgcgggtggcgcttccggcggcgaaagtggctgaattttccgcaaagctggcggattttagccgtggttcattgcaattgttagcgattgaagaataa

SEQ ID NO: 459140 - DNA, 1452 bp, Shigella boydii
atgcattttcgcgccattacccgaatcgttggactactggtcatcttattttcagggaccatgattatccctgggctggtagcactcatctaccgggatggagcgggccgcgcttttacccagaccttttttgtcgccctcgccattggctctatgctgtggtggccgaaccgcaaagagaagggcgaactgaaatcccgtgaggggtttctgatagtggtgctgttttggaccgtgctgggtagtgtcggtgcgctcccttttatcttctcggaaagcccgaacctcacgattaccgatgcgttttttgaatctttctctggcctgaccaccaccggggccactacgctggtggggctggattcgctccctcatgccatcctcttttatcgccagatgctgcaatggtttggcgggatggggatcatcgtgttagcggttgcgatactgcctatcctcggcgtgggtgggatgcagctctatcgcgcagaaatgcccggcccgctgaaagataacaaaatgcgcccgcgaattgcggaaacggcgaaaaccctgtggttgatttatgtcttgctgaccgtcgcctgtgcgctggcgttgtggtttgccggaatggatgcctttgatgccatcggccatagctttgcgactatcgctattggcggcttctcgacacatgatgccagtatcggttatttcgacagtccgactattaacactatcattgctatcttcctgctgatctccggttgtaactacggtctgcacttttcactgttaagtgggcgtagtctgaaggtttattggcgcgatccggaatttcgcatgtttatcggcgtacagtttacgctggtggttatttgtacactcgtactgtggtttcataatgtctacagttcggcgctgatgacaattaaccaggcgtttttccaggtggtatcgatggcgacaaccgccgggtttacgactgacagcattgcccgctggccgctctttttgccggtactgcttttatgttcagcttttatcggcggttgcgccgggtcaacgggcggtggcctgaaagtgatccgcatcctgctgctgtttaagcaggggaaccgtgagctgaaacgactggtgcatccgaacgccgtctatagcattaagctggggaatcgcgcactgccggaacgtatcctcgaagccgtttggggatttttctccgcctatgcattggtgtttattgtcagtatgctggcgattatcgccacgggcgtggatgatttttctgcctttgcctcagttgttgcgacattgaataacctggggccagggcttggcgtggttgctgataactttaccagtatgaacccggtggctaaatggatcctgattgccaacatgctgtttggtcgtctcgaggtctttacattgctggtgctctttaccccgactttctggcgtgaatga

SEQ ID NO: 459141 - DNA, 546 bp, Shigella boydii
gtgaaaacattaattcttttctcaacaagggacggacaaacgcgcgagattgcctcctacctggcttcggaactgaaagaactggggatccagacggatgtcgccaatgtgcaccgcattgaagaaccacaatggaaaaactatgaccgtgtggtcattggtgcttctattcgctatggtcactaccactctgcgttccaggaatttgtcaaaaaacatgcgacgcgactgaattcgatgccgagcgccttttattccgtaaacctggtggcgcgcaaaccggagaagcgtactccacagaccaacagctacgcgcgcaagtttctgatgagttcacaatggcgtcccgatcgctgcgcggtcattgccggggcgctgcgttacccacgttatcgctggtacgaccgttttatgattaagctgattatgaagatgtcaggcggtgaaacggatacgcgcaaagaagttgtctataccgattgggagcaggtggcgaatttcgcccgagaaatcgcccagttaaccaacaaaccgacgctgaaataa

SEQ ID NO: 459142 - DNA, 654 bp, Shigella boydii
atgaatcagacgctactttcctcttttggtacgcctttcgaacgtgttgaaaatgcactggctgcgctgcgtgaaggacgcggtgtaatggtgcttgatgatgaagaccgtgaaaacgaaggcgatatgatcttcccggcagaaaccatgaccgttgagcagatggcgctgaccattcgccacggtagcggtattgtttgcctgtgcatcactgaagatcgccgtaaacaacttgatctgccaatgatggtagaaaataacaccagcgcctatggcaccggttttaccgtgaccattgaagcggctgaaggtgtgactaccggtgtttctgccgctgatcgtattacgaccgttcgcgcagcgattgccgatggcgcaaaaccttctgatctgaatcgcccgggccacgttttcccacttcgcgcgcaggcaggtggtgtactgacgcgtggcggtcatactgaagcgactattgatttgatgacgctggcaggctttaaaccggctggtgtgctgtgtgagctgactaatgacgatggcacgatggcgcgtgcaccagagtgcattgagtttgccaataaacacaatatggcgctcgtgactattgaagacctggtggcataccgtcaggcacatgagcgtaaagccagctga

SEQ ID NO: 459143 - DNA, 171 bp, Shigella boydii; identical to SEQ ID NO: 261292

SEQ ID NO: 459144 - DNA, 762 bp, Shigella boydii
atgtcagtacctctcattctgaccatactggcgggggcagccacgtttattggcgcgtttctcggcgttctcggacaaaaaccctcgaaccgcttactggcgttttcgctaggttttgcggcggggatcatgttgctcatctcattaatggaaatgcttcctgccgcactagcagctgaaggaatgtcgcctgtgttgggttatggaatgtttatcttcggtctgcttggctactttggcctggaccgcatgttgccgcatgcgcatccgcaggatttaatgcaaaaatcggtgcagccgttgccaaaatcgatcaagcgcacagccattctgctcactctcggcatcagtctgcataacttcccggaagggattgccacctttgtcacggcgagcagcaacctggagctgggatttggcatcgcactggccgtcgcgttgcacaatatccctgaaggtctggcagtggcaggcccggtttatgcggcaacggggtctaaacgcaccgcgattctgtgggcggggatttctggactagcagaaattcttggtggtgtgctggcgtggttaatcctcggtagcatgatttccccggtggtcatggcggcggttgcaggaattatggtggcgctctcggttgatgaattaatgccgctcgccaaagagattgaccctaataataaccccagctatggcgtactatgtggaatgtcagtgatgggattcagtttagtgctgctacaaacggcgggaattggttaa

SEQ ID NO: 459145 - DNA, 816 bp, Shigella boydii
atgacacccttagttaaggatatcatcatgtcttcaacacgtatgccagcattgtttttaggtcacggtagtccgatgaacgtgctggaagataatttgtatacccgcagctggcagaagttggggatgacattgccacgcccgcaagcgattgtggtggtttcggctcactggtttacccgtggaacaggagtgaccgcgatggagacgccgcccacgattcatgactttggtggcttcccgcaggcgctgtacgatacgcattatcctgctccgggttcgcctgtgctggcacagcatctggttgagctgttagcgccggtcccggtgacgctggataaagaagcctggggctttgaccacggttcctggggcgtgctgattaagatgtatcctgacgccgatatcccgatggtgcagttgagtatcgacagtagcaaacctgccgcctggcatttcgaaatggggcgcaaactggcagcgctgcgagatgaaggaataatgttggtcgccagtggcaacgtggtgcataacctgcgtacagtgaagtggcacggtgatagttcatcatatccttgggcgatgtcgtttaatgagtatgtgaaagcgaatctgacgtggcaaggggcggtagagcagcatcctctggtgaattacctcgaccatgaaggtggcgcgttatcgaacccaacgccggagcactatctgccgttgttgtatgtcttaggtgcgtgggatgggcaggagccaattaccattccggtcgatggtatagaaatgggcagcctgagtatgctgtcggtgcagataggttaa

SEQ ID NO: 459146 - DNA, 1161 bp, Shigella boydii
atggaaagagtcagtattaccgagcgcccggactggcgtgaaaaagcccacgaatacggtttcaattttcacaccatgtacggcgagccgtactggtgtgaagatgcttactacaagttgaccctcgcccaggttgaaaagctggaagaagtcaccgccgaactgcaccagatgtgcctgaaagtggtggaaaaagtgatcgccagcgatgagctgatgaccaaattccgcattccaaaacacacctggagttttgtgcgtcagtcatggctgactcaccagccatcgctttattcgcgtcttgatctggcatgggatggcactggcgaacctaaactgctggaaaataacgccgatacaccaacgtcactatacgaggcggcgttctttcagtggatctggctggaagatcagcttaacgccggtaacttgccggagggcagcgaccagtttaacagtctgcaagaaaagctaatcgatcgctttgtcgagttgcgtgaacagtatggcttccagttgctgcatctcacctgctgtcgcgacacggtggaagatcgcggaaccattcagtatttgcaggactgcgcgacggaagctgaaatcgctaccgagttcctctacattgacgatatcgggttaggtgaaaaaggtcagttcacggatttacaggatcaggtaatttccaacctgttcaagctgtatccatgggaatttatgttgcgtgagatgttctccaccaagctggaggatgcaggcgtacgctggctggaaccggcgtggaagagcattatctccaacaaagcgcttctaccgctactgtgggagatgttcccgaatcacccgaacctgctgcccgcttattttgcggaagatgatcatccgcaaatggaaaaatatgtggttaaaccgatcttctcccgtgaaggcgcaaacgtgtcgatcattgagaacggcaaaaccattgaagcagcggaaggtccgtatggcgaagaagggatgattgttcagcaattccatccgttaccgaaattcggcgacagctatatgctgattggtagctggctggtgaacgatcaacccgccggaattggcattcgtgaagaccgtgcattgatcacccaggatatgtctcggttttatccacatatttttgttgagtaa

SEQ ID NO: 459147 - DNA, 672 bp, Shigella boydii
atgaaacggacaaaatccatacgccacgcatcgttccgcaaaaactggagcgcacgccatctgacaccagtcgctctcgcggttgccactgtttttatgctggctagctgtgaaaagagtgatgaaacagtgtctctctatcaaaatgctgacgactgttcagctgcaaacccaggcaaaagcgccgaatgtaccaccgcgtacaacaatgcgctgaaagaagccgaacgtactgcgccgaaatacgccacccgtgaagactgtgttgctgaatttggtgaaggtcagtgccagcaggcaccagcccaggctggcatggcaccagaaaaccaggcgcaggcccagcaatccagcgggagtttctggatgccgctgatggccggttacatgatggggcgtctgatgggcggcggcgcgggatttgcacagcagccgctgttctcctcgaaaaacccagccagcccggcttacggtaaatataccgacgcgacgggtaaaaactatggcgcagcccagccaggccgcaccatgaccgtaccgaagacagccatggcaccaaaaccggcgaccactactaccgttacccgtggcggttttggtgaatctgttgccaaacaaagcactatgcagcgtagcgcaaccggcacctcttctcgttcaatgggtggctga

SEQ ID NO: 459148 - DNA, 1482 bp, Shigella boydii
atgaagaaattgctccccattcttatcggcctgagcctttctgggttcagttcgttgagccaggccgagaacctgatgcaagtttatcagcaagcacgccttagtaacccggaattgcgtaagtctgccgccgatcgtgatgctgcctttgaaaaaattaatgaagcgcgcagtccattactgccacagctaggtttaggtgcagattacacctatagcaacggctaccgcgacgcgaacggcatcaactcgaacgcgaccagtgcgtccctgcagttagctcaatccatttttgatatgtcgaaatggcgtgcgttaacgctgcaggaaaaagcagcagggattcaggacgtcacatatcagaccgatcagcaaaccttgatcctcaacaccgcgaccgcttatttcaacgtgttgaatgctattgacgttctttcctatacacaggcacaaaaagaagcgatctaccgtcaattagatcaaaccacccaacgttttaacgtgggcctggtagcgatcaccgacgtgcagaacgcccgcgcgcagtacgataccgtgctggcgaacgaagtgaccgcacgtaataaccttgataacgcggtagagcagctgcgccagatcaccggtaactactatccggaactggcggcgctgaatgtcgaaaactttaaaaccgacaaaccacagccggttaacgcgctgctgaaagaagccgaaaaacgcaacctgtcgctgttacaggcacgcttgagccaggacctggcgcgcgagcaaattcgccaggcgcaggatggtcacttaccgacgctggatttaacggcttctaccgggatttctgacacctcttatagcggttcgaaaactcgtggtgccgctggtacccagtatgacgacagcaatatgggccagaacaaagtgggcctgagcttctcgctgccgatttatcagggcggaatggttaactcgcaggtgaaacaggcccagtacaactttgttggtgccagcgagcaactggaaagcgcgcatcgtagcatcgtgcaaaccgtacgttcctccttcaacaacattaatgcatctatcagtagcattaacgcctacaaacaagccgtagtttccgctcaaagctcattagacgcgatggaagcgggctactcggtcggtacgcgtaccattgttgatgtgttggatgcaaccaccacgctgtacaacgctaagcaagagctggcaaatgcgcgttataactacctgattaatcagctgaatattaagtcagccctgggtacgttgaacgagcaggatctgctggcactgaacaatgcgctgagcaaaccggtttccactaatccggaaaacgttgccccgcaaacgccggaacagaatgctattgctgatggttatgcgcctgatagcccggcacccgtcgttcagcaaacatccgcacgcactaccaccagtaacggtcataaccctttccgtaactga

SEQ ID NO: 459149 - DNA, 630 bp, Shigella boydii
atgcttaagccagacaacctgcccgttacatttggcaaaaacgatgtagaaattattgcacgagaaacactttatcgcggctttttttcattagatctttatagatttcgtcatcgtctattcaacgggcaaatgagtcatgaggtgcggcgggaaatttttgagcgcggtcacgccgcagtcttgctaccctttgacccagtgcgtgatgaagttgtgctgattgagcagattcgaattgccgcgtacgacactagcgaaaccccctggctactggagatggttgccgggatgattgaagagggtgaaagtgtggaagatgttgcccgtcgcgaagcgattgaagaggcggggctgatagtcaaacggaccaaaccggtgttaagtttcctggcaagcccggggggcaccagtgagcgttcgtcaattatggtgggcgaagtggacgccacgaccgcaagcggtattcatggtctggctgatgaaaacgaagatattcgcgttcatgtggtaagccgggaacaggcataccagtgggtagaagaggggaaaatcgacaacgcagcgtcgctcatcgctttgcaatggctgcagctgcaccatcaagcgttaaaaaatgagtgggcataa

SEQ ID NO: 459150 - DNA, 423 bp, Shigella boydii
atgaagcgttacacacctgactttcctgaaatgatgcgcctgtgcgagatgaacttttcacaattgcgccgtttgttaccgcgcaatgacgcacccggcgaaactgtaagctatcaggtggcaaacgcacaatatcggctgacgattgtggaatcgacccgatacactaccctggtgacaatagaacagactgcgcccgcgatcagttactggagccttccgtcaatgacggtgcgtctgtatcatgacgcgatggtggctgaagtgtgttcaagccagcagatttttcgcttcaaagcgcggtatgattatcctaataaaaagttgcatcaacgcgacgaaaagcatcaaattaaccagtttttagcggactggttgcgatactgtttagcacatggagcgatggcgattccggtttactag

SEQ ID NO: 459151 - DNA, 828 bp, Shigella boydii
ttggaaagcctgttaacccttcctctggctggtgaggccagagtcaggattttacaaattaccgatactcacctgtttgcacaaaagcacgaagccctgttaggggtaaacacctgggaaagctaccaggcggtgctggaggcgattcgtccacatcagcacgaattcgacctgattgtcgcgacaggtgatttagcgcaggatcaatcctctgcggcctatcagcatttcgctgaaggcatcgcaagttttcgtgcgccctgcgtctggctgccgggcaaccacgatttccagcccgcgatgtacagcgcgttacaggatgcgggtatctccccggcgaagcgcgtgtttattggtgagcaatggcaaatcctgttgctggatagccaggtgtttggcgtgccgcacggtgagctgagcgagtttcagcttgagtggctggaacgtaaactggccgatgcgccagaacgccatacgttgctgctgctgcatcatcatccgctacctgcgggttgtagttggctcgatcaacacagtctgcgtaacgcgggcgaactggataccgtgctggcgaagtttccgcacgtcaaatacttgctgtgcggtcatattcatcaggagctggatctcgactggaacggtcgccgcctgctggcaacgccgtcgacctgtgtgcagtttaagccgcactgttccaactttacgctggataccatcgcgcccggctggcgtactctcgagttacatgctgatggcacgctgaccaccgaggtgcatcgcctggcggacacacgtttccaacctgataccgcttcagaaggctactga

SEQ ID NO: 459152 - DNA, 582 bp, Shigella boydii
atgtctacgcttctttatttacacggtttcaacagctcgccgcgctctgcaaaagcgagcttgttaaaaaactggctggcggaacatcaccctgacgttgagatgatcattccgcagttgccgccgtatccttccgacgcggcagagctgctggaatccattgtcctggaacatggcggcgattcgctgggtattgtcggttcgtcactggggggatattacgccacctggttgtcacaatgttttatgctgcccgcagtggtggtaaacccggcggtgcgcccgtttgaactgctgacggactatctcggtcagaacgagaacccctacaccgggcagcaatatgtgctagagtcacgccatatttacgatcttaaagtcatgcagattgactcgctggaagcgccggatttgatctggctgctgcaacagacgggagatgaagtgctggattaccgccaggcggtggcgtactacgctttctgccgccagactgtcatagaaggcggcaaccacgcattcacgggcttcgaagattatttcaacccgatcgtcgattttcttggtctgcaccatctctga

SEQ ID NO: 459153 - DNA, 1893 bp, Shigella boydii
atgacgcaaacttataacgctgatgccattgaggtactcaccggacttgagccggttcgccgccgtccggggatgtataccgataccactcgccctaaccatttggggcaagaagtcattgataacagtgtggatgaagcactggcgggtcacgcaaaacgcgtggacgttattttacatgctgaccagtcgttagaagttattgacgatgggcgcgggatgccggtggatattcacccggaagagggtgtaccggcggttgaactgattctttgccgtctgcatgcaggcggtaaattctctaacaaaaattaccagttctctggcggcctgcatggcgtggggatttcggtggttaacgccctgtcgaagcgcgtagaagttaacgtgcgccgcgatggtcagatttataacatcgcctttgaaaatggcgaaaaggtgcaggatttacaggttgtcggcacttgcggtaaacgcaataccggcaccagcgtccatttctggccggatgaaaccttcttcgatagcccgcgtttttctgtttcacgcctgacgcatgtgctgaaagccaaagcagtactgtgccccggcgttgagattacctttaaagatgagatcaacaacaccgaacagcgctggtgctatcaggacggtctgaatgattacctggcggaagcggtaaacggtttaccgacgctgccagaaaaaccgtttatcggtaatttcgctggcgatactgaagcggtggactgggcgctactgtggctgccggaaggcggtgaattgctgaccgaaagctacgtcaacctgatcccaacgatgcagggcggtacccatgttaatggtctgcgtcagggcctgctggacgcgatgcgtgagttctgtgaataccgcaacattctgccgcgcggtgtaaagctgtcggcggaagatatctgggatcgctgcgcctatgtgctgtcagtaaaaatgcaggatccgcagtttgccgggcagaccaaagagcgtctctcttcgcgtcagtgcgcggcattcgtttctggcgtggtgaaagatgcctttatcctgtggctgaaccagaacgttcaggcggcggagttgctggcagagatggcgatttccagcgcccagcgtcgtatgcgtgcggctaaaaaagtggtgcgtaaaaagctgaccagcggtccggcgctgcctggcaaactggctgactgtaccgcgcaggaccttaaccgcaccgaactgtttcttgtggaaggtgactccgcaggcggatctgccaagcaggcgcgcgatcgcgaatatcaggcgatcatgccactgaaaggtaagatccttaacacctgggaagtctcttccgacgaagtgctggcttcgcaggaagtgcacgatatttcggtagcgatcggtatcgatcctgacagcgacgatttgagccagcttcgttacggcaagatctgtatcctggcggatgctgactccgatggtctgcacattgccacgctgctctgcgctttgtttgtaaaacacttccgcgcgttggtgaaacacggtcacgtttacgtcgcactgccaccgctctaccgtattgatctcgggaaagaggtttattacgcgctgacggaagaagagaaagagggcgtacttgagcaattaaaacgcaagaaaggcaagccgaacgtccagcgttttaaaggtctgggggaaatgaacccgatgcaattgcgcgaaaccacgcttgatccgaacactcgccgtctggtgcagttgactatcgatgatgaagacgatcagcgtactgacgcgatgatggacatgctactggcgaagaaacgctcggaagatcgccgcaactggttgcaagagaaaggcgacatggcggagattgaggtttaa

SEQ ID NO: 459154 - DNA, 315 bp, Shigella boydii
atgcttaccgtaatcgcagaaatccgtactcgtcctggtcaacatcaccgtcaggcggtattggatcagtttgctaaaatcgttccaaccgtactgaaagaagaaggttgccacggctatgcgccaatggtggattgcgctgctggcgtgagtttccagtctatggcaccggattctatcgtgatgattgagcagtgggaaagcatcgcgcaccttgaagcgcatctgcaaaccccgcacatgaaggcgtacagcgaagccgtaaaaggtgacgtgctggagatgaatattcgtattctgcagccagggatttaa

SEQ ID NO: 459155 - DNA, 582 bp, Shigella boydii
atgagcaacattctgattatcaacggcgcgaaaaaattcgcccactccaatggtcaactgaatgacaccctgaccgaagtcgcggatggcacactgcgcgacctcgggcatgatgttcgcatcgttcgcgccgacagcgactacgatgtcaaagcggaagtacaaaactttctctgggctgatgtggtgatctggcagatgccaggctggtggatgggcgcgccgtggacagtgaaaaaatacattgatgatgtattcaccgaaggtcacgggacgctgtatgccagcgatggccgtacccgcaaagatccgtcaaaaaaatacggttccggcggcctggtacagggcaaaaaatatatgctttctctgacctggaacgcaccaatggaagccttcaccgaaaaagatcaattcttccacggcgttggcgtcgacggtgtgtatctgccgttccataaagcaaaccaattccttggcatggaaccgctgccgacatttatcgctaatgacgtgataaaaatgcctgatgttccccgctatactgaagaatatcgcaagcatcttgtggaaatttttggttaa

SEQ ID NO: 459156 - DNA, 1350 bp, Shigella boydii
atgaaatttacccaacgtcttagtctgcgcgtcaggctgacgctaatctttttaattctggcctcggtgacctggctgctttccagctttgtcgcctggaaacaaacaacggataacgtcgatgaattgttcgacacccaactgatgctgtttgccaagcggttaagtacgctcgatctcaacgaaatcaacgcggcggatcgcatggcacagacgccaaataaattaaaacacggtcatgttgatgacgatgcgctgacctttgccatctttacccacgacggcagaatggtccttaatgatggcgataacggagaagatattccctatagctatcaacgggaaggttttgctgacgggcaactggtcggtgaagacgatccttggcgttttgtctggatgacctcacctgatggaaaatatcgcatcgttgttggccaggaatgggaataccgtgaagacatggcgctggcgattgttgccgggcaattgatcccgtggctggtcgcactgccgattatgttaatcatcatgatggtactactgggtcgtgaactcgcgccgctgaacaaactggcgctggcactacgtatgcgtgaccctgactcggaaaaaccactaaacgcgactggcgtacccagcgaagtgcgaccactggttgagtcgctaaatcaactgttcgcccgcacacatgcgatgatggttcgagaacgacgctttacctccgatgcagctcacgaactacgtagcccgttaacagcgctgaaagtgcaaaccgaagttgcgcagctctctgacgatgatccgcaggcgcggaaaaaagcactgctccaattacattccgggatcgatcgcgctactcgtctggttgatcaactgctcacgctatcgcggctggactcactggataaccttcaggacgtcgcggagatcccgcttgaagatctcctgcaatcgtcggtgatggatatttaccacacggcgcagcaggcgaaaattgacgtgcgactgacactcaatgtccagggcatcaaacgcaccggacaaccgctattgctaagtttgttggtgcgaaatttgctggataacgccgtgcgttacagtccacagggcagcgtggtggacgtcacgctgaatgccgataatttcatcgtgagggataacggccccggtgtgacaccagaggcactggcgcgaattggcgaacgcttctatcgcccccccggacaaaccgctaccggcagtggacttgggctatcgattgtccagcgaatcgccaagctgcatggcatgaatgttgagtttgggaatgcggaacaaggtggatttgaggcgaaagtaagctggtaa

SEQ ID NO: 459157 - DNA, 660 bp, Shigella boydii
atgcgaattttactgatagaagatgacatgctgattggcgacggcatcaaaactggccttagtaaaatgggttttagtgtcgactggtttacacaaggtcgtcagggaaaagaggcgctttatagcgcaccttatgatgcggtgatcctggatttaaccttaccaggcatggatggtcgcgatattttgcgtgaatggcgagagaaaggtcagcgtgagccggtactgatcctgaccgcgcgtgatgcgttagcggaacgtgtagaagggctgcgtcagggagctgacgattatctgtgtaaaccttttgcgttgatagaagtcgccgccaggctggaggctctgatgcgccgaaccaacggccaggccagcaacgagctgcgccacggtaacgtcatgctcgaccccggcaaacgtatcgccacgctggctggcgaacccttaacactgaaaccaaaagaatttgccctgctggaattactgatgcgtaacgctggtcgggtactaccgcgcaaactgattgaagagaaactgtatacctgggacgaagaggtcaccagtaatgccgttgaagtgcatgtgcatcatctgcgacgcaaactcggtagtgattttattcgtaccgtgcatggtattggctacacattaggtgagaaatga

SEQ ID NO: 459158 - DNA, 393 bp, Shigella boydii
atgaaaaaattcgcagcagtaatcgcagtaatggccctgtgcagtgcaccggtgatggcagcagagcagggcggtttttctggcccatcggcaacgcaaagtcaggccggaggattccaggggccgaacggcagcgtaacgactgtagaaagcgcaaaatccctgcgtgacgacacctgggtaaccctgcgcggcaatatcgttgaacgcatctctgacgatctctacgtgtttaaagatgccagcggtactatcaatgttgatatcgaccacaaacgctggaacggtgtgacggtgacgccgaaagatacggttgagattcagggggaagtcgataaagactggaattctgttgaaattgacgtcaaacagatccgcaaagtaaatccgtaa

SEQ ID NO: 459159 - DNA, 483 bp, Shigella boydii
atgacaaacctgacactggatgtaaacattatcgatttcccatcaatccctgtggcgatgttgccgcaccgctgtagccctgagttgctcaactacagtgtggcgaaatttatcatgtggcgtaaagagacggggctttctcctgttaaccaaagccagacttttggcgtcgcctgggacgaccctgccaccaccgcaccgaaagcgtttcgctttgatatctgcggcagcgttagcgaaccgattcccgataatcgttatggtgtgagcaatggtgaacttaccggtggacgttatgccgtggcccgccacgttggcgagctggacgatatttcacacacggtatggggcatcattcgccactggctgcctgcaagcggagagaaaatgcgtaaagcaccgattctgtttcactacaccaatcttgccgaaggtatgacagaacagcgactggaaacggatgtttatgtgccgttagcgtga

SEQ ID NO: 459160 - DNA, 2259 bp, Shigella boydii
atgagcgatatggcagagcgccttgcgctacatgaatttacggaaaacgcctacttaaactactccatgtacgtgatcatggaccgtgcgttgccgtttattggcgatggtcttaaacctgttcagcgccgcattgtgtatgcgatgtctgaactgggcctgaatgccagcgctaaatttaaaaaatcggcccgtaccgtcggtgacgtactgggtaaataccatccgcacggcgatagcgcctgttatgaagcgatggtcctgatggcgcagccgttctcttaccgttatccgctggttgatggtcaggggaactggggcgcgccggacgatccgaaatcgttcgcggcaatgcgttacaccgaatcccggttgtcgaaatattccgagctgctattgagcgagctggggcaggggacggctgactgggtgccaaacttcgacggcactttgcaggagccgaaaatgctgcctgcccgtctgccaaacattttgcttaacggcaccaccggtattgccgtcggcatggcgaccgatattccaccgcataacctgcgtgaagtagctcaggcggcaatcgcattaatcgaccagccgaaaaccacgctcgatcagctgctggatatcgtgcaggggccggattatccgactgaagcggaaattatcacttcgcgcgccgagatccgtaaaatctacgagaacggacgtggttcagtgcgtatgcgcgcggtgtggaagaaagaagatggcgcggtggttatcagcgcattgccgcatcaggtttcaggtgcgcgcgtactggagcaaattgctgcgcaaatgcgcaacaaaaagctgccgatggttgacgatctgcgcgatgaatctgaccacgagaacccgacccgtctggtgattgtgccgcgttccaaccgcgtggatatggatcaggtgatgaaccacctcttcgctaccaccgatctggaaaagagctatcgcattaacctcaatatgatcggtctggatggtcgtccggcggtgaaaaacctgctggaaatcctctccgaatggctggtgttccgtcgcgataccgtgcgccgccgactgaactatcgtctggagaaagtcctcaagcgcctgcatatcctggaaggtttgctggtggcgtttctcaacatcgacgaagtgattgagatcattcgtaacgaagatgaaccgaaaccggcgctgatgtcgcggtttggccttacggaaacccaggcggaagcgatcctcgaactgaaactgcgtcatcttgccaaactggaagagatgaagattcgcggtgagcagagtgagctggaaaaagagcgcgaccagttgcagggcattttggtttccgagcgtaaaatgaataacctgctgaagaaagaactgcaggcagacgcgcaagcctacggtgacgatcgtcgttcgccgttgcaggaacgcgaagaagcgaaagcgatgagcgagcacgacatgctgccgtctgaacctgtcaccattgtgctgtcgcagatgggctgggtacgcagcgctaaaggccatgatatcgacgcgccgggcctgaattataaagcgggtgatagcttcaaagcggcggtgaaaggtaagagcaaccaaccggtagtgtttgttgattccaccggtcgtagctatgccatcgacccgattacgctgccgtcggcgcgtggtcagggcgaaccactcaccggcaaattaacgttgccgcctggggcgaccgttgaccatatgctgatggaaagcgacgatcagaaactgctgatggcttccgatgcgggttacggtttcgtctgcacctttaacgatctggtggcgcgtaaccgtgcaggtaaggctttgatcaccttaccggaaaatgcccatgttatgccgccggtggtgattgaagatgcttccgatatgctgctggcaatcactcaggcaggccgtatgttgatgttcccggtaagcgatctgccgcagctgtcgaagggcaaaggcaacaagattatcaacattccatcggcagaagccgcgcgtggagaagatggtctggcgcaattgtacattctgccgccgcaaagcacgctgaccattcatgttgggaaacgcaaaattaaactgcgcccggaagagttacagaaagtcactggcgaacgtggacgccgcggtacgttgatgcgcggtttgcagcgtatcgatcgtgttgagatcgactctcctcgccgtgccagcagcggtgatagcgaagagtaa

SEQ ID NO: 459161 - DNA, 738 bp, Shigella boydii
atgctatatatctttcgtcttattattaccgtgatttacagcatcttagtctgtgtattcggctccatttactgccttttcagcccgcgtaacccgaaacatgtggccacctttgggcatatgtttggccgtcttgcgccgctgttcggcctgaaagttgagtgccgcaaacctgcagatgctgaaagctacggcaatgctatctatatcgctaaccaccagaacaactatgacatggtgacagcatcgaacattgtgcaaccgccgacggtgacggtaggtaaaaagagcttgctgtggatccccttcttcgggcaattgtactggttaaccggcaacttattgatcgacagaaacaatcgcactaaagctcacggcaccattgcggaagtcgtgaatcatttcaaaaaacgccgtatttccatctggatgttcccggaaggaacccgcagccgtggtcgcggcctgctaccgttcaagactggagcatttcacgcggcaattgcggcgggcgtcccgattattcccgtgtgcgtctctacaacttcgaataagattaatcttaatcgactgcacaacggtctggtgattgtcgaaatgctgccgccaattgacgtcagtcagtatggcaaagatcaggttcgtgagctggctgcccattgtcgttcgataatggaacaaaaaatcgccgagctcgataaagaagtcgcagaacgcgaagccgccggaaaagtttaa

SEQ ID NO: 459162 - DNA, 1413 bp, Shigella boydii
atgtcactcagtcggcgtcagttcattcaggcatcggggattgcactttgtgccggcgctgttcccctgaaggccagcgcagccgggcaacagcaaccgctacccgttccgccgctacttgaatctcgccgtgggcaaccgctgtttatgactgtacaacgtgcgcactggtcatttacgccagggacacgcgcgtcggtctggggaatcaatggtcgttacctggggccgactatccgcgtctggaagggcgacgatgttaagcttatttacagcaaccgcctgacagaaaatgtctcaatgacggtggccgggctacaggtaccaggcccgctgatgggcggtccggcacggatgatgtcgccaaacgctgactgggcacccgtactgcccattcgccagaacgcagctactctgtggtatcacgccaatactcccaaccgcacggctcagcaggtctataacggccttgccggaatgtggctggtggaagatgaagtcagcaagtcgctgcctatccccaaccattatggtgtggatgattttccggtcattatccaggataaacggctggataactttggtacgccagaatacaacgaaccgggaagcggcggctttgttggtgatacgctgctggttaacggtgtacaaagcccgtacgttgaagtctcgcgtggctgggtgcgcttgcgactgctgaacgcgtcgaactctcgtcgctatcaactacagatgagcgatggtcgcccgttacatgtgatttctggcgatcagggattcctgcctgctcctgtatcggtgaagcaactttcgttggcaccgggcgagcgccgcgagattctggtggatatgagcaacggtgatgaagtgtcgatcacctgtggcgaagcggcgagcattgttgatcgtattcgtggcttctttgagccatccagcattctggtttctaccctggtgctaacgctgcgcccaaccggccttctgccgctggtcacagacagtcttccgatgcgcttgctgccaactgaaatcatggccggttcgccgattcgcagtcgcgatatcagtctgggtgatgacccgggtattaatggacaactgtgggacgtcaaccgtattgatgtcaccgcgcagcaaggaacgtgggaacgctggacggtacgcgcggacgagccgcaagcgttccatattgaaggcgtgatgttccagatccgtaacgtgaatggtgcgatgccgttcccggaagacagaggctggaaagataccgtttgggttgacggacaagtggagctgcttgtttatttcggtcagccttcctgggcgcacttcccgttctacttcaacagtcagacgctggaaatggcggaccgtggctcgattgggcaactgttagtcaatccggtaccgtaa

SEQ ID NO: 459163 - DNA, 129 bp, Shigella boydii
atgcgtaacatcattaaactggcgctggtgggattgcttagcgtctctacgattgcggttgctgcagaatcctcgcctgaagcgttatgtataggctatcagggtgatgctgccaacttactgatttag

SEQ ID NO: 459164 - DNA, 576 bp, Shigella boydii
atgcgtgtcatcaccctggcgggtagtcctcgctttccttctcgctccagctccttgctggaatatgcgcgggaaaaactaaatggactggatgtagaggtttatcactggaatctgcaaaacttcgccccggaagatctgctttatgctcgtttcgatagtccggcactcaagaccttcaccgaacagctgcaacaggctgatggactgatagtcgctacacctgtgtataaagccgcctattccggcgcgctgaaaaccctgctcgacctgctgccagagcgcgctttgcaaggcaaagtggtgctaccgctggcgacgggcggtaccgtggcccatctgctggcggtcgattatgcccttaaaccagttttaagcgcactgaaagctcaggagatcctgcacggcgtgtttgccgatgactcacaagtaattgattaccatcacagaccccagttcacgccaaatctgcaaacccgtcttgataccgcgctagaaactttctggcaggcattgcaccgccgcgatgttcaggttcctgaccttctgtctctgcgaggtaatgcccatgcgtaa

SEQ ID NO: 459165 - DNA, 543 bp, Shigella boydii
atgaaaaaaagtgtattgacggcgtttataactgtggtatgtgcaacgtccagcgttatggcagctgatgataatgctatcacggatggcaaagtaacatttaatggtaaagttattgctccagcttgtaccctggtagctgcgacgaaagattcagtagtcacattgccaaatgtcagcgccaccaagttgcaaactaatggagcagtctctggcgttaaaactgatgtaccaattgccttagaaggctgtgatgttactgtaactaaaaatgcgacgtttacctttagtggtacggctgacggcgtgcaacctacagcatttgccaaccaggctaccaccgatgcagcgacgaatgttgctctacaaatgtatctgccagatggttctacatcggtaactcccggtaccgaaacgtcgaatattcagttagcggattctgctgagcaaacagtgacctttaaagttgattatatcgctacggggaaagcgacttctggtaatgtgaatgcggtaacaaatttccatattaactattattaa

SEQ ID NO: 459166 - DNA, 702 bp, Shigella boydii
atgaaaacttgcataacaaagggaattgtgaccgtaagtttaacggcaatattactcagctgctcatccgcatgggcggcaggtaaaggcgggattggacttgcagcaacacgtcttgtttattcagaaggtgaagagcaaatttcactgggtgtacgtaacaccagtccggatgttccttatcttattcagtcatgggtgatgaccccagataataaaaaatcagcagattttattattacaccaccgctatttgtgctgaatccggctaatgagaatctgttacgcattatgtacattggtgcgccgttggcgaaagacagagaaacccttttcttcactagcgtacgggcagtcccttcaacaacgaagcgggaagagggaaataccctgaagattgccacacaaagcgtcatcaaacttttctggcgaccaaaaggtttagcgtatcccttaggcgaggctccggcgaaactgcgttgcacttcgtcagctgacatggttacggtcagtaacccaacaccttatttcattaccctgacagacctgaaaataggtggaaaagtagttaaaaataaaatgatttccccctttgataaataccaattttctctgccaaagggggccaaaaatagcagcgtaacgtatcgaaccatcaatgactacggggcggaaacgccgcaactcaactgtaaatcgtaa

SEQ ID NO: 459167 - DNA, 2601 bp, Shigella boydii
atgtatagaactcatcgacaacacagcctgttaagctctggtggagtgccatcgtttattggggggctggtggtgtttgtgtcggcagcgttcaatgcacaagctgaaacctggttcgatcctgcttttttcaaagatgatccctcaatggtggccgatttgtctcgtttcgaaaaaggacaaaaaataacgccaggggtttatcgtgtcgatattgttctgaatcagacaattgtagatacgcgcaacgtcaattttgttgagataacgccagagaaggggattgccgcctgtttgacgactgaaagcctggatgcaatgggtgttaatactgatgcgtttccggcttttaaacaactggacaaacaagcgtgtgtgccattggcggagattattccggatgccagcgtaacgtttaatgtgaataaactccgtctggaaatttcagtaccgcaaatcgccatcaaaagtaatgcccgtggttatgtcccccctgaacgttgggatgaagggatcaacgcgctattactgggatattcgtttagcggggctaacagtattcatagcagcgcagacagtgattctggcgacagctattttctgaatttaaacagtggcgttaatttaggcccatggagattgcgcaacaattcaacatggagtcgcagtagtggccaaaccgcagaatggaagaatctcagcagctatttgcagcgggcggttattccactaaaaggcgaactgaccgtaggtgatgattatactgcaggcgattttttcgatagtgtcagctttcgtggtgtgcagctggcgtcagatgacaacatgctgccagacagcctgaaagggtttgcgcctgtggtgcgtggtatcgccaaaagcaatgcccagataacgattaagcaaaatggttacaccatttaccaaacttatgtatcgcctggtgcttttgaaattagtgatctctattccacgtcgtcgagcggtgatttgttagttgaaatcaaagaagcggacggcagcgtcaatagctacagcgtaccgttttccagcgtgccattactccagcgtcaggggcgaatcaaatacgcggtgacactggcgaaatacagaaccaatagtaatgaacagcaggagagcaaatttgcccaggccacgttgcagtggggcggaccgtggggaacgacatggtatggtggtggacaatatgctgaatattaccgtgccgccatgtttggtctgggatttaaccttggcgatttcggagcaatttcgttcgatgcgacccaggcgaagagtacgctggcagaccaaagcgaacataaaggtcagtcatatcgttttctgtatgccaaaacgctcaaccaattgggcactaattttcaactgatgggctatcgctattcgacgtcgggtttctacaccctttccgacaccatgtataaacatatggatggctacgaatttaatgacggtgatgatgaagatacgccgatgtggtcgcgttattacaatttgttttacaccaaacgtggcaaactgcaggtcaatatctcccagcaattaggcgattacggttcgttttatttaagtggtagccagcaaacttactggcataccgatcaacaggatcggctattacagtttggctacaacacgcaaattaaagatctctcgctgggggtttcctggaactacagtaagtcccgtggtcaacctgatgctgatcaggtgtttgcactaaatttttccctgccgctcaatctgttgctccccagaagtaatgatagctataccaggaaaaaaaattacgcctggatgacctctaacaccagtatcgataacgaagggcacattacacaaaacctgggtttaacggagacactactcgatgacggtaacctgagctacagcgtgcaacagggatataacagcgaggggaaaacggctaatggtagcgccagcatggactacaaaggggcgtttgcagatgcccgagtgggctacaactacagcgataacggcagtcaacaacaactgaactacgctctttcaggcagtttagttgcccattcacagggcattaccctggggcaatcgctgggggaaactaacgtgctgattgcagcaccaagcgcagagaatactcgtgtggcgaacagcaccgggctgaaaactgactggcgcggatataccgttgtcccctatgccacttcttatcgggaaaatcgaatcgcacttgatgcggcatcgttaaaacgtaacgtggatcttgaaaatgcagtagtcaacgtggttcccaccaaaggggcgttggttctggcggagttcaatgcccatgcgggagcaagggtattaatgaaaacatcaaagcagggtataccgctgcgttttggcgcgatagcgacgctggacggcatacagactaatagcggcattattgatgatgatggctcgctctatatgtccggtttgcccgctcagggagcgataactgtacgctggggcgaagctcccgatcaaatttgtcatatcagttaccagcttaccgaacaacaaattaactctgcgattacgcgaatggatgccatatgcagataa

SEQ ID NO: 459168 - DNA, 1071 bp, Shigella boydii
atgcagataatctttggagaaaaatgcgtgttattactacgactattttttgccgccgtcttaatgctatggtgcgctcaaactgctgcttatagcgggcagtgtcataccactcaggggaatccgtatattggcgtcaattttggcgttaaaaccctggaggaagaagaaaatacggctggagtagttaaagacaaattttatcagtggaacgaatcgaatgattattatgtttcctgtgattgcgataaagacaatgtcagaagtggccgatgggcattcgccgcggattcaccgttagtctatttaggcgacaactggtacaaaattaatgactatcttgccgccaaagttttattgcaggttaaaggcagttctcctactgcggttcctttcgaaaacgtgggcacaggggcagatacacgatggcatatttgcgatcccggcggtcaacgtttaggtggccagggggctagcggtaatagcggtagcttttccctgaaaatattgcagccgttcgttggttcggtcgtcattcctcctatggcgctggcgcgattatttgaatgctacaacatacccgcaggtgattcctgcacgactacaggtacaccggttttagtgtattacctgtctggtactatcaattcacttggctcatgttccgtcaatgccggagaaacaatcgaggtcgatctgggcgacgtatttgcggctaactttcgtgttgtagggcataagcctcttggggccagaacggcagaacttgcaattccagtcaggtgtaacacgggaaacgcggggttagttaacgtcaacctgagtctgacggcaactacagaccccagctatccccaggcgattaagacgtcacgtcctggcgtgggcgtggtggtgaccgatagccagaacaacattatttcccctgctggtggaacattaccgctctctattcctgatgatgcagacagtatcgcgcgaatgaatgtctatccagtcagcacgacaggtgtaccaccagaaaccgggcgatttgaagccacggcaacggtgagaataaattttgattaa

SEQ ID NO: 459169 - DNA, 543 bp, Shigella boydii
atgaagaaaaaaacgatatttcagtgcgttatcttgttctttagcattcttaacatccatgtcgggatggctgggcctgaacaagttagtatgcatatttatgggaatgtggtcgatcagggctgtgatgtcgccaccaaaagtgcattacaaaatattcatattggtgattttaatatcagtgattttcaggctgcgaataccgtaagcactgctgctgatttgaatatcgatatcaccggttgtgccgctggtattactggcgcggacgtcctttttagcggcgaggctgacacccttgcgccgacactgctcaaactaactgacacaggcggaagcggtggtatggcaacggggattgccgtgcaaattcttgatgcgcaaagtcagcaagaaatcccgctcaatcaggtccagcctcttacgcccttaaaagccggggataacacactcaaatatcaacttcgttataagtccacaaaggcgggagcaacgggcggtaatgcgacggcggttctctattttgatctggtttaccagtga

SEQ ID NO: 459170 - DNA, 564 bp, Shigella boydii
atgcgacggcggttctctattttgatctggtttaccagtgaaggagtgatgttgaaacggataatctggattctgttcttactgggattaacggggggctgtgagctatttgcccatgatggcacggtcaacattagcggatcgtttcgccgtaatacatgcgtgctggcacaggatagcaagcaaatcaatgtgcagttaggcgatgtctcgctgacacgtttttttcatgggaattatggcccggagaaatctttcatcattaatttgcaggattgcggaacagatgtcagcacggttgacgtcaccttttcaggaacccccgacggagtgcagagcgaaatgctgtccattgaaagtggtacggatgcagccagtgggctggcaattgcgattctggatgatgcgaagatattgattccgcttaaccaggcgagtaaagactacagcctacatagcggtaaggtgccattaactttttatgcgcaattgcgacctgtcaatagcgatgtgcagtcgggtaaagtgaatgccagcgcgacatttgtacttcattatgactaa

SEQ ID NO: 459171 - DNA, 690 bp, Shigella boydii
ttggcgctcttgattttcgccgttttatcgctgctggtggcgggtgaattgcgggcaggagtggtggtcggcggaacgcgatttatctttccggcagacagagaatcgatatctattttactgactaataccagtcaggaatcctggctgattaacagtaaaatcaaccgcccaacgcgttgggccgggggggacgcgtcgacagtgccagcaccattactggccgctccgccacttattctcctgaagcccggtactacaggcacgttgcgcttgctgagaacggaaagcgacatcttgcctgtggatcgcgaaacgctatttgagttaagcattgccagcgtgccatccggcaaagttgaaaatcagagcgtaaaagtggcgatgcgctcggtatttaaactgttctggcgacccgaaggtttgccgggcgacccgctggaagcttatcaacaattacgctggacacggaattcgcagggtgtacaactcactaacccaacgccttactacattaacctgattcaggtgagcgtaaatggtaaagcgttaagtaatgcgggagttgtgccgcctaaaagccagcgtcagacaagctggtgtcaggcaatcgcaccgtgtcatgtcgcctggcgggcgataaatgattacgacgggttgagtgcaaagaaggagcaaaatctgccctga

SEQ ID NO: 459172 - DNA, 1011 bp, Shigella boydii
atgtactaccccttcgttcgtaaagcccttttccagctcgatccagagcgcgctcatgagtttacttttcagcaattacgccgtattacaggaacgccgtttgaagcactggtgcggcagaaagtgcctgcgaaacctgttaactgcatgggcctgacgtttaaaaatccgcttggtctggcagccggtcttgataaagacggggagtgcattgacgcgttaggcgcgatgggatttggatcgatcgagatcggtaccgtcacgccacgtccacagccaggtaatgacaagccgcgtctctttcgtctggtagatgccgaaggtttgatcaaccgtatgggctttaataatcttggcgttgataacctcgtagagaacgtaaaaaaggcccattatgacggcgtcctgggtattaacatcggcaaaaataaagatacgccagtggagcagggcaaagatgactatctgatttgtatggaaaaaatctatgcctatgcgggatatatcgccatcaatatttcatcgccgaataccccaggattacgcacgctgcaatatggtgaagcgctggatgatctcttaaccgcgattaaaaataagcaaaatgatttgcaagcgatgcaccataaatatgtgccgatcgcagtgaagatcgcgccggatctttctgaagaagaattgatccaggttgccgatagtttagttcgccataatattgatggcgttattgcaaccaataccacactcgatcgttctcttgttcagggaatgaaaaattgcgatcaaaccggtggcttaagtggtcgtccgcttcagttaaaaagcaccgaaattattcgccgcttgtcactggaattaaacggtcgcttaccgatcatcggtgttggcggcatcgactcggttatcgctgcgcgtgaaaagattgctgcgggtgcctcactggtgcaaatttattctggttttatttttaaaggtccgccgctgattaaagaaatcgttacccatatctaa

SEQ ID NO: 459173 - DNA, 543 bp, Shigella boydii
atgcgaattaaaccagacgataactggcgttggtattacgatgaagagcacgatcgaatgatgctcgatttagccaatggtatgctgtttcgctcacgttttgcgcgcaagatgttgactccagatgccttttctcccgcaggcttttgcgttgacgacgccgcgctctatttctcttttgaagaaaagtgccgcgattttaatttatctaaagaacaaaaagccgaactggtgctgaatgcactggtagcaattcgctatctcaaaccgcaaatgccgaaaagctggcattttgtttcccatggtgaaatgtgggtgcccatgccgggcgatgcggcctgcgtttggttgagcgatactcacgagcaggtcaatttgctggtcgttgaatctggcgaaaatgccgcactatgcctgctggcacaaccctgcgttgttattgcgggtcgcgcgatgcagttgggcgacgccattaaaatcatgaacgacaggctgaaaccgcaggttaatgttgacagcttcagcctcgaacaggcagtctaa

SEQ ID NO: 459174 - DNA, 1110 bp, Shigella boydii
gtggcgacattaacccggctttttattcatcctgttaaatcgatgcgcggcattggtcttacacatgctctggctgatgtcagtggtctggccttcgatcgcatctttatgatcacggaacctgacggtacgtttattaccgctcgccagtttccccagatggtacggtttactccttcacctgtgcatgatggcttgcatctcaccgcaccagatggcagtagcgcatatgttcgttttgctgatttcgccacacaagacgcaccaaccgaagtttggggcacacattttaccgcgcgaattgcgccagacgcgatcaacaaatggctaagtggatttttctcccgcgaagtgcaattacgctgggtggggccacaaatgacccggcgcgtgaaacgccacaacactgtacctctgtcatttgctgatggctatccttaccttcttgctaacgaagcctcgttacgtgatctccaacaacgttgtccggccagtgtaaaaatggagcaattccgccccaatctggtggtttccggcgcgtcagcctgggaagaagatcgctggaaagtgattcgcattggtgatgtggtgtttgatgtggttaaaccttgtagccgctgtattttcaccaccgtcagcccagaaaaagggcaaaaacatccggcaggcgaaccattaaaaacattgcaatctttccgcactgcccaggataacggcgatgtcgattttggtcagaatttaattgcccgtaatagcggcgtgattcgcgttggcgatgaggtggaaattctggcaacggctccggcaaaaatttacggcgcagctgccgctgatgataccgccaacatcacgcaacaaccggacgcaaatgtagatattgactggcagggacaggcatttcgtggaaataaccaacaggtgttgctggagcaattagaaaatcagggaattcgtatcccttattcttgccgcgcgggcatttgtggaagttgccgtgttcagattttagaaggcgaagtctcgccgctgaaaaaatcagcaatgggcgatgatggcaccattctttgctgtagctgtgtaccgaagactgcacttaagttggcgcgttag

SEQ ID NO: 459175 - DNA, 2109 bp, Shigella boydii
atgaattctctgtttgccagtacggcccgtgggctggaagagctgttaaaaactgaactggaaaacctgggggccgttgaatgccaggtggttcagggtggggtccatttcaagggcgacacacggcttgtttaccagagcctgatgtggagccgcctggcctcgcgtattatgttgccgctgggcgagtgtaaggtttacagcgatttagacctctatctcggtgttcaggcgatcaactggacagagatgtttaatcctggcgcgaccttcgctgtccacttcagtggtttgaatgacaccatccgcaacagtcagtacggcgcgatgaaagtgaaagacgcgatcgtcgatgctttcacgcggaaaaatctgccgcgtccaaatgttgatcgcgatgcgccggatatccgcgttaacgtctggctgcataaagaaaccgccagtatcgctcttgatctgagtggtgatggtttacatctgcgtggctatcgcgatcgtgctggtattgcgccgatcaaagaaaccctggcagccgctattgtgatgcgatccggctggcagcctggaacaccgctgctcgatccgatgtgtggttccggtacgttgctgattgaagcggcgatgctggcgaccgatcgcgcacccggcttgcaccgtgggcgttggggctttagcggctgggcgcagcatgatgaagctatctggcaggaagtgaaagcggaagcgcaaactcgcgcccgtaaaggcctggctgagtatagctctcatttttacggttcggacagcgacgcacgggtgattcaacgtgcacgcactaacgcccgtcttgcggggattgctgaactgatcacctttgaggtgaaagatgtcgcgcaactgaccaatccgctgctgaaagggccgtacggcacagtgttgagcaacccgccatacggggaacgtctggacagcgaaccggcgctgattgcgctgcatagcctgctgggtcggatcatgaaaaaccagtttggtggctggaatctctctttgtttagtgcctcgccggatctgctaagctgcttgcagctgcgtgcagacaaacagtacaaggcgaaaaacggcccgctggactgcgtacagaaaaattaccacgttgccgaaagcactccagacagcaaaccggcgatggtagcggaagactacgccaaccgcctgcgtaagaacctcaaaaaattcgagaagtgggctcgccaggaaggaattgaatgttaccgcctgtatgacgccgatctgccggaatataacgttgccgttgaccgttattccgactgggtggtggtgcaggagtatgcaccgccaaaaactattgatgctcacaaagcgcgtcagcgtctgttcgatattatcgctgcaaccatttcggtactggggattgcgccaaacaaactggtgctgaaaacccgtgaacgccagaagggcaaaaaccagtaccagaaactgggcgagaagggcgagtttcttgaagttaccgaatataacgctcacttgtgggtgaacctgacggattatctcgatactggtctgttcctcgatcaccgtatcgcccgccgtatgctcggtcagatgagcaaaggcaaagatttcctcaacctgttctcttataccggtagcgccaccgtgcatgcgggattaggcggcgcgcgcagcaccaccaccgtggatatgtcgcgtacttatctggagtgggcagaacgcaacctgcgtctgaatggcctaaccgggcgtgcgcatcgcctgattcaggccgattgcctggcgtggctgcgtgaggcaaatgaacagtttgatctgatctttatcgatccgccaaccttctctaactcaaaacgaatggaagatgcgtttgatgttcagcgcgatcatctggcgctgatgaaagatttgaaacgtctgctgcgtgcaggtgggacgatcatgttctcgaacaacaaacgtggcttccgtatggatctcgacggcctggcaaaactgggactgaaagcacaagaaattacgcaaaaaacgctctcccaggatttcgcccgtaaccgccagatccacaactgctggctgattaccgcagcctga

SEQ ID NO: 459176 - DNA, 1908 bp, Shigella boydii
atgtcattaatcagtatgcatggcgcatggctgtcgttcagcgacgcgccgcttctcgataacgcagaactgcatatcgaagataacgaacgtgtttgtctggtgggccgcaacggcgcgggcaaatcgacgttaatgaaaatcctcaaccgtgaacaagggctggatgacggtcgcattatttacgagcaagatttgattgtagctcgtctgcaacaggatccgccgcgtaacgttgagggtagcgtttatgatttcgttgccgaaggcattgaagaacaagcggaatatctgaaacgctatcacgatatttcgcgcctggtgatgaacgacccgagcgagaaaaatctcaacgaactggcgaaggttcaggaacagttggatcaccacaacctgtggcagctggaaaaccgcatcaacgaagtgctggcgcaactggggttagatcctaatgttgcgctgtcgtcgctttccggcggctggttgcgtaaagcggcattaggacgcgcgctggtgagtaatccgcgcgtgctgttgcttgatgaaccgacaaaccacctggatattgaaaccatcgactggctggaagggttccttaaaaccttcaatgggacgattattttcatctcccacgaccgttcgtttatccgcaatatggcgacgcgcattgttgatctcgatcgcggcaagctggtgacctatccagggaattacgaccagtacctgcttgaaaaagaagaagccctgcgcgtggaagaactacaaaatgccgagttcgatcgcaaactggcgcaggaagaggtgtggatccgccaggggatcaaagcacgccgtacccgtaatgaaggccgcgtacgcgccctgaaagcaatgcgtcgcgagcgtggtgaacgtcgcgaagtgatgggtaccgcaaagatgcaggtggaagaggccagccgctccggtaagatcgttttcgaaatggaagacgtttgctaccaggttgacggtaagcaactggtgaaagatttttcggcccaggttctacgtggcgacaaaattgtcctgattggtccgaatgggtgcggcaaaaccacgctgctgaaactgatgctcggtcagcttcaagcggacagcgggcgtattcacgttggcaccaaactggaagtggcttatttcgatcagcaccgcgcggaactggatcccgataaaacggtgatggataacattgccgaaggtaagcaagaggtgatggttaacggcaagccacgccacgtattgggctatttgcaggactttctgttccatccgaaacgggcgatgacgccggtacgtgcgctttctggcggtgagcggaaccgcttgctgctggcgcgtttgttcctcaaaccaagcaacttattgattcttgacgaaccgaccaacgatcttgatgtcgaaacgctggaactgctggaagaactgatcgacagctatcagggcacggtattgctggttagccacgatcgtcagtttgtcgataacaccgttacagaatgttggatcttcgaaggcggcggtaaaattggtcgttatgtcggcggttatcatgatgcccgtggtcagcaagagcagtatgtggcgctcaaacagcctgcggtgaaaaaaaccgaagaagccgccgcggcaaaagcagaaactgtaaaacgcagcagtagcaaactaagctataaattgcagcgcgaactggagcagctaccgcaattgctcgaagatctggaggcgaagctggaagccctacagacgcaggtggcggatgcttccttcttcagtcagccacatgagcagacacaaaaagtgctcgccgatatggctgctgcagagcaggagctggagcaagcctttgaacgctgggagtatcttgaagcgttaaaaaatggtggctga

SEQ ID NO: 459177 - DNA, 1254 bp, Shigella boydii
atgtgcgaacatcatcatgccgcgaagcacatcctgtgctcgcagtgtgacatgctggtggcgttaccgcgccttgagcatggtcagaaagcggcatgtccccggtgtggcacaacgttaaccgtggcgtgggatgcccctcggcagcgtccgaccgcctatgcgttggctgcactgttcatgctgttgctgtccaacttgtttccttttgtgaatatgaacgttgcaggagttaccagtgaaattacattactggaaattcccggcgtgcttttttctgaggactacgccagcctcggcacctttttcctgttgtttgtgcaactggttccctcgttttgtctgataaccattctgttactggtgaatcgcgcggaattaccggtccgtttaaaagagcaactggcacgggtgctttttcaactcaaaacctggggaatggcggagattttcctcgcgggtgtgctggtcagtttcgttaaactgatggcttacggcagcattggggtaggcagcagctttctcccctggtgtttattttgtgtcctgcaactgcgcgcttttcagtgcgttgatcgtcgctggttatgggacgacatcgccccgatgccagaactgcgccagccgctaaaaccaggcgtcacggggatacgtcaggggctgcgttcgtgctcctgttgtacggcaatccttcctgctgatgaacccgtgtgcccgcgttgtagtaccaaagggtacgttcggcgtagaaacagcctgcagtggacactcgcgctgcttgtaacgtctatcatgctgtatcttccggctaatattttgcccatcatggtgacggatttattaggctcgaagatgccgtcgacgattctcgctggggtcattctgttatggagcgaaggctcttatcccgtcgctgcggtgatctttctggccagtattatggtgccaacgttaaagatgatcgccatcgcgtggctgtgttgggatgccaaagggcatggcaagcgcgacagtgaaagaatgcatttgatttatgaagttgttgagtttgtaggccgctggtcgatgattgacgttttcgttatcgcggtgctctcggcgctggtgcgtatgggaggtttaatgagtatttatccggcaatgggtgcattaatgtttgctttagtcgtcataatgacaatgttttctgctatgacgtttgacccgcgtttgtcgtgggatcgtcaacctgaatcagagcatgaggagtcctga

SEQ ID NO: 459178 - DNA, 1641 bp, Shigella boydii
atggaatctaataatggggaagccaaaatccagaaagtgaagaactggtctcccgtgtggatatttcctatcgtcacggcgctcattggggcctgggttctattttatcattacagccatcagggaccggaagtgaccctgatcaccgcgaatgcggaaggaattgaaggtggcaaaaccaccattaaaagccgtagcgttgacgtcggcgtggttgaaagcgccacactggctgatgatttgacgcacgttgaaatcaaagcgcggctgaattccggtatggaaaaattgctgcataaagacaccgtcttttgggtggtgaaaccgcagattggtcgcgaagggattagcggcctgggaacgctgctgtctggagtttatatcgaactgcagccaggcgcgaaaggcagcaaaatggataaatacgatttgctggactcgccaccgttggccccgcctgatgcgaaaggtatccgtgtgattctcgatagcaaaaaagccgggcagctctcgccaggagatccggtgctgttccgtggctatcgggtaggttcggttgaaaccagcaccttcgatacgcaaaaacgcaatatcagttatcaactgttcatcaatgcaccttatgaccgactggtgaccagcaatgttcgcttctggaaagatagtggcattgcggttgatctgacgtcagcggggatgcgtgtggagatgggctcattgacaacgctgcttagtggcggtgttagctttgatgtgccggaaggtctggatttagggcagccagtggcaccgaaaacagctttcgttttgtatgatgatcagaagagcattcaggattcgttgtacaccgatcacattgattatctgatgttctttaaagattcggtacgcggtctgcaaccgggagctccggtagaattccggggtattcgcctgggtaccgtaagcaaagtgccattctttgcgccgaatatgcgtcagacatttaacgatgattaccgtattccggtactgattcgtatcgagccagagcggctgaaaatgcagcttggcgaaaatacggatgttgttgagcaccttggcgaattgttgaaacgtggtttacgcggatcgctgaaaaccggaaacctggtcactggtgcactgtatgttgatctcgatttctatccaaatacgcctgcaataaccggtattcgtgaatttaatggttatcagattatccctactgttagcggcggcctggcgcaaatccagcaacgactgatggaagcgttggataagatcaacaaactgccattgaatccgatgattgaacaggcaaccagtacgttttctgaaagtcagcgcacaatgaaaaacctgcaaacgacgctggatagcatgaacaagatcctcgctagccagtcgatgcagcagttgccgacggatatgcagtcaacgttgcgtgaattgaatcgcagcatgcagggcttccagcctggctccgcagcctacaacaagatggtggcggatatgcagcgccttgatcaggtgttgcgagaactgcaaccggtgctgaaaacgctcaatgagaagagtaacgcgctggtatttgaagcgaaggacaaaaaagatccagagccgaagagggcgaaacaatga

SEQ ID NO: 459179 - DNA, 564 bp, Shigella boydii
atgaaaaagtggctagtgacgattgcagcactgtggctggccggatgcagctccggcgaaattaataaaaactattaccagttacctgtggtgcagagcggtacacaaagtaccgccagccagggcaatcgtctgttatgggtagagcaggtcactgttcctgactatctggcggggaatggtgtggtttatcaaaccagtgatgtgaagtatgtgattgccaacaacaacttgtgggccagcccgttggatcaacagttgcgcaacaccctggttgccaacctgagtacgcaactgcccggctgggtggttgcctcccagcctctgggaagcgtccaggacacgctcaatgttaccgtaacggagtttaacggtcgctatgatggcaaggtcattgtcagtggtgagtggctgttgaaccaccagggacaactgatcaaacgtccgttccgtctggaaggagtgcaaactcaggatggttacgatgagatggttaaagtgctggccggtgtctggagtcaggaagccgcttctattgcacaagagataaagcgtctaccttaa

SEQ ID NO: 459180 - DNA, 1539 bp, Shigella boydii
atgagcagctcacttcctgacgatatcaatgcactgaaacgtctccttgccgaacaggaggcgctgaaccgtgccctgctggaaaagctgaacgagcgtgaacgcgaaatagaccatctgcaggcacagctggataagctgcgccggatgaacttcggcagccgctccgaaaaagtctcccgtcgtatcgcacagatggaagctgacctgaaggcacttcagaaagaaagtgatacccttaccggtcgggttgacgacccggccgtgcagcgcccgctgcgtcaaacccgcacccgcaaaccgttccccgaatcactcccccgcgatgaaaaacggctgctgccggcagcgtcatgctgcccggaatgtggaggctcactgagctatctgggtgaggatgccgccgaacagctggagttgatgcgcagcgtcttccgggttatccggactgtacgtgaaaagcatgcctgtactcagtgcgatgccatcgtgcaggcccccgcgccttcacggcccatcgagcggggtatcgcaggaccggggctgctggcccgcgtgctgatctcaaagtatgcagagcacaccccgctgtaccgccagtctgaaatgtacggccgccagggcgtggagctgagtcgttcactgctgtcgggctgggtggatgcatgctgccggctactgtcaccgctggaagaagcgcttcaggactatgtgctgactgacggtaagctccatgctgatgacacgcctgtcccggtgctgttgccaggcaataagaaaacgaagaccgggcggttatggacctacgttcgtgacgaccgtaacgccgggtcaacgctggcgccggcggtgtggttcgcttacagcccggacagaaaaggcatccatccgcagacccatcttgcggggttcagtggtgtactgcaggcggatgcatacgccgggttcaacgagctgtaccgggatggccggataacggaagccgcctgttgggctcacgcccgccgtaaaatccacgatgtgcacgttcgcaccccgtcagccctgacggaggaagcgctgaaacggatcggcgaactgtacgccatcgaggcagagataaggggaatgacggcggagcagcgccttgccgaacgtcagttgaaaacgaaaccgctgctgaaatccctggaaagctggctgcgtgaaaagatgaaaaccctgtcgcgacactcagaactggcgaaagcgttcgcatacgccctgaaccagtggccggcgctgacgtactatgcagatgatggctgggctgaggcggacaataacatcgctgaaaatgcgttgcggatggtcagtctgggccgcaaaaactacctgttcttcggttcggatcatggaggagagcggggagcgctgctgtacagcctgatcgggacgtgcaaactgaacggagtggagccagaaagctacctccgctatgtccttgacgtcatagccgactggccgataaaccgggtcggcgaactgctcccctggcgcgtagcactgccgactgaataa

SEQ ID NO: 459181 - DNA, 1374 bp, Shigella boydii
gtgttcctccttggcccgccaggtattgccaaaagtttgatcgcccggcgcttaaaattcgcctttcagaatgcccgcgcgtttgaatatctgatgacccgcttctccacgccggaagaagtttttggtcccctttctattcaggcgctaaaagatgaagggcgctatgaacgtttaaccagcggttacctgccggaagcagaaattgtctttctggatgagatctggaaagcgggcccggcaattcttaataccttgctcaccgccattaacgagcgccagttccgcaacggtgcacacgtagaaaaaatcccgatgcgtctgctggtggcggcctccaacgagctgccggaagcagacagcagtctggaagcgttatatgaccgcatgctgattcgtctgtggttagataaagtgcaggataaagcgaatttccgctccatgctgaccagtcaacaggatgaaaacgacaatccggttcctgatgccttgcaggtcacagatgaagaatatgaacgctggcagaaagagattggtgaaattacgctgcccgatcatgtatttgagctgatttttatgctgcgccagcaactggataaattaccggatgcgccttatgtctcggatcgtcgctggaaaaaagcgatccgattattgcaggccagcgccttttttagcggtcgcagtgctgttgccccggtagatctcattttgctgaaagattgcctgtggtatgacgcgcaaagcctgaatttgatacaacaacaaattgatgtattgatgaccggtcacgcctggcaacagcaagggatgttgacccgcctgggcgcgattgtgcaacgtcacctgcaacttcagcagcaacaaagcgataaaacagccttaacggtaattcgtctgggcggcatttttagccgtcgtcagcagtatcaactccctgttaacgttactgcttccactctgactctgctgctgcaaaaaccgttaaaactgcatgatatggaagtggttcatatctcctttgagcgtagcgcgctggaacagtggctgagtaaaggtggtgaaattcgcggcaaactgaacggtatcggctttgcccagaaactgaatctggaagttgatagcacccaacatcttgttgtacgcgatgtaagtttacaaggcagtacgctggcacttcccggttcatcggctgaaggtctgccaggtgaaataaaacaacaactggaagagcttgaaagcgactggcgtaagcaacacgctttattcagcgaacagcaaaaatgtctgtttatccctggcgactggttaggtcgcattgaagccagcctacaggatgtcggtgcacagattcgccaggcacaacaatgctaa

SEQ ID NO: 459182 - DNA, 1389 bp, Shigella boydii
atgatcatcgcactgctggcctcaccgcagctggcggtcttctttgaaaaattcccacgactgaaggcagcaatcactgatgatgttccccgctggcgtgaggcgctgcgcagtcggctgaaagatgcccgagtcccgccagaactcaccgaagaggtgatgtgctatcagcaaagccagctcctctccacgccgcagtttattgtgcagctaccacagatcctggacttactgcatcgtctgaattccccatgggcagaacaagcccggcagttggttgatgctaacagcacaataacttcagcgttacacacgctttttctccagcgctggcgtttaagtctgatcgtgcaagcaacgacgttaaatcaacagctattagaagaagaacgcgaacaactgttaagtgaagttcaggaacgcatgacgctgagcggacaacttgaaccgattctcgcagataacaataccgcagctggtcgtctgtgggatatgagcgccggccagcttaaacgtggcgactatcagttgattgtgaaatacggtgaatttcttaacgaacagccggaactgaaacgcctggcagagcagctggggcgttctcgggaagccaaatcaataccgcgcaacgatgcgcagatggaaaccttccgcaccatggtgcgcgaaccggcgacggttcctgagcaggttgatggtctgcaacaaagcgatgatattttacgtctcctgccgccagaactggcgacactagggataacggaactggagtatgagttttaccgtcggctggtggaaaaacagttgctcacctatcgcctgcacggtgagtcgtggcgtgaaaaagtgatcgaacgtccggtggtacataaagattacgatgaacagccgcgcgggccgtttattgtctgtgtggatgcttccggctcaatgggcggctttaatgaacagtgtgcgaaagcgttctgcctggccttgatgcgcattgctctcgcagaaaaccggcgctgctatattatgctattttccaccgagatcgtccgttatgagctttcaggcccacaaggcatcgaacaagcaatccgttttttaagccagcagtttcgtggcggcaccgatcttgccagttgttttcgcgccattatggaacgcttgcaaagcagggaatggtttgatgccgatgcggtggtgatttctgattttatcgctcagcggttgcctgacgacgtgacgagtaaagtgaaagagctgcagcgggtacatcagcatcgctttcatgccgtggcgatgtcggcacacggcaaacccggcatcatgcgcattttcgatcatatctggcgctttgataccgggatgcgaagccgcctgctcagacgctggcggcgataa

SEQ ID NO: 459183 - DNA, 993 bp, Shigella boydii
atgaaaaccgcttacattgccaaacaacgccaaattagcttcgtgaaatctcacttttctcgtcaactggaagaatgtctggggctgatcgaagtccaggcaccgattcttagccgtgtgggggatggcacgcaggataacttgtcgggctgtgaaaaagcggtgcaggtaaaagtgaaagctctgcctgatgcccagttcgaagtggttcattcactggcgaagtggaaacgtcagaccttagggcaacacgacttcagcgcgggcgaagggctgtacacgcacatgaaagcccttcgccccgatgaagaccgtctttctccgttgcactcggtctatgtagaccagtgggactgggaacgcgtaatgggcgacggtgagcgtcaattctcgactctgaaaagcacggtagaggcgatctgggcgggaattaaagcaaccgaagctgcggttagcgaagagtttggcctggcaccgttcctgccggatcagatccacttcgtacacagccaggagttactgtctcgttatccggatctcgatgccaaagggcgtgagcgggcgatagcgaaagatcttggcgcggtattccttgtcgggattggcggcaagctgagcgatggtcatcgccacgacgtgcgcgcaccggattatgatgactggagcaccccgtcagagctgggtcatgcgggtctgaacggcgatattctggtgtggaaccctgtactggaagatgcgtttgagctttcttccatggggatccgcgtggatgccgacacgctgaagcatcagctggcgctgaccggtgatgaagatcgtctgcagctggaatggcatcaggcgctgctgcgcggtgaaatgccgcagaccatcggcggcggtatcggccagtctcgtttgactatgctgctgctgcaactgccgcatatcggccaggttcagtgtggagtatggccagctgctgttcgcgagagcgtcccttctctgctgtaa

SEQ ID NO: 459184 - DNA, 459 bp, Shigella boydii
atggaaaattatctgatcgacaatctggaccgtggaatcctggaagcattaatgggcaatgcgcgcaccgcttacgccgaactggcgaaacaatttggcgtcagtccggggacgattcacgttcgggtagagaaaatgaagcaggcggggatcattaccggggcgcgtattgatgtcagcccgaagcagctcggttatgacgtaggctgctttatcggcattatattaaagagcgccaaagactacccttccgcgctggcaaagctggaaagccttgatgaagtcactgaagcctattacacaacaggccactacagcatctttataaaagtaatgtgccgttcgatcgacgctctccagcatgtacttatcaacaagatccaaacaattgatgaaattcagtccaccgagacattgatcgtcctgcaaaacccgatcatgcgtactatcaagccctga

SEQ ID NO: 459185 - DNA, 444 bp, Shigella boydii
atggcagatatcactcttatcagcggcagcaccctcggcggtgccgaatatgtagcagaacacttggctgaaaagctggaagaggcgggttttaccaccgaaacgctgcacggtccgctgttggaagatttatctgcctcggggatctggctgattatcagctccacccacggtgccggagatattccggacaacctttctcctttctatgaagcattgcaggaacagaagcccgatctttctgcggtccgctttggcgcaatcggtattggtagtcgtgaatatgacaccttttgtggggctatcgataaactcgaggcagaactcaaaaattccggtgcaaaacagacaggcgaaacactgaagatcaacattcttgatcacgacattccggaagatccggcagaagaatggctgggatcgtggattaatttactcaaataa

SEQ ID NO: 459186 - DNA, 1890 bp, Shigella boydii
atgttttatccggatccttttgacgtcatcatcattggcgggggtcatgcaggcaccgaggccgcgatggccgcggcgcgtatgggtcaacagactctgcttttgacacacaatatcgacactctggggcagatgagctgcaacccggcgatcggcggtattgggaagggacatctggtaaaagaagtggatgcactcggcggtctgatggcgaaagcgatcgatcaagcgggtatccagtttaggatactaaacgcaagcaaaggaccggcggttcgcgctacccgagctcaggcggatcgtgtgctctaccgtcaggcggtacgtacggcgctggagaaccaaccgaacctgatgatcttccagcaggcggttgaagatcttattgtcgaaaacgatcgagtggtcggtgctgttacccaaatgggactgaagttccgtgccaaagccgtcgtgctcaccgttgggacgttcctcgacggtaaaattcatatcggtctggataattacagcggtggccgtgctggtgatccgccgtccattccgctttctcgccgtttgcgtgaactgccgctgcgcgttggtcgtctgaaaaccgggacaccaccgcgtattgatgctcgaactatcgactttagtgtgctggcgcaacagcatggcggtaacccaatgccggtattctcgtttatgggcaatgcgtcccagcatccccagcaggtgccgtgttatatcactcataccaacgagaaaacccatgatgtgatccgcagtaacctcgatcgtagcccaatgtatgcaggggtgatcgaaggtgtcggcccacgctactgcccgtcgatcgaagacaaagtcatgcgcttcgccgacagaaatcagcatcagatcttccttgaaccggaaggactgacctctaatgaaatttatccgaacggtatctccaccagcctgccgttcgatgtgcagatgcaaatcgtccgctctatgcaggggatggaaaacgcgaagatcgtgcgtccgggttatgccattgagtatgacttcttcgatcctcgcgacctgaaaccgacgctggagagcaagtttatccaggggctgttctttgctggtcagattaacggcactaccggttacgaagaagccgctgcgcaaggtttgctggccggtcttaacgctgcccgtctgtctgctgacaaagaaggttgggctccggcacgttctcaggcgtatctcggcgtactagttgatgacctgtgcactttaggaaccaaagaaccgtatcgtatgtttacttcgcgcgcagaatatcgtctgatgctacgcgaagataatgcggatttgcgtttgactgaaatcggtcgtgaactgggcctggtggatgacgaacgttgggcgcgctttaacgagaaacttgagaatatcgagcgtgagcgtcagcgtctgaaatcgacctgggtaaccccgtcggcggaagctgcagccgaagtgaatgctcacctgactgcgccgctttcccgtgaagccagtggtgaagatctgctgcgtcgtccggaaatgacttatgaaaaattaaccacgctgacgccgtttgcccctgcgttgacagacgaacaggcggcggaacaggttgagattcaggttaaatacgaaggttatatcgcgcgccagcaagatgagatcgaaaagcagctgcgtaacgagaacaccctgctacccgcgacactggattaccgccaggtatccggtctttctaacgaagtgatcgccaaacttaacgatcacaaaccagcctctatcggccaagcttcgcgtatttctggcgtcacgcctgcggccatctccattctgctggtgtggctgaaaaaacagggtatgctgcgtcgtagcgcataa

SEQ ID NO: 459187 - DNA, 624 bp, Shigella boydii
gtgctcaacaaactctccttactgctgaaagacgcaggtatttcgcttaccgatcaccagaaaaaccagcttattgcctacgtgaatatgctgcataaatggaacaaagcgtacaacctgacttcggtccgcgatcctaatgagatgctggtacgccatattctcgatagcattgtggtggcaccgtatctgcaaggtgaacggtttatcgatgtcggcaccggaccaggactgccaggcattccactctctatcgtgcgtcctgaagcccatttcactctgttggatagccttggtaaacgcgtgcgtttccttcgtcaggtgcaacatgagcttaaactggagaatattgaaccagtacagagcagggtagaagagtttccttcagagccgccatttgatggcgtaattagccgcgcttttgcctctctgaacgatatggtgagctggtgccaccatcttcctggtgagcaaggccgtttctacgcgctgaaagggcaaatgccggaagatgaaatcgctttgttgcccgaagaatatcaggtcgaatcagtggttaaacttcaggttccagccctggatggcgaacgtcatctggtggtgattaaagcaaataaaatttaa

SEQ ID NO: 459188 - DNA, 381 bp, Shigella boydii; identical to SEQ ID NO: 1851

SEQ ID NO: 459189 - DNA, 816 bp, Shigella boydii
atggcttcagaaaatatgacgccgcaggattacataggacaccacctgaataaccttcagctggacctgcgtacattctcgctggtggatccacaaaaccccccagccaccttctggacaatcaatattgactccatgttcttctcggtggtgctgggtctgttgttcctggttttattccgtagcgtagccaaaaaggcgaccagcggtgtgccaggtaagtttcagaccgcgattgagctggtgatcggctttgttaatggtagcgtgaaagacatgtaccatggcaaaagcaagctgattgctccgctggccctgacgatcttcgtctgggtattcctgatgaacctgatggatttactgcctatcgacctgctgccgtacattgctgaacatgtactgggtctgcctgcactgcgtgtggttccgtctgcggacgtgaacgtaacgctgtctatggcattgggcgtatttatcctgattctgttctacagcatcaaaatgaaaggcatcggcggcttcacgaaagagttgacgctgcagccgttcaatcactgggcgttcattcctgtcaacttaatccttgaaggggtaagcctgctgtccaaaccagtttcactcggtttgcgactgttcggtaacatgtatgccggtgagctgattttcattctgattgctggtctgttgccgtggtggtcacagtggatcctgaatgtgccgtgggccattttccacatcctgatcattacgctgcaagccttcatcttcatggttctgacgatcgtctatctgtcgatggcgtctgaagaacattaa

SEQ ID NO: 459190 - DNA, 240 bp, Shigella boydii
atggaaaacctgaatatggatctgctgtacatggctgccgctgtgatgatgggtctggcggcaatcggtgctgcgatcggtatcggcatcctcgggggtaaattcttggaaggcgcagcgcgtcaacctgatctgattcctctgctgcgtactcagttctttatcgttatgggtctggtggatgctatcccgatgatcgctgtaggtctgggtctgtacgtgatgttcgctgtcgcgtag

SEQ ID NO: 459191 - DNA, 471 bp, Shigella boydii
gtgaatcttaacgcaacaatcctcggccaggccatcgcgtttgtcctgttcgttctgttctgcatgaagtacgtatggccgccattaatggcagccatcgaaaaacgtcaaaaagaaattgctgacggccttgcttccgcagaacgagcacataaggaccttgaccttgcaaaggccagcgcgaccgaccagctgaaaaaagcgaaagcggaagcccaggtaatcatcgagcaggcgaacaaacgccgctcgcagattctggacgaagcgaaagctgaggcagaacaggaacgtactaaaatcgtggcccaggcgcaggcagaaattgaagccgagcgtaaacgtgcccgtgaagagctgcgtaagcaagttgctatcctggctgttgctggcgccgagaagatcatcgaacgttccgtggatgaagctgctaacagcgacatcgtggataaacttgtcgctgaactgtaa

SEQ ID NO: 459192 - DNA, 534 bp, Shigella boydii
atgtctgaatttattacggtagctcgcccctacgccaaagcagcttttgactttgccgtcgaacaccaaagtgtagaacgctggcaggacatgctggcgtttgccgccgaggtaaccaaaaacgaacaaatggcagagcttctctctggcgcgcttgcgccagaaacgctcgccgagtcgtttatcgcagtttgtggtgagcaactggacgaaaacggtcagaacctgattcgggtaatggctgaaaatggtcgtcttaacgcgctcccggatgttctggagcagtttattcaccttcgtgccgtgagtgaggctaccgctgaggtagacgtcatttccgctgccgcactgagtgaacaacagctcgcgaaaatttctgctgcgatggaaaaacgtctgtcacgcaaagttaagctgaattgcaaaatcgataagtctgtaatggcaggcgttatcatccgagcgggtgatatggtcattgacggcagcgtacgcggtcgtcttgagcgccttgcagacgtcttgcagtcttaa

SEQ ID NO: 459193 - DNA, 1542 bp, Shigella boydii
atgcaactgaattccaccgaaatcagcgaactgatcaagcagcgcattgctcagttcaatgttgtgagtgaagctcacaacgaaggtactattgtttctgtaagtgacggtgttatccgcattcacggcctggccgattgtatgcagggtgaaatgatctccctgccgggtaaccgttacgctatcgcactgaacctcgagcgcgactctgtaggtgcggttgttatgggtccgtacgctgaccttgccgaaggcatgaaagttaagtgtactggccgtatcctggaagttccggttggccgtggcctgctgggccgtgtggttaacactctgggtgcaccaatcgacggtaaaggtccgctggatcacgacggcttctctgctgtagaagcaatcgctccgggcgttatcgaacgtcagtccgtagatcagccggtacagaccggttataaagccgttgactccatgatcccaatcggtcgtggtcagcgtgaattgatcatcggtgaccgtcagacaggtaaaaccgcactggctatcgatgccatcatcaaccagcgcgattccggtatcaaatgtatctatgtcgctatcggccagaaagcgtccaccatttctaacgtggtacgtaaactggaagagcacggcgcactggctaacaccatcgttgtggtagcaaccgcgtctgaatccgctgcactgcaatacctggcaccgtatgccggttgcgcaatgggcgaatacttccgtgaccgcggtgaagatgcgctgatcatttacgatgacctgtctaaacaggctgttgcttaccgtcagatctccctgctgctccgtcgtccgccaggacgtgaagcattcccgggcgacgttttctacctccactctcgtctgctggagcgtgctgcacgtgttaacgccgaatacgttgaagccttcaccaaaggtgaagtgaaagggaaaaacggttctctgaccgcactgccgattatcgaaactcaggcgggtgacgtttctgcgttcgttccgaccaacgtaatctccattaccgatggtcagatcttcctggaaaccaacctgttcaacgccggtattcgtcctgcggttaacccgggtatttccgtatcccgtgttggtggtgcagcacagaccaagatcatgaaaaaactgtccggtggtatccgtaccgctctggcacagtatcgtgaactggcagcgttctctcagtttgcatccgaccttgacgatgcaacacgtaagcagcttgaccacggtcagaaagtgaccgaactgctgaaacagaaacagtatgcgccgatgtccgttgcgcagcagtctctggttctgttcgcagcagaacgtggttacctggcggatgttgaactgtcgaaaattggcagcttcgaagccgctctgctggcttacgtcgaccgtgatcacgctccgttgatgcaagagatcaaccagaccggtggctacaacgacgaaatcgaaggcaaactgaaaggcatcctcgattccttcaaagcaacccaatcctggtaa

SEQ ID NO: 459194 - DNA, 864 bp, Shigella boydii
atggccggcgcaaaagagatacgtagtaagatcgcaagcgtccagaacacgcaaaagatcactaaagcgatggagatggtcgccgcttccaaaatgcgtaaatcgcaggatcgcatggcggccagccgtccttatgcagaaaccatgcgcaaagtgattggtcaccttgcacatggtaatctggaatataagcacccttacctggaagaccgcgacgttaaacgcgtgggctacctggtggtgtcgaccgaccgtggtttgtgcggtggtttgaacattaacctgttcaaaaaactgctggcggaaatgaagacctggaccgacaaaggcgttcaatgcgatctcgcaatgatcggctcgaaaggcgtgtcgttcttcaactccgtgggcggcaatgttgttgcccaggtcaccggcatgggggataacccttccctgtccgaactgatcggtccggtaaaagtgatgttgcaggcctacgacgaaggccgtctggacaagctttacattgtcagcaacaaatttattaacaccatgtctcaggttccgaccatcagccagctgctgccgttaccggcatcagatgatgatgatctgaaacataaatcctgggattacctgtacgaacccgatccgaaggcgttgctggataccctgctgcgtcgttatgtcgaatctcaggtttatcagggcgtggttgaaaacctggccagcgagcaggccgcccgtatggtggcgatgaaagccgcgaccgacaatggcggcagcctgattaaagagctgcagttggtatacaacaaagctcgtcaggccagcattactcaggaactcaccgagatcgtctcgggggccgccgcggtttaa

SEQ ID NO: 459195 - DNA, 1383 bp, Shigella boydii
atggctactggaaagattgtccaggtaatcggcgccgtagttgacgtcgaattccctcaggatgccgtaccgcgcgtgtacgatgctcttgaggtgcaaaatggtaatgagcgtctggtgctggaagttcagcagcagctcggcggcggtatcgtgcgtaccatcgcaatgggttcctccgacggtctgcgtcgcggtctggatgtaaaagacctcgaacacccgatcgaagtcccggtaggtaaagcgactctgggccgtatcatgaacgtactgggtgaaccggtcgacatgaaaggcgagatcggtgaagaagagcgttgggcgattcaccgcgcagcaccttcctacgaagagctgtcaaactctcaggaactgctggaaaccggtatcaaagttatcgacctgatgtgtccgttcgctaagggcggtaaagttggtctgttcggtggtgcgggtgtaggtaaaaccgtaaacatgatggagctcattcgtaacatcgcgatcgagcactccggttactctgtgtttgcgggcgtaggtgaacgtactcgtgagggtaacgacttctaccacgaaatgaccgactccaacgttatcgacaaagtatccctggtgtatggccagatgaacgagccgccgggaaaccgtctgcgcgttgctctgaccggtctgaccatggctgagaaattccgtgacgaaggtcgtgacgttctgctgttcgttgacaacatctatcgttacaccctggccggtacggaagtatccgcactgctgggccgtatgccttcagcggtaggttatcagccgaccctggcggaagagatgggcgttctgcaggaacgtatcacctccaccaaaactggttctatcacctccgtacaggcggtatacgtacctgcggatgacttgactgacccgtctccggcaaccacctttgcgcaccttgacgcaaccgtggtactgagccgtcagatcgcgtctctgggtatctacccggccgttgacccgctggactccaccagccgtcagctggacccgctggtggttggtcaggaacactacgacaccgcgcgtggcgttcagtccatcctgcaacgttatcaggaactgaaagacatcatcgccatcctgggtatggatgaactgtctgaagaagacaaactggtggtagcgcgtgctcgtaagatccagcgcttcctgtcccagccgttcttcgtggcagaagtattcaccggttctccgggtaaatacgtctccctgaaagacaccatccgtggctttaaaggcatcatggaaggcgaatacgatcacctgccggagcaggcgttctacatggtcggttccatcgaagaagctgtggaaaaagccaaaaaactttaa

SEQ ID NO: 459196 - DNA, 420 bp, Shigella boydii
atggcaatgacttaccacctggacgtcgtcagcgcagagcaacaaatgttctctggtctggtcgagaaaatccaggtaacgggtagcgaaggtgaactggggatctaccctggccacgcaccgctgctcaccgccattaagcctggtatgattcgcatcgtgaaacagcacggtcacgaagagtttatctatctgtctggcggcattcttgaagtgcagtctggcaacgtgaccgttctggccgacaccgcaattcgcggccaggatctcgacgaagcgcgagccatggaagcgaaacgtaaggctgaagagcacattagcagctctcacggcgacgtagattacgctcaggcgtctgcggaactggccaaagcgatcgcgcagctgcgcgttatcgagttgaccaaaaaagcgatgtaa

SEQ ID NO: 459197 - DNA, 1371 bp, Shigella boydii
atgttgaataatgctatgagcgtagtgatccttgccgcaggcaaaggcacgcgcatgtattccgatcttccgaaagtgctgcatacccttgccgggaaagcgatggttcagcatgtcattgatgctgcgaatgaattaggcgcagcgcacgttcacctggtgtacggtcacggcggcgatctgcttaaacaggcgctgaaagacgacaaccttaactgggtgcttcaggcagagcagctgggtacgggtcatgcaatgcagcaggccgcacctttctttgccgatgatgaagacattttaatgctctacggcgacgtgccgctgatctctgtcgaaacactccagcgcctgcgtgatgctaaaccgcagggtggcattggtctgctgacggtgaaactggatgatccgaccggttatggacgtatcacccgtgaaaatggcaaagttaccggcattgttgagcacaaagatgccaccgacgagcagcgtcagattcaggagatcaacaccggcattctgatcgctaacggcgcagatatgaaacgctggctggcgaagctgaccaacaataatgctcagggcgaatactacatcaccgacattattgcgctggcgtatcaggaagggcgtgaaatcgtcgccgttcatccgcaacgtttaagcgaagtagaaggtgtgaataaccgcctgcaactctcccgtctggagcgcgtttaccagtccgaacaggctgaaaaactgctgttagcaggcgttatgctgcgcgatccggcgcgtttttatctgcgcggtacgcttactcacgggcgcgatgttgaaattgatactaacgttatcatcgagggcaacgtgactctcggtcatcgcgtgaaaatcggcaccggttgcgtgattaaaaacagcgtgattggcgatgattgcgaaatcagtccgtataccgttgtggaagacgtgaatctggcagcggcctgtactattggcccgtttgcccgtctgcgtcctggtgctgagttgctggaaggtgcacacgtcggtaactttgttgagatgaaaaaagcgcgtctgggtaaaggctcgaaagctggtcatctgacttacctgggcgatgcggaaattggcgataacgttaacatcggcgcgggaaccattacctgcaactacgatggtgcgaataaatttaagaccattatcggcgacgatgtgtttgtcggttccgacactcagctggtggccccggtaacagtaggcaaaggcgcgaccattgctgcgggtacaactgtgacgcgtaatgtcggcgaaaatgcattagctatcagccgtgtgccgcagactcagaaagaaggctggcgtcgtccggtaaagaaaaagtaa

SEQ ID NO: 459198 - DNA, 1830 bp, Shigella boydii
atgtgtggaattgttggcgcgatcgcgcaacgtgatgtagcagaaatccttcttgaaggtttacgtcgtctggaataccgcggatatgactctgccggtctggccgttgttgatgcggaaggtcatatgacccgcctgcgtcgcctcggtaaagtccagatgctggctcaggcagcggaagaacatcctctgcatggcggcaccggtattgctcacactcgctgggcgacccacggtgaaccttcagaagctaacgcgcatccgcatgtttctgaacacattatggtggtgcataacggcatcatcgaaaaccatgaaccgctgcgtgaagagttaaaagcgcgtggctataccttcgtttctgaaaccgacaccgaagtgattgcccatctggtgaactgggagctgaaacaaggcgggactctgcgtgaggctgttctgcgtgctatcccgcagctgcgcggtgcgtacggtacagtgatcatggactcccgtcacccggataccctgctggcggcacgttctggtagtccgctggtgattggcctgggtatgggcgaaaactttatcgcttctgaccagctggcgctgctgccggtgacccgtcgctttatcttccttgaagagggcgatattgcggaaattactcgccgttcggtaaacatcttcgataaaactggcgcggaagtaaaacgtcaggatatcgaatccaatctgcaatatgacgcgggcgataaaggtatttaccgtcactacatgcagaaagagatctacgaacagccgaacgcgatcaaaaacacccttaccgggcgcatcagccacggtcaggttgatttaagcgagctgggaccgaacgccgacgaactgctgtcgaaggttgagcatattcagatcctcgcctgtggtacttcttataactccggtatggtttcccgctactggtttgaatcgctggcaggtattccgtgcgacgtcgaaatcgcctctgaattccgctatcgtaaatctgccgtgcgtcgtaacagcctgatgatcaccttgtcacagtctggcgaaaccgcggataccctggcgggcctgcgtctgttgaaagagctgggttaccttggttcgctggcaatctgtaacgttccgggttcttctctggtgcgcgaatccgatctggcgctgatgaccaacgcgggtacggaaatcggcgtggcgtccactaaagcattcaccactcagttaactgtgctgttgatgctggtggcgaagctgtctcgcctgaaaggtctggatgcctccattgaacatgacattgtgcatggtctgcaggcgctgccgagccgtattgagcagatgctatctcaggacaaacgcattgaagctctggcagaagatttctctgacaaacatcacgcactgttcctgggccgtggcgatcagtacccaatcgcactggaaggcgcattgaagctgaaagagatctcctacattcacgctgaagcctacgctgctggcgagctgaaacacggcccgctggcgctgattgacgcggatatgccggttatcgtcgttgcaccgaacaacgaactgttggaaaaactgaaatccaacattgaagaagttcgcgcgcgtggcggtcagttgtatgtcttcgccgatcaggatgcgggttttgtaagtagcgataacatgcacatcatcgagatgccgcatgtggaagaggtgattgcaccgatcttctacaccgttccgctgcagctgctggcttaccatgtcgcgctgatcaaaggcaccgacgttgaccagccgcgtaacttggcaaaatcggttacggttgagtaa

SEQ ID NO: 459199 - DNA, 573 bp, Shigella boydii
atgaagcgtaatattataggcggtgcattcactctggcatctctaatgctggccgggcatgcactggcagaagatggtgttgttcacttcgtcggtgaaattgtcgacactacttgtgaagttacctccgatacagccgatcaaattgtcccactgggtaaagtcagtaaaaatgcattttcaggtgtaggtagtctggcgtcgccacagaagttcagtattaaacttgaaaattgcccggcaacgtacactcaagcagccgttcgttttgatggtacagaagcgcctggcggcgacggcgacctgaaagtgggtacgccgcttacagcaggcaaccctggtgattttaccggtacaggacaagcgattgcggcaaccggcgttggtattcgtatttttaaccagtccgataattcgcaggttaaactttataacgactctgcttataccgctatcgatgctgaaggcaaggctgaaatgaagtttattgcacgctatgtggcaaccaatgcgaccgtaacggctggtacggcgaacgctgattcacaatttactgtcgaatataagaaataa

SEQ ID NO: 459200 - DNA, 387 bp, Shigella boydii
atgtccagaaaaagttgtttaatcaggctctttaaaacaacagtttcatgtaagttatttaccgcgattatactcagcatttttttaggccaaccagcattaacttatgcaggcgttgtcattggtggtacgcggggggtttacttaagtaataatgctgataaatctatttctgtatttagcaaagaagaaaaaataccttatctcatccaagcttgggtagatccatttaataaagaggataaaagcaaagcgccgtttaccgttattccgccagtatcacgattagaaccttcgcaagaaaaaatattacgcattattcacaccaaaggtgtgtcattgcctgattatcgcgagtcaggtgatgctgccaacttactgatttag

SEQ ID NO: 459201 - DNA, 357 bp, Shigella boydii
atggatggtagccagaaattaccgcaacgtatgctggcaggtattcgcatacatctggggcgcgaaacggactggtcgttgctggcattaggcgttgctggctggatgcgttacgtcagcggcgttgatgatgccggaaatgccattgatgttcgcgatccgcttagcgataaaattcgcgaacttgttgcgggcagcagcagtgaacaacgcgtaaccgccctgctttccctgcgtgaagttttcggtgatgatctgccagataacccgcattttgtgcaggccatcgaacaagcctggcaacaaatcgtacaattcggcgcacatcaggcgctattaaacaccctcaaaatttaa

SEQ ID NO: 459202 - DNA, 987 bp, Shigella boydii
gtgaccaggaccaacctcatcaccggttttctcggcagcgggaaaaccacgtcgattcttcatctgttagcccataaagatcccaacgaaaaatgggcggtactggttaatgaatttggggaagtcggaattgatggtgctttgctcgccgatagcggcgcattgctgaaagagatccccggcggctgcatgtgctgcgttaatggtttacccatgcaggtagggttgaataccttactgcgtcagggaaaaccagaccgcttgttgatagagccgaccgggctgggccatccgaaacagatcctcgatctgttaaccgcaccagtctatgaaccgtggatagatctgcgcgccaccttgtgcattctcgatccacgcttgctgctggacgaaaaaagcgccagcaatgaaaacttccgtgaccagctggctgccgcagacatcattgtcgccaataaatccgaccgtgcgacgcccgaaagtgagcaagcgctacagcgttggtggcagcaaaatggtggcgatcgacaattaattcacagtgagcatgggaaagttgacggtcatcttctggatttgccgcgtcgcaatttagccgagttgcccgccagcgccgcgcattctcatcagcatgtcgtgaaaaaagggttagcagcgttaagcctgccagagcatcaacgctggcgtcgcagtctgaacagcgggcaaggatatcaggcctgcggctggatattcgacgctgatacggtattcgacaccattggcattctggaatgggcgcgacttgcaccggtggaacgcgtcaaaggcgtgctgcgtattcccgaagggctggtacgaatcaaccgtcagggcgatgacctgcacattgaaacgcaaaacgttgcgccaccggacagccgtattgagctgatttccagcagcgaagctgactggaatgccttgcagagcgcgctgttgaagcttcgtttagcgactaccgcgtaa

SEQ ID NO: 459203 - DNA, 714 bp, Shigella boydii
atgattaaaaatttgccgcaaatagtgttgttgaatattgtcagcctcgcgctgtttctttcctggtatattcccgttaatcatggattatggttgccgattgatgcggatattttttatttctttaatcagaaactggtcgaaagtaaggcctttttatggctggttgcattgaccaacaatcgcgctttcgacggttgttctctgctggcgatgggaatgttgatgctgagtttctggctgaaagaaaacgccccaggcagacgacgtatcgtgattattggtctggtaatgctattaactgcagtggtattaaaccagctgggtcaggcattaattcctgtaaaacgggccagcccaacattgacgtttactaatattaaccgcgtcagcgaactgctctctgtccccacgaaagatgcctcacgagatagctttcccggcgatcacggcatgatgctgcttattttttcggcattcatgtggcgttatttcggtaaagttgcaggtcttatcgcccttattatttttgtggtttttgcgtttcccagagtaatgattggcgcacactggtttactgacatcattgtcggttcgatgaccgtgatattgatcggtttgccctgggtgttgctgacgccattaagtgatcgattaatcaccttttttgacaaatcactaccgggaaaaaacaaacatttccaaaacaaataa

SEQ ID NO: 459204 - DNA, 567 bp, Shigella boydii
atggtcaaatctcaaccgattttgagatatatcttgcgcgggattcccgcgattgcagtagcggttctgctttctgcatgtagtgcaaataacaccgcaaagaatatgcatcctgagacacgtgcagtgggtagtgaaacatcatcactgcaagcttctcaggatgaatttgaaaacctggttcgtaatgtcgacgtaaaatcgcgaattatggatcagtatgctgactggaaaggcgtacgttatcgtctgggcggcagcactaaaaaaggtatcgattgttctggtttcgtacagcgtacattccgtgagcaatttggcttagaacttccgcgttcgacttacgaacagcaggaaatgggtaaatctgtttcccgcagtaatttgcgtacgggtgatttagttctgttccgtgccggttcaacgggacgccatgtcggtatttatatcggcaacaatcagtttgtccatgcttccaccagcagtggtgttattatttccagcatgaatgaaccgtactggaagaagcgttacaacgaagcacgccgagttctcagccgcagctaa

SEQ ID NO: 459205 - DNA, 1557 bp, Shigella boydii
atgttcatacgcgctcccaattctggacgtaagctcctgcttacctgcattgtagcgggcgtgatgattgcgatactggttagctgccttcagtttttagtggcctggcataagcacgaagtcaaatacgacacactgattatcgacgtacaaaagtatctcgatacctattttgccgacctgaaatccactactgaccggcttcagccgctgaccttagatacctgccagcaggctaaccccgaactgaccgctcgcgcggcgtttagcatgaatgtccgtacgtttgtgctggtgaaagataaaaaaacattctgttcatctgcgactggtgagatggacattccactcaatgaattgattccggcactcgacattaataaaaacgtcgatatggcgatcttacccggcacgccgatggtgccgaacaaacccgcaatcgtcatctggtatcgcaaccctttgctgaaaaatagcggtgtgtttgccgctctgaatctcaacctgacgccttctctcttttatagttcacggcaggaagattacgatggcgtcgccctcattattggcaatactgcgctatctaccttttcttcacgtttgatgaacgttaatgaattaaccgacatgccggtccgtgaaactaaaattgcgggcattcctctgaccgttcggctttatgcggatgactggacatggaacgatgtgtggtacgcatttttactgggcggcatgagtggaactgtcgttggcctgctctgctattacctgatgagcgtacgtatgcgccccggcagagaaatcatgaccgccatcaagcgcgaacaattttacgtggcgtatcaaccggtggtggatacacaagctttgcgagtaacgggcctggaagtactgctacgctggcggcatcctgtcgcgggagaaattcccccggatgccttcattaactttgccgaatcgcaaaagatgattgtgccgctgactcagcacctgtttgagttaattgcccgcgatgccgcagaattagaaaaagtgctgccagtaggcgtcaaatttggtattaacattgcgccggaccatctgcacagcgaaagctttaaagcagatatccagaaactgctcacttccctgcccgcacaccatttccagattgtgctggaaattaccgagcgcgatatgctgaaagagcaagaagccacacaactcttcgcctggctgcactcggtcggcgtagaaattgctattgatgacttcggcaccgggcacagcgcgcttatctatcttgagcgttttacgctcgattatctgaaaattgaccgtggatttatcaacgccatcggtacggaaacgatcacttcacccgtacttgacgcggtgctgacgctggcgaaacgcctcaatatgctgacggttgctgaaggggtcgaaacgccggaacaggcgcgatggctaagcgaacgcggcgttaatttcatgcaaggctactggattagtcgcccgttaccgctggacgattttgttcgctggctgaagaaaccgtatacgccgcagtggtaa

SEQ ID NO: 459206 - DNA, 1815 bp, Shigella boydii
atgattgtgcgcatactgctgctgtttatcgccctgttcaccttcggtgcgcaggcgcaggctatcaaggaaagctatgcctttgccgtgctgggcgaaccccggtacgcatttaatttcaaccattttgattatgtgaaccccgccgcgccaaaaggtgggcagataacgttgtcagccctcggtaccttcgataatttcaaccgctatgcactgcgcggcaacccgggcgcacgcaccgagcagttgtacgacacgctatttacgacttccgatgacgaaccaggcagttattacccgctgattgctgaaagtgcacgctatgctgacgattattcctgggtggaggtcgctattaatccgcgcgcccgttttcatgatggttcgcccattactgcccgcgatgtagagtttacttttcaaaaatttatgaccgaaggcgtgccgcaatttcgtctggtctacaaaggcaccaccgtcaaagccattgcaccgttaaccgtgcgcattgagttagctaaacccggcaaagaagatatgctgagtctgttttcgctgccggtatttccagaaaagtactggaaggatcacaaacttagcgacccgctcgccacgcctccgcttgccagtggtccgtaccgcgttacgtcctggaaaatggggcaaaatattgtctattcccgtgtgaaagattactgggcagcaaacttaccggtaaaccgtggacgctggaatttcgacaccattcgctacgattattacctcgatgataatgtcgcctttgaagcgtttaaagcaggtgcctttgatttgcgtatggaaaacgacgctaaaaactgggccacgcgttataccggtaaaaatttcgataaaaaatacatcatcaaagatgagcaaaagaacgaatcagcccaggatacgcgctggctggcgtttaatatccaacgtccggtattcagcgatcgccgggtccgggaagcaatcactctcgcctttgactttgaatggatgaacaaggcgttgttttacaacgcctggagtcgcacaaacagttattttcagaataccgaatacgcggccagaaattaccccgacgccgcggagctggtgcttctggcaccaatgaaaaaagatctaccgccagaagtcttcacacaaatctaccagccgccggtatctaaaggcgatggctacgatcgtgacaacctgttaaaagccgacacacttctcaacgaagcgggctgggtgctgaagggtcagcaacgcgttaatgccacaacgggtcagccactcagctttgaattattgcttcccgcaagcagcaatagtcagtgggtattgccgttccagcacagcctgcaacggctgggtatcaacatggacattcgcaaggtggataactcgcaaatcaccaaccgcatgcgcagtcgcgactatgacatgatgccgcgcctatggcgggcgatgccgtggcccagttccgatttacagatttcctggtcatcggaatatatcaattccacttataatgcccccggcgtgcaaagcccggttatcgactcactgatcaaccaaattattgccgcgcagggaaataaagaaaaattattgccgttggggcgagcactggatcgcgtattaacgtggaattattacatgctgccaatgtggtacatggcggaagaccgtctcgcctggtgggataaattctcccaacccgctgtacgccctgtttacagactgggtatcgatacctggtggtatgacgttaataaagcggccaaactgccgtcagccaggcaacagggagagtag

SEQ ID NO: 459207 - DNA, 1095 bp, Shigella boydii
atgggcgcttacctgattcgccgtctgttgctggtgatcccaacattatgggcgattatcaccatcaactttttcatcgtgcaaattgcgcctggcggtccggtcgaccaggccatcgccgccattgagtttggtaatgccggagtattacccggcgcaggcggtgaaggtgttcgtgccagccatgcgcaaacgggtgtcggcaatatcagcgacagtaattaccgtggcggacgcggattagatccagaagtgatcgctgagatcactcatcgctacggttttgataagccgatccacgaacgttacttcaaaatgctctgggactacatccgctttgattttggtgatagcctgtttcgcagcgcctcggtgctgacgctgattaaagacagtctgccggtttccatcaccctcggattgtggagcacgctgattatctatctggtgtcgattccgttaggcattcgcaaagctgttcataatgggagccgctttgacgtctggagtagcgcatttatcattatcggctacgccattccggcctttttgtttgccatcctgctgattgtcttcttcgcgggcggcagctatttcgacctgttccctctacgcggcctggtttccgctaactttgattcgctgccgtggtatcagaaaatcaccgattatctgtggcatatcacgctgccggtgctggcgacggtgattggtggctttgcggcgctgaccatactgacaaaaaactcattccttgatgaagtgcgcaagcaatacgtggtgaccgcgcgtgcgaaaggggtaagtgaaaaaaatattctctggaaacatgtgttccgcaacgccatgctgctggtgattgccggttttccggcgacgtttatcagcatgttttttaccggctcgctgctgattgaggtgatgttttcactcaatggtctgggcttactgggctacgaagcgaccgtctcgcgcgattatcctgtaatgtttggtaccttgtatattttcaccctgattggcctgctgctgaatattgtcagtgatatcagctatacgctggttgatccgcgtattgattttgagggacgttaa

SEQ ID NO: 459208 - DNA, 1026 bp, Shigella boydii
atgtcgcgactcagccccgtcaatcaggcccgttgggcgcgttttcgtcataaccgtcgcggctactggtcgttatggattttcctcgtcttgtttggtttgagtttgtgttctgagcttatcgccaacgataaaccgttgctggtacgttatgacggcagttggtatttcccgttgttgaaaaactacagcgaaagcgattttggcggcccgctggcaagtcaggctgattatcaggacccgtggctgaaacaacggctggaaaataacggctgggtactgtgggcaccgattcgctttggtgctaccagtatcaactttgctaccgataagcccttcccttctccaccctcccggcaaaactggctgggaacggatgccaacggcggcgatgtgctggcacgcattctctatggcacgcggatctcggttctgtttggcctgatgctgactctctgttccagcgtgatgggcgtgctggcgggggcgctacaaggctattacggcggtaaagtcgatctctggggacaacgctttattgaagtatggtcggggatgccgacgctgtttttgattattttactttccagcgtcgtacagcctaacttctggtggctgctggcaattactgtcttgtttggctggatgagtctggtcggcgtggtgcgggcggagtttttacgtactcgtaatttcgactacattcgtgcggcgcaggcgcttggcgtcagcgatcgcagtatcatcctgcgtcatatgttgcctaatgccatggtcgcgaccctcacctttttaccgtttattttatgtagttcgatcaccaccctgacctcactcgatttcctcggcttcggtctgcagctcggttcaccgtcactcggtgaactgctgttacaagggaaaaataaccttcaggctccgtggcttgggatcaccgccttcttgtcggtggcgatattattgtctttgctgatctttattggtgaagccgtccgcgacgcatttgatcctaataaggcggtgtag

SEQ ID NO: 459209 - DNA, 1590 bp, Shigella boydii
atgacgcaaactctgttagcgattgaagatttgtcggtgggttttcgccatcagcaaaccgtacgtacagtagtcaatgatgtttcactacagattgaggctggcgaaacgctggcgctggtgggtgagtcaggttcaggcaaaagcgttaccgcgctgtcaattttacgcctgctcccttccccgccggttgaatatctctccggcgatattcgttttcgtggcgaatcgctgcttcatgccagcgatcaaacgttgcgcggtgtacgcggtaataagatcgccatgatttttcaagagccgatggtgtcgttaaatccattgcataccctggaaaaacagctttatgaagtgctttcactccaccgcgggatgcgtcgggaagcggctcgaggcgaaattcttaactgccttgatcgcgttggtatccgccaggcggcaaaacggctgacagattatccgcatcagctctccggcggcgaacgccagcgggtgatgattgcgatggcgctgttaacgcgaccggaattattaattgccgatgaaccgaccaccgcactggacgtctctgtccaggcgcagattttacagctgttgcgcgaactgcaaggcgagctgaatatgggcatgctgtttattactcataacctcagcattgtcagaaaactggcccaccgcgtggcggtaatgcaaaacggtcgctgtgtcgagcaaaattacgccgctacgctatttgcctcacccactcatccttacacacaaaagctactcaacagtgaaccgtcaggcgatccagtgccgttgccagaacctgcctcaacgttgctggatgttgaacagcttcaggttgccttccccattcgcaaagggattttgaagcgcattgtggatcataatgtggtggtgaaaaacatcagttttacgctacgagcgggtgaaacactgggtttagtgggcgagtccggttccgggaaaagtacgacgggactggcgctgctgcgactgattaattctcagggcagcatcatctttgacggtcagccactgcaaaatttaaatcgccgccagctgttacctattcgtcatcgcattcaggtggtatttcaggatccaaactcctcgctcaacccacgactcaacgttttgcagattattgaggaaggcttacgggttcaccagccgacgctttctgccgcacaacgcgaacaacaagtgatagccgtgatgcatgaagtgggattagatcctgaaacacgccaccgttatccggcggagttctctggtggtcagcgacaacgtattgcaattgccagggcattaattcttaagccctcgctgatcatacttgatgaaccgacatcatcactcgacaaaacggtacaggcgcaaatattgacgctattgaaatcattgcaacaaaagcagcaactggcctatttgtttatcagccacgatttgcacgttgtccgcgcgttatgtcatcaggttatcgtactgcgacaaggggaagtagtggaacaaggaccgtgcgcgcgcgtgtttgccgcaccgcagcaggagtatacgcgtcagctactggcgttgagctga

SEQ ID NO: 459210 - DNA, 345 bp, Shigella boydii
gtgacttcattacaactctcaatcgtccatcgtctaccgcagaactttcgctggtctgctggtttcgcaggttcgaaggttgaaccgattccgcaaaatggaccgtgcggtgacaacagcctggtggcgcttaaattgcttagcccggatggtgataatgcatggtcggtgatgtacaaactaagccaggcgttaagcgacatcgaagttccgtgttcggtgctggagtgtgaaggtgagccgtgcctgtttgtaaatcgccaggacgagtttgctgcaacatgccgattgaaaaattttggtgtggcaattgccgaacccttttcaaactacaatcctttttaa

SEQ ID NO: 459211 - DNA, 774 bp, Shigella boydii
atgctggtgacgaccattgcaccgctgatggcaccgatagttggcggctgggtgctggtgtggctgagctggcattacatcttctggatcctcgccgtggcggcgattctggcttcggcaatgatcttctttctgatcaaagaaaccttaccaccggagcgtcgccagccttttcacattcgtactactattggtaactttgcggcgctgttccgtcataagcgtgtcctgagttatatgctggccagcggtttcagctttgccggaatgttctcgttcctgagcgccggaccgtttgtctacattgaaattaaccacgtcgcgccggaaaactttggttattactttgcactaaacattgttttcctgttcgtgatgaccatctttaacagccgcttcgttcgccgcattggcgcgttaaatatgttccgctcggggttgtggatacaatttattatggcagcgtggatggtcatcagtgcgctgctggggctgggattctggtcgctggtggttggcgttgcggcgtttgtgggctgtgtgtcgatggtgtcatccaatgcgatggcggtcattcttgatgagtttccccatatggcgggaacggcatcttcgctggcaggaaccttccgttttggcataggggcaattgttggcgcattgctttctcttgcgacctttaactctgcatggccgatgatttggtcaattgcattctgcgcaagcagctccattctcttctgtctgtacgccagtcgaccgaaaaaacggtga

SEQ ID NO: 459212 - DNA, 696 bp, Shigella boydii
atgcgacttgataaatttatcgcacagcaactcggcgttagccgtgctattgccgggcgtgaaatccgcggcaatcgtgtcaccgtcgatggcgaaattgttcgtaatgcagcgttcaaactgcttcctgaacatgatgtcgcttacgatggcaacccgctggcgcagcaacatggtccacgttacttcatgctcaataagcctcagggctatgtttgctccacggacgaccctgatcacccaacggtgctctattttctggatgaaccggtagcctggaaactgcacgccgcaggacgtctggatatcgataccaccggtctggtgctgatgactgatgatggtcagtggtcgcaccgcattacttctccgcgccatcattgcgagaagacctatctggtgacactggaatcacctgtagctgacgatacggcagagcaatttgctaaaggcgtgcagctgcataacgaaaaagatctcactaagcctgcggtgctggaagtgattaccccaacgcaggttcgtctgaccatctgcgaagggcgttatcatcaggtgaaacgcatgttcgccgccgtgggtaaccacgtggttgagctgcatcgtgaacgtattggcggtattacgctggatgctgatttagcccccggtgaatatcgtccgttaactgaagaagaaattgccagcgtcgtctaa

SEQ ID NO: 459213 - DNA, 1761 bp, Shigella boydii
atgatttttacactccgcccatatcagcaagaagccgtggatgccacgctcaaccattttcgtcgtcataaaacccctgccgttatcgtgctgcccaccggcgcaggtaaaagcctggtgattgccgaactggcacggctggcgcgtggtcgtgttctggtgctggcacacgtcaaagaactggtggcgcaaaaccatgcaaagtatcaggcgctggggctggaagccgatatttttgccgctgggttaaagcgcaaagagagccacggtaaagtggtatttggcagcgtgcagtcggtcgctcgtaatcttgatgcctttcagggtgaattttcgctgttgattgtcgatgaatgccaccgtattggtgacgatgaagagagccagtatcagcaaatcctcactcacctgactaaagtgaatccccacttacgcctgctggggctgactgccacgccttttcgattgggcaaaggctggatctaccagttccattatcacggcatggtacgcggcgatgagaaagcccttttccgtgactgcatttatgagctgccgctgcgttatatgattaaacacggctatctgacgccgccagaacgactggatatgccagtagtgcaatacgatttcagccgcttgcaggcacagagtaacgggctgttcagcgaagctgatctcaaccgtgagctgaaaaaacagcaacgcattacgccacatatcatcagccagatcatggagttcgccgaaaagcgcaaaggggtaatgattttcgccgccaccgttgaacacgcaaaagagattgtgggattactgcctgccgaagatgcagcactgattactggcgacacccccggcgctgagcgcgatgtgttaattgaagattttaaagcccagcgttttcgctatctggtcaacgtcgcggtactgaccaccggatttgacgccccgcacgtcgatcttatcgccattctgcgtcctaccgaatcagtgagtctttaccaacaaattgtcgggcgcggtctgcgtctcgctcctggcaagactgattgcttaattcttgattatgcgggtaatcctcacgacctctacgcgccggaagttggtacaccgaaaggcaaaagtgacaacgtcccggtacaggttttctgccctgcctgcggttttgccaacaccttttgggggaaaacgaccgccgacgggacattgattgaacactttggtcgtcgctgtcagggatggtttgaagatgacgacggccatcgcgaacagtgtgacttccgtttccgttttaaaaattgcccgcaatgtaacgcggaaaacgatattgccgcccgccgctgccgcgaatgtgacacggtactggttgatccggatgatatgttaaaagcggcgctacgactgaaagacgcgctggtattacgctgtagcggcatgtctttacagcatgggcacgacgagaaaggcgaatggttgaaaatcacctattacgatgaagacggcgcggatgtgagtgagcgtttccgtctgcaaacgcccgcccagcgaactgccttcgagcagctttttatccgcccgcatacgcgcacaccgggcatccctctgcgctggatcaccgccgccgatatcctcgcccagcaagccttactgcgacatccggattttgtcgtcgcccgcatgaaaggtcagtactggcaggtgcgtgaaaaagtgttcgattacgaaggtcgttttcgtcgggcgcacgaattacgcggttaa

SEQ ID NO: 459214 - DNA, 285 bp, Shigella boydii
atgtttactatcaacgcagaagtacgtaaagagcagggtaagggtgcgagccgccgcctgcgtgccgctaacaagttcccggcaatcatctacggtggcaaagaagcaccgctggctatcgagctggatcacgacaaagtcataaacatgcaagctaaagctgaattctacagcgaagttctgaccatcgttgttgacggtaaagaaatcaaagttaaagctcaggacgtacagcgtcacccgtacaaaccgaagctgcagcacatcgacttcgttcgcgcttaa

SEQ ID NO: 459215 - DNA, 1008 bp, Shigella boydii
atgagtctggatatcaaccagattgctctgcaccagcttatcaagcgtgatgagcagaaccttgagctggtgttgcgcgattcattgctggaaccgacagaaaccgtcgttgagatggtggcagaactgcatcgggtctatagcgccaaaaataaagcttacggcttgtttagcgaagagagtgaactggcgcagacgctgcgcttacagcgtcagggcgaagaggactttctggcatttagccgcgcggcaaccgggcgcctgcgtgacgaattagcgaaatatccttttgctgacggtggattcgtgctgttttgccactaccgttatctggcggtggagtatctgctggtggcagttctgagcaacctgagcagtatgcgcgttaacgaaaatctcgacatcaacccaacccattatcttgatatcaatcatgcggatattgttgcgcgtatcgatttaaccgaatgggaaaccaatccagagtccacccgctatctcactttcctgaaagggcgagtagggcgcaaagtggcggatttctttatggatttcctcggggccagcgaaggattgaacgcgaaagcgcaaaaccgtgggctgttgcaagcggttgatgatttcactgccgaagcacaactggataaagcagagcgacagaacgtgcgccagcaggtttatagctactgtaatgagcagctgcaggcaggcgaagagatcgaactggaatcgctgtcgaaagagctggcaggcgtaagcgaagtgagcttcacgaagtttgcggctgaaaaaggctacgaactggaagagagcttcccggcagaccgtagcacactgcgtcagttgacgaagtttgccggtagcggcggtggcttgactattaactttgatgcgatgctgttaggtgaacgcatcttctgggatccagcaaccgatactttgaccattaaaggcacgccgccgaatttgcgcgaccaattgcagcgccggacgtctggcggcaattaa

SEQ ID NO: 459216 - DNA, 228 bp, Shigella boydii; identical to SEQ ID NO: 27937

SEQ ID NO: 459217 - DNA, 1761 bp, Shigella boydii
atggtaactcatcgtcagcgctaccgtgaaaaagtctcccagatggtcagttgggggcactggtttgcactgttcaatattctgctttcgctcgtcattggcagccgttacctgtttatcgccgactggccgacaacgcttgctggtcgcatttattcctacgtaagcattatcggccatttcagcttcctggtgttcgccacctacttgctgatcctcttcccgctgacctttatcgtcggctcccagaggctgatgaggtttttgtccgtcattctggcaacggcgggaatgacgctattactgatcgatagcgaagtctttactcgtttccatctccatcttaatcccatcgtctggcagttggttatcaacccagacgaaaatgagatggcgcgcgactggcagctgatgttcatcagcgtgccggttattttattgcttgaactggtgtttgcgacgtggagctggcaaaagctgcgcagcctgacgcgtcgtcgacgcttcgcgcgcccgctggccgcattcttatttatcgcctttatcgcctcgcatgtggtgtatatctgggccgatgccaacttctatcgcccgatcaccatgcagcgcgctaacctgccgctttcgtacccgatgacggcgcgacgtttccttgagaagcatggcctgcttgatgcgcaggagtatcaacgccgtcttattgagcaaggtaatccagacgccgtttccgtacagtatccgttaagcgaactgcgctatcgcgatatgggcaccgggcagaatgtgctgttgattactgtcgatggcctgaactactcacgcttcgagaagcagatgcctgcgctggcaggttttgctgagcaaaatatttcgttcacgcgccatatgagctccggcaacactacagacaacggcatctttggcctgttctatggcatctcgccgagctatatggacggcattctgtcgacccgtacccctgcggcgttaattactgcgcttaatcagcaaggctatcagctgggattattctcgtcagatggctttaccagtccgctgtatcgccaggcattgttgtcagatttctcgatgccgagcgtacgcacccaatccgacgagcagaccgccacgcagtggatcaactggctgggccgctacgcacaagaagataaccgctggttctcgtgggtctctttcaatggcactaacattgacgacagcaatcagcaggcatttgcacggaaatatagccgggcggcaggcaatgtcgatgaccagatcaaccgcgtgctcaatgcactgcttgattctggcaaactggacaatacggttgtgattatcactgccggtcggggtattccgctgagcgaagacgaagaaacctttgactggtcccacggtcatctgcaggtgccattagtgattcactggccaggcacgccggcgcagcgtattaatgcgctgactgatcataccgatctgatgacgacgctgatgcaacgcctgctacatgtcagcacacctgccagcgaatattcgcaaggtcaggatttgttcaaccctcaacgccgtcattactgggtcactgcagcggataacgatacgctggcaattaccaccccgaaaaagacgctggtgctgaacaataacggtaaataccgcacttacaacttacgtggtgaaagagtgaaagatgaaaaaccacagttaagtttgttattgcaagtgctgacagacgagaagcgttttatcgctaactga

SEQ ID NO: 459218 - DNA, 1242 bp, Shigella boydii
atggcaagaaaggcaaccccactcaccaccacacagatcaaagcagctaaaccagcagaaaaagaatacaccttacaggatggcggcgggctttttctcgttattaagccgtctggttcgaaactatggcgattcaactactatcgaccttcgaacaaaaaacgaacactcattagtttgggatcgcttgatgaagtctcccttgctgatgccagaaaacgccgtagcgagtacaggacgttaattgcggcaggaaccgacccgcaggaatacgaacggcaaaaacgcgaagcagaggctcgacgacagggcaacacgttcgaaaatgtggccgcattgtggtacgaaatgaaaaaaaaccagaatctcgcccacaatacgatcaaggacatctggcgctcgctagagaaatatgtattcccgtatatcggaaacacaccgatagatactctcaccgctcgccgctttgttgagatactcacgcccatcaaggcacgtggcaacctggaaacactgaaacgcgttttacagcgcatcaatgaagtgatggattttgctgccaacagtggaatgattgacatcaacaccgccgcgaacgttcgcaagacattcccttctcccaccaaaaagcacatgccaaccatccggccggaacaactaccacagctaatgcacgatttatcgatcgccagcatagaacggcaaaccagattactgattgagtggcagttgttaaccgcaacccgcccagccgaagcctctgccgcacggtgggaagaaatcaaccttgaggcggcaacctggacgataccagccggacgcatgaagatgcgccgtgatcatgtgatccccctttgcgctcaggcgatggcagtgcttgaagccatgaagccgattagcgcacgaagggagcatgttttcccaagtcttaaaaatccagtgcaaccaatgagcagccagacagcaaacgcagcattacggcgaatgggttacactggtgtgctggtatctcacggactacgcgccatattcagcacagcggcgaacgaagaaggatttgagccggacgtaatcgaggccgcactcgcacacgtggacacgaacgaagttagacgggcatacaaccgaagcaactacctggaaaaacgtaaagtgttaatgtgctggtggggtgattttgtggaagcagccgcaaccggaacaaccatcgccagcgggcacagaggattacgcggaaggtaa

SEQ ID NO: 459219 - DNA, 1269 bp, Shigella boydii
ttggccttgctggtcgttatcctgcaagctatcactttattggctacggtgattggtagccgttctggtggttgtgatgatggtatgaaaaaagtcattttatctttggctctgggcacgtttggtttggggatggccgaatttggcattatgggcgtgctcacggagctggcgcataacgtaggaatttcgattcttgctgccgggcatatgatctcgtattatgcactgggggtggtggtcggtgcgccaatcatcgcactcttttccagccgctactcactcaaacatatcttgttgtttctggtggcgttgtgcgtcattggcaacgccatgttcacgctctcttcgtcttacctgatgctcgccattggtcggctggtatccggctttccgtatggcgcattttttggcgtcggcgcgatcgtgttatcaaaaattatcaaacccggaaaagtcaccgccgccgtggcggggatggtttccgggatgacagtcgccaatttgctgggcattccgctgggaacgtatttaagtcaggaatttagctggcgttacacctttttattgatcgctgtttttaatattgcggtgatggcatcggtctatttttgggtgccggatattcgcgacgaggcgaaaggaaagctgcgcgaacaatttcactttttgcgcagcccggccccgtggttaattttcgccgccaccatgtttggcaacgcaggtgtgtttgcctggttcagctacgtaaagccatacatgatgtttatttccggtttttcggaaacggcgatgacctttattatgatgttagttgggctagggatggtgctgggaaatatgctaagtggcaggatttcaggacgttattcaccactgcgcattgcagcagtgactgactttataattgtactggcactgctgatgctctttttctgcggcggcatgaaaacaacgtcgcttatttttgcttttatttgttgcgcgggattatttgccctttcagcaccgctacaaatattgttactacaaaacgccaaaggcggagagttattaggtgccgcaggtgggcaaatagcgtttaacctcggtagcgccgtcggcgcatattgcggtggtatgatgctgacgctggggctggcatataattacgtggcgctgcctgccgccctgctttcgtttgctgcgatgtcgtcgttgctgctgtatggtcgctataagcgccagcaagcggcggatactccggtgctggcgaaaccactggggtag

SEQ ID NO: 459220 - DNA, 3144 bp, Shigella boydii
atgaaaattctcagcctgcgcctgaaaaacctgaactcattaaaaggcgaatggaagattgatttcacccgcgagccgttcgccagcaacgggctgtttgccattaccggcccaaccggtgcggggaaaaccaccctgctggacgccatttgtctggcgctgtatcacgaaactccgcgtctctctaacgtttcacaatcgcaaaatgatctcatgacccgcgataccgccgaatgtctggcggaggtggagtttgaagtgaaaggtgaagcgtaccgtgcattctggagccagaatcgggcgcgtaaccaacccgacggtaatttgcaggtgccacgcgtagagctggcgcgctgcgccgacggcaaaattctcgccgacaaagtgaaagataagctggaactgacagcgacgttaaccgggctggattacgggcgcttcacccgttcgatgctgctttcgcaggggcaatttgctgccttcctgaatgccaaacccaaagaacgcgcggaattgctcgaggagttaaccggcactgaaatctacgggcaaatctcggcgatggtttttgagcagcacaaatcggcccgcacagagctggagaagctgcaagcgcaggccagcggcgtcgcgttgctcacgccggaacaagtgcaatcgctgacagcgagtttgcaggtacttactgacgaagaaaaacagttacttaccgcgcagcagcaagaacaacaatcactaaactggttaacgcgtctggacgaattgcagcaagaagccagccgccgtcagcaggccttgcaacaggcgttagccgaagaagaaaaagcgcaacctcaactggcggcgctcagtctggcacaaccggcacgaaatcttcgtccgcactgggaacgcatcgcagaacacagcgcggcgctggcgcatactcgccagcagattgaagaagtaaatactcgcttacagagcacaatggcgcttcgcgcgagcattcgccaccacgcggcgaagcagtcagcagaattacagcagcagcaacaaagcctgaatacctggttacaggaacacgaccgcttccgtcagtggaacaacgaactggcgggttggcgtgcgcagttctcccaacaaaccagcgatcgcgagcatctgcggcaatggcagcaacagttaacccatgctgagcaaaaacttaatgcgcttgcggcgatcacgttgacgttaaccgccgatgaagttgctaccgccctggcgcaacatgctgagcaacgcccactgcgtcagcgcctggtcgcgctgcatgggcagattgttccccaacaaaaacgtctggcgcagttaatggtcactatccagaatggatctctggaacagacgcaacgtaatgtcgcacttaacgaaatgcgccagcgttataaagaaaagacgcagcaacttgccgatgtgaaaaccatttgcgagcaggaagcgcgcatcaaaacgctggaagcccagcgtgcacagttacaggcgggtcagccttgtccactttgtggttccaccagccacccggcggtcgaggcgtatcaggcgctggagcctggtgttaatcagtctcgattactggcgctggaaaacgaagttaaaaagctcggcgaagaaggtgcggcgctgcgcgggcaactggatgcattaacgaagcagcttcagcgcgatgaaaacgaagcgcaaagcctccgacaagatgagcaagcacttactcaacaatggcaagccgtcacggccagcctcaatatcaccttgcagccacaggacgatattcaaccgtggctggatgcacaagatgagcacgaacgccagctgcggttactcagccaacgacatgaattacaagggcagattgccgcgcataatcagcaaattatccagtatcaacagcaaattgaacaacgccagcagcagctcttaacggcattggcgggttatgcactgacattgccacaggaagatgaagaagagagctggttggcgacacgtcagcaagaagcgcagagctggcagcaacgccagaacgaattaaccgcgctgcaaaaccgtattcagcagctgacgccgattctggaaacgttgccgcaaagtgatgatctcccgcacagcgaagaaactgtggcgctggataactggcggcaggttcatgaacaatgtctcgcattacacagccagcagcagacgttacagcaacaggatgttctggcggcgcaaagtctgcaaaaagcccaggcgcagtttgacaccgcgctacaggccagcgtctttgacgatcagcaggcgttccttgcggcgctaatggatgaacaaacactaacgcagctggaacagctcaagcagaatctggaaaaccagcgcagtcaggcgcaaacgctggtcactcagacagcagaaacgctggcacagcatcaacaacaccgacctgacgggttggctctcactgtgacggtggagcagattcagcaagagttagcgcaaactcaccaaaagttgcgtgaaaacaccacgagtcaaggcgagattcgccagcagctgaagcaggatgcagataaccgtcagcaacaacaaaccttaatgcagcaaattgctcaaatgacgcagcaggttgaggactggggatatctgaattcgctaataggttccaaagagggcgataaattccgcaagtttgcccaggggctgacgctggataatttagtccatctcgctaatcagcaacttacccggctgcacgggcgctatctgttacagcgcaaagccagcgaggtgctggaagtcgaggttgttgatacctggcaggcagatgcggtacgcgatacccgtaccctttccggcggcgaaagtttcctcgttagtctggcgctggcgctggcgctttcggatctggtcagccataaaacacgtattgactcgctgttccttgatgaaggttttggcacgctggatagcgaaacgctggataccgcccttgatgcgctggatgccctgaacgccagtggcaaaaccatcggtgtgattagccacgtagaagcgatgaaagagcgtattccggtgcagatcaaagtgaaaaagatcaacggcctgggctacagcaaactggaaagtacgtttgcagtgaaataa

SEQ ID NO: 459221 - DNA, 1203 bp, Shigella boydii
atgcgcatccttcacacctcagactggcatctcggccagaacttctacagtaaaagccgcgaagctgaacatcaggcttttcttgactggctgctggagacagcacaaacccatcaggtggatgcgattattgttgctggtgatgttttcgataccggctcgccgcccagttacgcccgcacgttatacaaccgttttgttgtcaatttacagcaaactggctgtcatctggtggtactggcaggaaaccatgactcggtcgccacgctgaatgaatcgcgcgatatcatggcgttcctcaatacaaccgtggtcgccagcgccggacatgcgccgcaaatcttgcctcgtcgcgacgggacgccaggcgcagtgctgtgctccattccgtttttacgcccgcgtgacattatttccagccaggcggggcttaacggtattgaaaaacagcagcatttactggcagcgattaccgattattaccaacaacactatgccgatgcctgcaaactgcgcggcgatcagcctctgcccatcatcgccacgggacatttaacgaccgtgggtgccagtaaaagtgacgccgtgcgtgacatttatattggcacgctggacgcgtttccggcacaaaactttccaccagccgactacatagcgctcgggcatattcaccgcgcacagattattggcggcatggaacatgttcgctattgcggttcccccattccactgagttttgatgaatgcggtaagagtaaatatgtccatctggtgacattttcaaacggcaaattagagagcgtggaaaacctgaacgtaccggtaactcaacccatggcggtgctgaaaggcgatctggcgtcgattaccgcacagctggaacagtggcgcgatgtatcgcaggagccacctgtctggctggatatcgaaatcactactgatgagtatctgcatgatattcagcgcaaaatccaggcattaaccgaatcattgcctgtcgaagtattgctggtacgtcggagtcatgaacagcgcgagcgtgtgttagccagccaacagcgtgaaaccctcagcgaactcagcgtcgaagaggtgttcaatcgccgtctggcactggaagaactggatgaatcgcagcagcaacgtctgcagcatcttttcaccacgacgttgcataccctcgccggagaacacgaagcatga

SEQ ID NO: 459222 - DNA, 690 bp, Shigella boydii; identical to SEQ ID NO: 40999

SEQ ID NO: 459223 - DNA, 1296 bp, Shigella boydii
gtgctggaatggctgtcgtggaaaaggctggtgctggagctgctactttgctgcctcccggctttcatcctgggtgcattttttggttacctgccctggtttttgctggcatcggtaacaggactgcttatctggcatttctggaatttattgcgcctttcatggtggttgtgggtggatcgcagtatgaccccgccaccggggcgtggtagctgggaaccgctactatacggcttacaccagatgcagctgcgaaataaaaaacgccgccgtgaactgggcaatctgattaaacgctttcgtagcggcgcggagtcgctgcccgacgcggtggtgctgaccacggaagagggcggtattttctggtgtaacggtctggcgcaacaaattcttggtttgcgctggccggaagataacgggcagaacatccttaacctactgcgttacccggagtttacgcaatatctgaaaacgcgtgatttttctcgcccgctcaatctggtgctcaacaccgggcggcatctggaaattcgcgtcatgccttatacccacaaacagttgctgatggtggcgcgtgatgtcacgcaaatgcatcaactggaaggggcgcggcgtaacttttttgccaacgtgagccatgagttacgtacgccattgaccgtgttacagggttacctggagatgatggatgagcagccgctggaaggcgcggtacgcgaaaaagcgttgcacaccatgcgcgagcagacccagcggatggaagggctggtgaagcagttgctaacgctgtcgaaaattgaagccgcgccgacgcaattgctcaatgaaaaggttgatgtgccgatgatgctgcgcgttgttgagcgcgaggctcagactctgagtcagaaaaaacagacatttacctttgagatagataacggcctcaaagtgtctggcaacgaagatcagctacgcagtgcgatttcgaacctggtctataacgccgtgaatcatactccagaaggcacgcatatcaccgtacgctggcagcgagtgccgcacggtgccgaatttagcgttgaagataacggaccgggcattgcaccggagcatattccgcgcctgaccgagcgtttttatcgcgttgataaagcgcgttcccggcaaaccggcggtagcggattagggttagcgatcgtgaaacatgctgtgaatcatcacgaaagtcgcctgaatattgagagtacagtaggaaaaggaacacgtttcagttttgttatcccggaacgtttaattgccaaaaacagcgattaa

SEQ ID NO: 459224 - DNA, 1320 bp, Shigella boydii
atgacccatcaattaagatcgcgcgatatcatcgctctgggctttatgacatttgcgttgttcgtcggcgcaggtaacattattttccctccaatggtcggcttgcaggcaggcgaacacgtctggactgcggcattcggcttcctcattactgccgttggcctgccggtattaacggtagtggcgctggcaaaagttggcggcggtgttgacagcctcagcacgccaatcggtaaagtcgctggcgtgctgctggcaacggtttgttacttggcggtggggccgcttttcgctacgccgcgtacagctaccgtttcctttgaagtggggattgcgccgctgacgggtgattccgcgctgccgctgtttatctacagcctggtctatttcgctatcgttattctggtttcgctctatccgggcaagctgctggataccgtgggcaacttccttgcgccgctgaaaattatcgcgctggtcatcctgtctgttgccgctattgtctggccggcgggttctatcagcacggcgactgaggcttatcaaaacgctgcgttttctaacggcttcgttaacggctatctgaccatggatacgctgggcgcaatggtgtttggtatcgttattgttaacgcggcgcgttctcgtggcgttaccgaagcgcgtctgctgacccgttataccgtctgggctggcctgatggcgggtgttggtctgactctgctgtacctggcgctgttccgtctgggttcagacagcgcgtcgctggtcgatcagtctgcaaacggcgctgctattctgcatgcttacgttcagcacacatttggcggcggcggtagcttcctgctggcggcgttaatcttcatcgcctgcctggtaacggcagttggcctgacctgtgcttgtgcagaattctttgcccagtacgtaccgctctcttatcgtacgctggtgtttatcctcggcggcttctcgatggtggtgtctaacctcggcttaagccagctgatccagatctccgtaccggtgctgaccgctatttatccgccgtgtatcgcactggttgtattaagttttacacgctcatggtggcataattcgtcccgcgtgattgccccgccgatgtttatcagcctgctttttggtattctcgacgggatcaaagcatctgcattcagcgatatcttaccgtcctgggcgcagcgtttaccgctggccgaacaaggcctggcgtggttaatgccaacagtggtgatggtggttctggccattatctgggatcgcgcggcaggtcgtcaggtgacctccagcgctcactaa

SEQ ID NO: 459225 - DNA, 1374 bp, Shigella boydii
atggaaagtaagaacaagctaaagcgtgggctaagtacccgccacatacgctttatggcactgggttcagcaattggcaccgggctgttttacggttcggcagacgccatcaaaatggccggtccgagcgtgttgttggcctatattatcggtggtatcgcggcgtatatcattatgcgtgcgctgggggaaatgtcggtacataacccggccgccagctctttctcgcgttatgcgcaggaaaacctcggcccgctggcaggttacattaccggctggacctactgctttgaaatcctaattgtcgccatcgccgatgtgaccgcttttggtatctatatgggtgtctggttcccgacggtgccgcactggatttgggtactgagcgtggtgctgatcatttgcgccgtaaacctgatgagcgtgaaggtattcggtgagctggaattctggttctcgttctttaaagtcgccaccatcatcatcatgattgtcgccggtttcggcatcatcatctgggggattggcaacggcgggcaaccgaccggtattcataacctgtggagcaacggcggcttcttcagtaacggctggcttggcatggtaatgtcgttgcaaatggtgatgtttgcttacggtgggatcgaaattatcgggattaccgccggtgaagcgaaagatcctgagaaatcgattccgcgtgcgattaactccgtgccgatgcgtattctggtgttctacgtcggtacgctgttcgtcattatgtctatctacccgtggaatcaggttggcactgccggtagcccgttcgtgctgacgttccagcatatgggcattacctttgccgccagcattcttaactttgttgtgctgaccgcttcgctgtcggcaattaacagtgacgtatttggcgtaggccgtatgctccacggtatggcagagcagggcagcgcaccgaaaattttcagcaaaacgtcgcgtcgcggtattccgtgggttacggtgctggtgatgactaccgcgctgctgtttgcggtgtatctgaactacatcatgccggaaaacgtcttcctggtgatcgcttcgctggcaaccttcgccacggtatgggtgtggattatgatcctgctgtcgcaaatcgccttccgtcgccgtttgccgccagaagaagttaaggcgctgaaatttaaagtgccgggtggggtagcaacgaccatcggcgggctgattttcctgctctttattatcgggttgattggttatcacccggatacgcgtatctcgctgtatgtcggtttcgcgtggattgttgtgctgttgattggctggatgtttaagcgtcgccacgatcgtcagctggctgaaaaccagtaa

SEQ ID NO: 459226 - DNA, 948 bp, Shigella boydii
atgccgccggcacgactggagcagtttgccgtcgatgtaccggatatcggcccacaatgggctgcggatcagattttttatcagatcttccctgatcgttttgcgcgtagtcttcctcgtgaagctgaacaggatcatgtctattaccatcatgcagccggacaagagatcatcttgcgtgactgggatgaaccggtcacggcgcaggcgggcagatcaacgttctatggcggcgatctggacgggataagcgaaaaactgccgtatctgaaaaagcttggcgtgacagcgctgtatctcaatccggtgtttaaagctcccagcgtacatcaatacgataccgaggattatcgccatgtcgatccgcagtttggcggtgatggggcgttgctgcgtttgcgacacaatacgcagcagctgggaatgcggctggtgctggacggcgtgtttaaccacagtggcgattcccatgcctggtttgacaggcacaatcgtggcacggggggagcttgtcacaaccctgaatcgccctggcgcgactggtactcgtttagtgatgatggcacggcgctcgactggcttggctatgccagcttgccgaagctggattatcagtcggaaagtctggtgaatgaaatttatcgcggggaagacagtattgtccgccattggctgaaagcgccgtggagtatggacggctggcggctggatgtggtgcatatgctgggggaggcgggtggggcgcgcaataatatgcagcacgttgctgggatcaccgaagcggcgaaagaaacccagccggaagcgtatattgtcggcgaacattttggcgatgcacggcaatggttacaggccgatgtggaagatgccgccatgaactatcgtggcttcacattcccgttgtggggatttcttgccaataccgatatctcttacgatccgcagtaa

SEQ ID NO: 459227 - DNA, 552 bp, Shigella boydii
atggcctggatggataattaccgcgcagggctttctcatcaacaacaattacgtatgtttaatcagctcgacagccacgatactgcgcgatttaaaacgctgctcggtcgggatattgcgcgcctgccgctggcggtggtctggctgttcacctggcctggtgtaccgtgcatttattacggtgatgaagtgggactggatggtaaaaacgatccgttttgccgtaaaccgttcccctggcaggtggaaaagcaggatacggcgttattcgcgctgtaccggcgaatgattgtgctgcgtaagaaaagtcaggcgctgcgtcgtggcggctgtcaggtgctgtatgcggaagataacgtagtggtatttgtccgcgtgctgaatcagcaacgtgtactggtggcaatcaaccgtggcgaggcctgtgaagtggtgctacccgcgtcaccgtttctcaatgccgtgcaatggcaatgcaaagaagggcatgggcaactgactgacgggattctggctttgcctgccatttcggctacggtatggatgaactaa

SEQ ID NO: 459228 - DNA, 582 bp, Shigella boydii
atgaattttttagctcacctgcatttagcccatctcgcggaaagctcgctttccggcaatttactggctgatttcgtacgcggaaatcctgaagaaagttttccgcccgacgtcgtggctggcattcatatgcatcgacgtatcgacgtattgactgacaatctgccggaagtccgcgaagcacgggagtggtttcgtcgtgaaacgcgccgcgttgcgcctattacgctggatgtcatgtgggatcactttctttcccgccactggtcgcagctgtcgccggactttccgctacaggaatttatctgttatgcccgcaagcaagtgatgacgattttgccggactcaccgccacgttttatcaatctaaacaattacttgtggtcagagcagtggctggtgcgctatcgcgatatggatttcatccagaacgtgttaaacggcatggcaagccgtcgcccacgtctggatgccctgcgtgactcctggtacgatttaaacgcccattataccgccctcgaaacccgcttctggcagttttatccgcggatgatggcgcaggcgtcacacaaggcgttataa

SEQ ID NO: 459229 - DNA, 1071 bp, Shigella boydii
atgcgcgttaccgatttctcctttgaattgcccgaatccctgattgcccactaccccatgcctgaacgcagtagctgtcgtttactgtcgctggacgggcctacgggcgcgctgacgcacggtactttcaccgatttactcgataagctcaaccccggtgatcttctggtttttaataatactcgcgtgatcccggcgcgcctgtttgggcgtaaagccagcggcggcaagattgaagtgctggttgagcggatgctcgacgacaaacgcattcttgcgcatattcgcgcctcgaaagcgccaaaacctggcgcagaactgctgctgggcgatgacgaaagtattaacgcaacaatgaccgcgcgccacggcgcactgtttgaagtcgaattcaatgatgatcgttcggtactggatatcctcaacagtatcggccatatgccgctgccgccgtatatcgaccgtccggacgaagacgctgaccgcgaactttatcaaaccgtttatagcgaaaaaccgggcgcggttgcagccccgaccgctggtctgcattttgacgagcctttgctggaaaaattgcgcgccaaaggcgtggagatggcgtttgtgacgttgcacgttggtgcgggcaccttccagccggtgcgcgtcgacaccattgaagatcacatcatgcactcggaatacgctgaagtaccgcaggatatggtagacgcggtactggcggcgaaagcgcgcggtaaccgggtgattgcggttggcaccacttcagtacgttcgctggaaagcgcggctcaggcagcgaaaaacgatctcattgaaccgttcttcgacgatacccaaatctttatctatccgggcttccagtacaaagtggtcgatgcgctggtgacgaacttccacttgccagagtcgacgctgattatgctggtttcggcctttgccggttatcaacacaccatgaacgcctataaagcagcggtagaagagaaatatcgcttttttagttacggtgatgcgatgtttattacgtacaatccgcaggcaattaatgagcgcgtcggggagtaa

SEQ ID NO: 459230 - DNA, 1128 bp, Shigella boydii
atgaaatttgaactggacaccaccgacggtcgcgcacgccgtggccgcctggtctttgatcgtggcgtagtggaaacgccttgttttatgcctgttggcacctacggcaccgtaaaagggatgacgccggaagaagttgaagccactggcgcgcaaattatcctcggcaacaccttccacctgtggctgcgcccgggccaggaaatcatgaaactgcacggcgatctgcacgattttatgcagtggaaggggccgatcctcaccgactccggcggcttccaggtcttcagccttggcgatattcgtaaaatcaccgaacagggcgtgcacttccgtaacccgatcaacggcgatccgattttcctcgatcctgaaaaatcaatggagattcagtacgatcttggttcggatatcgtcatgatctttgatgagtgtacgccgtatcctgctgactgggattacgcaaaacgctccatggagatgtctctgcgttgggcgaagcgtagccgtgagcgttttgacagtctcggaaacaaaaatgcgctgtttggtatcattcagggcagcgtttacgaagatttacgtgatatttctgttaaaggtctggtagatatcggttttgatggctacgctgtcggcggtctggctgtgggtgagccgaaagcagatatgcaccgcattctggagcatgtatgcccgcaaattccggcagacaaaccgcgttacctgatgggcgttggtaaaccagaagacctggttgaaggcgtacgtcgtggtatcgatatgtttgactgcgtaatgccaacccgcaacgcccgaaatggtcatttgttcgtgaccgatggcgtggtgaaaatccgcaatgcgaagtataagagcgatactggcccactcgatcctgagtgtgattgctacacctgtcgcaattattcacgcgcttacttgcatcatcttgaccgttgcaacgaaatattaggcgcgcgactcaacaccattcataaccttcgttactaccagcgtttgatggcgggtttacgcaaggctattgaagagggtaaattagagagcttcgtaactgatttttaccagcgtcaggggcgagaagtaccacctttgaacgttgattaa

SEQ ID NO: 459231 - DNA, 333 bp, Shigella boydii
atgagcttttttatttctgatgcggtagcggcaacgggtgcaccggtgcaaggtagcccgatgtctttgattttgatgctggtggtattcggtctgattttctatttcatgatcctgcgtccacagcagaagcgcaccaaagaacacaaaaagctgatggactccattgccaaaggtgatgaagttctgacgaacggtggcctggttggtcgcgtaaccaaagtagcggaaaacggctacattgctatcgcgctgaatgacaccactgaagtagttattaaacgtgacttcgtagctgccgtcctgccgaaaggcaccatgaaggcgctgtaa

SEQ ID NO: 459232 - DNA, 1815 bp, Shigella boydii
atgctgatcgtggtgattgtcatcggtctgctgtatgcgcttcccaacctgtttggtgaggatccggctgttcagatcactggtgcgcgcggagtcgccgccagtgagcaaacgctgatccaggtccagaaaacgttacaagaagaaaaaataactgctaagtctgtggcactggaagagggcgctattcttgcgcgcttcgactccactgacacccagctgcgcgctcgtgaagcattaatgggcgttatgggtgacaaatacgtcgtggcgcttaaccttgccccggcaacgccgcgctggctggcagctattcacgctgagccgatgaagctcggccttgacctgcgtggcggcgttcacttcctgatggaagtggatatggacaccgcgcttggcaaactccaggaacaaaatatcgatagcctgcgcagcgatctgcgtgaaaagggcatcccgtataccaccgttcgtaaagaaaacaactacggcctgagcattactttccgcgatgctaaagctcgtgatgaagccattgcgtatctgagcaagcgccatccggacttggtgattagtagccagggcagcaaccagctgcgtgcggtaatgagcgatgctcgtctgagtgaagcgcgtgaatatgcggtgcagcagaacatcaatatcctgcgtaaccgtgtaaaccaacttggcgtagcggagccggtggttcagcgtcagggtgctgaccgtatcgttgttgaactgccaggtattcaggacactgcgcgtgcgaaagagattctgggtgcgacggcaacgctggaattccgtctggtaaacaccaacgttgaccaggccgctgcggcatccggtcgcgtaccgggcgactctgaagtgaaacagacccgcgaaggtcagccagttgtgctgtacaaacgcgtaattctgaccggtgaccatatcaccgactccacttccagccaggacgaatacaaccaaccgcaggttaacatctcgctcgatagcgctggtggtaacatcatgtctaacttcactaaggacaacatcggcaaaccgatggcaaccctgtttgtggagtacaaagacagcggtaagaaagatgcaaatggtcgtgcggttctggtgaaacaggaagaggtgattaacatcgccaacatccagtctcgtctgggtaacagcttccgtatcaccggcatcaacaacccgaacgaagcccgtcagctgtcactgctgctgcgtgccggtgcgttgatcgcgccgattcagattgttgaagaacgtaccattggcccaaccctgggtatgcagaacattgaacaggggctggaggcttgccttgccggtctgctggtttctattctgttcatgatcatcttctataagaagtttggtctgattgcgaccagtgctctgattgccaacttgatcttaatcgtcggcattatgtcgctgttgccaggcgcaacgctgagtatgccaggtatcgcgggtatcgtcttaacccttgcggtggcggtcgatgcgaacgtactgatcaacgaacgtattaaagaagagttgagcaacggacgtactgttcaacaggcaattgatgaaggttatcgtggcgcattcagttctatcttcgatgcgaacatcaccacgctgattaaagtcatcatcctgtacgcagtgggtaccggggcaattaaagggttcgcgattactaccggtatcggtgtggcgacgtcgatgtttaccgcgattgtcggtacgcgtgccatcgtaaacctgctatatggcggcaagcgcgtcaagaagctgtcaatctga

SEQ ID NO: 459233 - DNA, 972 bp, Shigella boydii
gtggcacaggaatatactgttgaacaactaaaccacggccgtaaagtctatgactttatgcgctgggactactgggctttcggcatctctggtctgctgttaatcgccgctatcgttattatgggcgtgcgcggctttaactgggggctggatttcaccggtggtacggttatcgaaattacgctcgaaaaaccggctgaaattgacgtaatgcgtgatgcattgcaaaaagccggttttgaagagccaatgctgcaaaactttggtagcagccacgacatcatggtccgtatgccgcctgctgaaggcgaaaccggcggtcaggtgctgggcagccaggttctgaaggtgattaacgaatccaccaatcagaatgcagcagtgaagcgtattgagttcgtcggtccgagcgtgggggcagaccttgcgcaaaccggtgcgatggcgttgatggcggcgctgctgtctatccttgtgtacgtaggttttcgctttgagtggcgactggcggcaggggttgttattgcgctggcgcacgacgttatcattacgctgggtattttgtcgttattccatatcgagattgacctgaccattgtggcatcgttgatgtcggttatcggttactcgcttaacgacagtatcgtggtatcggaccgtattcgtgaaaacttccgcaagatccgtcgcggtacgccttacgaaatctttaacgtgtccttgacccagacgctgcaccgtaccttgatcacatccggtactaccttgatggttatcctgatgctgtacctcttcggtggtccggtactggaaggcttctcgctgaccatgcttatcggtgtttccatcggtactgcatcttccatctatgtggcatctgcgttggctctgaaactgggtatgaagcgcgaacacatgttgcagcagaaagtggaaaaagaaggggcggatcagccgtcaattctgccgtaa

SEQ ID NO: 459234 - DNA, 348 bp, Shigella boydii
atggctatcatcccaaaaaactatgcgcggttagaaagcggctatcgcgaaaaagcattaaaaatatatccgtgggtctgcggtcgctgttcccgcgagtttgtttattccaacctgcgtgaacttaccgttcaccacattgatcacgaccataccaataacccggaagatggcagtaactgggaattgctttgtctctattgccacgatcatgagcattcgaaatataccgaagcggatcagtatggtacgaccgttatcgcaggggaagatgcgcagaaagatgtcggtgaagcgaagtacaacccattcgctgacctgaaagcgatgatgaacaagacgaagtga

SEQ ID NO: 459235 - DNA, 642 bp, Shigella boydii
ttgctggggctgctggctgccggggtagggatccggcgtgatgataccgaacgcttaaacgcgtttaatcgccactattcactggtggtttgcgccagccgtaacccgcgctgggcacgggattatcacacggtccagatgccaaaagaggtgcgtaaagcacgttatttcagccgtcgcgaagagttgagcgaccctgagcttttgagcgcgattatctcccggcgcgactactacaccgatgcctggtggatggtggcggtggcaacaacagccgatgcgccttacagcctcgaacagttgcaggacggtttacgccatccagtttttccgctttatctggggcgaaaaagtcatccgctggcattacctcttgcgccgttactgctcgaaggcaacgcgtgtgatgccttatgtaatgcataccaacagtatcaggatcatttccataaactgaaagtttcactcccgaaacttcaggatgaatgctggtgggaagggaaacacgacggcctggtcgcgagcaaaatattacgccgccgggatgttcctttaaatcgtcagcagtggctgtttggggaacgcaccgtcaatcaggggccgtggctcagcaaggaggaaccatgtacctctcaagaataa

SEQ ID NO: 459236 - DNA, 651 bp, Shigella boydii
atgtacctctcaagaataaccttacataccggccagctttcgcctgcgcagttgctgcatctggtggatcgcggtgaatatgtgatgcatcagtggctgtgggatctcttccctagcggcaaagaaaggcaatttctttatcgtcgggaagaactccagggcgcgtttcgcttttttgtactgtcgcaggaacgcccggcggaaagtgatacgttcaccatagaatgccggtcatttgcgcccgagctgtgtaccggacaacaactttgtttcaacctgcgggcgaatccaacaatctgtaaagcgggcaagcgccacgatctgctgatggaggcgaaacggcaggtgagggggcaggcggaaggaagtgatgtctggttgcatcaacaacaggcggcgctggactggctggcagcccagggggagagaagtggttttacactgctggatacctcggttgatgcctaccgacaacagcaactgcggcgggaaaactcccggcaactgatccagttcagtagcgtggattatacggggatgcttacggtcaccgatcccgggttatttctgcaacgtctcagtcaggggtatggcaaaagccgcgcgttcggctgtggtctgatgctgatcaaacccggagcagaggcgtga

SEQ ID NO: 459237 - DNA, 528 bp, Shigella boydii
gtgacgtttgtaccgctgagcccgatcccgttaaaagatcgcacctctatgatcttcctccagtacgggcaaatcgacgtactggacggcgctttcgtgctgatcgataaaaccgggatccgcacgcacattccggtgggatcggtcgcctgcattatgctcgaaccgggaacgagagtttcccacgcggcggtgcatctggccgccacggtggggacgctactggtctgggtcggtgaagcgggtgttcgcgtctactcttccggacaacccggtggggcgcgtgctgataagttactctaccaggcaaagctggctttaacggaagatctacgtctgaaggtggtgcgcaaaatgtatgaattacgttttcgtgagccaccgccagctcgccgttcagtggagcagctacgtggaattgagggatctcgcgttcgccagacgtatgcattactggcgaaacaatatggtgtgaaatggaatggtcgcaaatacgatcctaaagactgggaaaaggcgatgttgtga

SEQ ID NO: 459238 - DNA, 396 bp, Shigella boydii
gtgaatcgctgcatcagtgctgctacatcatgtctgtacggtatatctgaagcggcagtattagccgcgggatatgcgcccgctattgggtttatccatagtggcaaaccgctttcatttgtttatgacatagccgatatcattaaatttgattcggttgtaccaaaggcatttgaaatagcggcgaggcaacccgcagaacctgataaagaagtcagattagcctgtcgtgatattttccgtagcactaagttaacgggcaaattaataccgttaattgaggaagtccttgccgcaggtgaaattgaaccgccacaacctgcgccggatatgttaccgccagccatccccgaacctgaaacgttgggcgatagcggtcatcgaggacgcggctga

SEQ ID NO: 459239 - DNA, 294 bp, Shigella boydii
atgagcatggtcgtggttgttacagaaaatgtcccgccgcgcttacgtggacggctcgcaatctggctactggaagtgcgtgccggtgtgtatgttggtgatacatcaaaacgtattcgggagatgatctggcagcaaattacccaactggctggttgcggaaatgtggtgatggcctgggcgaccaataccgagtcgggttttgaatttcagacctggggagaaaacagacgtattccggtggatttggatgggttacgtttggtttcttttcttcctgttgataatcaataa

SEQ ID NO: 459240 - DNA, 1038 bp, Shigella boydii
atgttttccgcattgcgccaccgtaccgctgccctggcgctcggcgtatgctttattctccccgtacacgcctcgtcacctaaacctggcgattttgctaatactcaggcacgacatattgctactttctttccgggacgcatgaccggaactcctgcagaaatgttatctgccgattatattcgccaacagtttcagcaaatgggttatcgcagtgatattcggacatttaatagtcggtatatttataccgcccgcgataatcgtaagagctggcataacgtgacgggaagtacggtgattgccgctcatgaaggcaaagcgccgcagcagatcatcattatggcgcatctggatacttacgccccgctgagcgatgctgacgccgatgccaatctcggcgggctgacgttacaaggaatggatgataacgccgcaggtttaggtgtcatgctggaattggcagaacgcctgaaaaatacgcctaccgagtatggtattcgatttgtggcgaccagcggcgaagaggaagggaaattaggcgctgagaatttactcaagcggatgagtgacaccgaaaagaaaaatacgctgctggtgattaatctcgataacttaattgttggcgataaattgtatttcaacagcggtgtaaaaacccctgaagcagtaaggaaattaacgcgcgacagggcgctggcaattgcgcgcagtcacggaatagccgcaacgaccaatccggggttgaataaaaattatccgaaaggcactgggtgttgtaatgacgcagaaatattcgacaaagcgggcattgctgtactttcggtggaagcgactaactggaatcttgggaataaggatggttatcagcaacgcgcaaaaacagccgcattccctgcgggaaatagctggcatgacgtaagactggataatcaacagcatattgataaggcacttcctggaagaatagaacgtcgctgccgtgacgttatgcggataatgctaccgttggtgaaggagctggcgaaggcgtcttga

SEQ ID NO: 459241 - DNA, 909 bp, Shigella boydii
atggctcaaaaacgacttactcacctgcggcaactggaggcggaaagcatccacattattcgcgaggtggcggcagaattctcaaatccggtgatgctctactctatcggtaaagattccagcgtcatgctgcatctggcgcgcaaggcgttttatccaggtacgctgcctttcccgttgctgcatgtcgataccggctggaaattccgcgagatgtatgagttccgcgatcgtactgctaaagcctacggctgcgagctgctggtgcataaaaacccggaaggcgtggcgatggggattaatccattcgtacacggcagcgcgaaacataccgatattatgaaaactgaaggcctgaagcaggcgctgaacaaatacggttttgatgccgccttcggtggtgcgcgccgtgatgaagagaaatcccgcgctaaagagcgaatctactctttccgtgaccgcttccatcgctgggatccgaaaaatcagcgcccggagctgtggcacaactacaacgggcaaattaacaaaggtgaaagcatccgcgtcttcccgctctctaactggaccgagcaggatatctggcaatacatctggctggaaaatatcgacattgtgccactgtatctcgctgcggaacgtccggttctggaacgcgacggtatgttgatgatgattgatgacaaccgtatcgacctgcaaccgggcgaagtgattaaaaaacggatggtgcgtttccgtacgctgggctgctggccgctgaccggtgcggtggagtcaaattcacaaacactgccggagatcatcgaagagatgctggtttctaccaccagtgaacgtcaggaccgcgtgattgaccgcgaccaggcggggtctatggagctgaaaaaacgtcaggggtatttttaa

SEQ ID NO: 459242 - DNA, 1428 bp, Shigella boydii
atgaacaccgcacttgcacaacaaatcgccaatgaaggcggcgtcgaagcctggatgattgcgcaacaacataaaagcctgctgcgttttctgacctgtggtagcgtcgatgacggcaaaagtaccctgattggtcgcctgctgcacgatacccgccaaatctacgaagatcagctctcatcgctgcataacgacagtaagcgtcacggcacccagggcgaaaagctggatctggcactgctggtggacggcctgcaagctgagcgcgaacagggcatcaccattgacgtggcttaccgttatttctctaccgagaagcgtaaatttattatcgccgacaccccagggcacgagcagtacactcgcaatatggcgactggcgcatcgacatgtgaactggcgatcttactgatcgatgcccgtaaaggcgtgctcgatcaaacccgtcgtcacagttttatctccacactgttggggatcaaacatctggtcgtggcgatcaacaaaatggatctggtggattacagtgaagagacgttcacccgtattcgtgaagattatttgacctttgccgggcagctgccgggtaatctggatatccgctttgtgccgctctctgcactggaaggcgacaacgtggcatcgcaaagtgaaagtatgtcgtggtacagcggtccgacactgctcgaagtgctggaaaccgtggagatccagcgagtggtggatgcccagccaatgcgcttcccggtgcagtacgttaatcgcccgaatctcgattttcgtggctacgccggaacgctggcatccggtcgcgtggaagtcgggcaacgtgtcaaagtgctgccctctggtgtggaatcaaacgtcgcgcggatcgtgacttttgatggtgatcgcgaagaagcctttgccggagaagcgatcaccctggtgctgacggatgagatcgacatcagccgtggcgatctgctgctggcggcagacgaagcgttaccggcggtgcagagcgcgtcggtggatgtggtatggatggcggaacagccgctttccccgggccagagttacgacatcaaaattgccggtaagaagacgcgcgcgcgtgttgatggcattcgctatcaggttgatattaataaccttacccagcgtgaagttgaaaacctgccactgaatgggatcggcctcgtggatctcacttttgacgagccgctggtgttagatcgttatcaacaaaatccggtgacgggtgggctgatttttatcgatcgcctgagcaacgtgactgttggtgccggtatggtgcatgagccgaaaaacgaggccgccgttgcgtcatctgaattcagtgcattcgaactggaattgaatgccctggttcgtcgccactttccgcactggggcgcgcgcgatttgctgggggataaataa

SEQ ID NO: 459243 - DNA, 606 bp, Shigella boydii
atggcgctgcatgacgaaaacgtcgtctggcatagccatccggtcactgtgcaacaacgcgagctacaccactgtcatcgtggtgtagtgctgtggtttaccggcctctctgggtccggtaaatcaacggtcgccggggcgctggaggaggcgttacataaactcggcgtcagtacgtatctgctggatggcgacaatgttcgccacggattatgcagcgatctcggttttagcgatgccgatcgtaaagagaatatccgtcgcgtcggtgaagtggcgaatttgatggttgaagccggactggtggtgctgaccgcatttatctcgccacaccgcgccgaacgccagatggttcgcgaacgcgtaggagaagggcgctttatcgaagtgtttgtcgatacgccgctggcgatttgcgaagcccgcgatcccaaaggcttatataagaaagcgcgtgccggtgaactgcgcaactttacgggaatagattccgtttacgaagcgcctgaatcggcagaaattcatctcaatggtgaacaattagtaacaaatttggtacagcaattattagatctgttgagacagaacgatattatcagatcctga

SEQ ID NO: 459244 - DNA, 324 bp, Shigella boydii
atgcgtaatagccataacattacactaacaaataacgacagccttactgaggatgaagaaaccacatggtcactgcctggtgccgtggtcggttttatctcctggttatttgcgctggcgatgccgatgttgatttatggctctaacacgctgttcttctttatctacacctggcctttctttctggcactgatgcctgtcgcggtagtggtggggattgcgctgcattcattgatggacggaaagctacgctacagtattgttttcaccctggtgacagtaggcattatgtttggcgcactgtttatgtggctactgggctaa

SEQ ID NO: 459245 - DNA, 312 bp, Shigella boydii
atgggtaaactaacgctgctgttgctggctattctggtctggctacagtattcgctgtggttcggtaagaacggtatacatgactatacccgcgtcaatgatgatgtggcggcacagcaagctacaaacgcgaaacttaaagcgcgaaacgatcaactttttgccgaaattgacgatctcaatggcggccaggaggcgctcgaagagcgtgcgcgtaatgaactcagcatgaccaagccgggcgaaactttttatcgtctggtgcctgacgcgtcgaagcgcgcacagtctgcggggcaaaacaatcgataa

SEQ ID NO: 459246 - DNA, 711 bp, Shigella boydii
atggcaaccactcatttggatgtttgcgccgtggttccggcggccggatttggccgtcgaatgcaaacggaatgtcctaagcaatatctctcaatcggtaatcaaaccattcttgaacactcggtgcatgcgctgctggcgcatccccgggtgaaacgtgtcgtcattgccataagtcctggcgatagccgttttgcacaacttcctctggcgaatcatccgcaaatcaccgttgtagatggcggtgatgagcgtgccgattccgtgctggcaggtttgaaagccgctggcgacgcgcagtgggtattggtgcatgacgccgctcgtccttgtctgcatcaggatgacctcgcgcgattgttggcgttgagcgaaaccagccgcacgggagggatcctagccgcaccagtgcgcgatacgatgaaacgtgccgaaccgggcaaaaatgccattgctcataccgttgatcgcaacggcttatggcacgcgctgacgccgcaatttttccctcgtgagctgttacatgactgtctgacgcgcgctctaaatgaaggcgcgactattaccgacgaagcctcggcgctggaatattgcggattccatcctcagttggtcgaaggccgtgcggataacattaaagtcacgcgcccggaagatttggcactggccgagttttacctcacccgaaccatccatcaggagaatacataa

SEQ ID NO: 459247 - DNA, 480 bp, Shigella boydii
atgcgaattggacacggttttgacgtacatgcctttggcggtgaaggcccaattatcattggtggcgtacgcattccttacgaaaaaggattgctggcgcattctgatggcgacgtggcgctccatgcgttgaccgatgcattgcttggcgcggcggcgctgggggatatcggcaagctgttcccggataccgatccggcatttaaaggtgccgacagccgcgagctgctacgcgaagcctggcgtcgtattcaggcgaagggttataccctgggcaacgtcgatgtcactatcatcgctcaggcaccgaagatgttgccgcacattccacaaatgcgcgtgtttattgccgaagatctcggctgccatatggatgatgttaacgtgaaagccactactacggaaaaacttggatttaccggacgtggggaagggattgcctgtgaagcggtggcgctactcattaaggcaacaaaatga

SEQ ID NO: 459248 - DNA, 1050 bp, Shigella boydii
atgattgagtttgataatctcacttacctccacggtaaaccgcaaggcaccgggctgctgaaagccaatccggaagactttgtggtggtggaagatttgggctttgagcctgatggtgaaggtgagcatattctggttagaatcctcaaaaacggctgcaatacccgttttgtggcggatgcactggcgaaattcctgaaaattcatgcccatgaagtcagcttcgctgggcaaaaagacaaacatgctgttacggaacagtggttatgcgctcgcgtgccaggcaaggaaatgcccgatctgagcgcctttcaactggaaggctgccaggtgctggagtatgcgcggcacaagcgcaagctgcgtttaggcgcgctgaaaggtaacgcctttaccctggttctgcgcgaagtgagcaatcgcgatgacgttgaacaacgtctgatcgatatttgcgtaaaaggtgtaccgaactacttcggtgcccaacgttttgggattggcggtagcaacttgcagggcgcgctgcgctgggcgcaaaccaatactccggtgcgcgatcgcaataaacggagtttttggttgtcggcagcccgcagtgcgttgtttaatcagattgttgctgagcgcctcaaaaaagcagacgttaatcaagttgttgacggcgatgcgctacaattagccggacgtggtagctggtttgtagcaaccaccgaagaactggcggaattacagcatcgcgtcaacgataaagagctgatgataaccgccgcattgccgggcagtggcgaatggggaactcagcgtgaagcgctggcattcgaacaagcagctgtcgccgcagaaactgaattacaagctttactggtgcgcgaaaaagttgaagccgcgcgcagagcgatgctgctgtatccgcaacaattaagctggaattggtgggatgacgtcaccgtagagatccgtttctggcttccggcgggtagttttgcaaccagcgttgtcagggaacttatcaacacaacaggtgattatgcgcatattgctgagtaa

SEQ ID NO: 459249 - DNA, 762 bp, Shigella boydii
atgcgcatattgctgagtaatgatgacggggtacatgcacccggtatacaaacgctggcgaaagccttgcgtgagtttgctgacgttcaggtggtcgcccccgatcgtaaccgcagcggcgcttcaaattctctgacactggaatcctccctgcgcacgtttacctttgaaaatggtgatattgctgtgcaaatgggaaccccgaccgattgcgtctatcttggcgtgaatgctctgatgcgtccgcgcccggacattgttgtgtccggcattaacgccgggccgaatctgggggatgacgttatttattccggtacggtagccgccgcgatggaaggccgtcatttaggttttccggcgctggccgtctcgcttgacgggcataaacattacgacactgccgcggcggtaacctgttcaattttgcgcgcactgtgtaaagagccgctgcgcaccggacgtattcttaatattaacgttccggatttacccttggatcaaatcaaaggtattcgcgtgacgcgctgcggtacacgacatccggcagatcaggtgatcccgcagcaagatccgcgcggcaatacgctgtactggattggcccgccgggcggtaaatgtgatgccggtccggggaccgattttgctgcggtagatgagggctatgtctccatcacgccgctgcatgtggatttaactgcgcatagcgcgcaagatgtggtttcagactggttaaacagcgtgggagttggcacgcaatggtaa

SEQ ID NO: 459250 - DNA, 627 bp, Shigella boydii
atggtaagcagacgcgtacaagcacttctggatcaattacgtgcgcaaggtattcaggatgagcaggtgctgaatgcacttgctgccgtgccgcgtgaaaaattcgttgatgaagcgtttgaacaaaaagcctgggacaatatcgccttgccgataggtcaggggcagacaatttcgcagccgtatatggtagcgcgaatgaccgaattactcgagctgacgccgcagtcgcgggtgctggaaattggcaccggttcgggatatcaaacggcaatcctggcgcatcttgtccagcatgtttgctcggtcgaacggattaaaggtttgcagtggcaggcgcgtcgccgcctgaaaaatcttgatttacataatgtttcaacccgtcatggcgatggatggcaaggttggcaggcacgcgcgccgtttgacgctatcattgttacggcggcaccgccggaaattccaactgcgctaatgacgcagctggacgaaggcgggattctcgtcttacccgtaggggaggagcaccagtatttgaaacgggtgcgtcgtcggggaggcgaatttattatcgataccgtggaggccgtgcgctttgtccctttagtgaagggggagctggcttaa

SEQ ID NO: 459251 - DNA, 1092 bp, Shigella boydii
atgagcgcgggaagcccaaaattcaccgttcgccgcattgcggctttgtcactggtttcgctatggctggcaggctgttctgacacttcaaatccaccggcaccggtcagctccgttaatggcaatgcgcctgcaaataccaattctggtatgttgattacgccgccgccgaaaatggggacgacgtctacagcccagcaaccgcaaatccagccagtgcagccagtagctcagcagccggtacagatggaaaacggacgcatcgtctataaccgtcagtatgggaacattccgaaaggcagttatagcggcagtacctataccgtgaaaaaaggcgacacacttttctatatcgcctggattactggcaacgatttccgtgaccttgctcagcgcaacaatattcaggcaccatacgcgctgaacgttggtcagaccttgcaggtgggtaatgcttccggtacgccaatcactggcggaaatgccattacccaggccgacgcagcagagcaaggagttgtgatcaagcctgcacaaaattccaccgttgctgttgcgtcgcaaccgacaattacgtattctgaatcttcgggtgaacagagtgctaacaaaatgttgccgaacaacaagccagctgcgaccacggtcacagcgcctgtaacggtaccaacagcaagcacaaccgagccaactgtcagcagtacatcaaccagtacgcctatctccacctggcgctggccgactgagggcaaagtgatcgaaacctttggcgcttctgaggggggcaacaaggggattgatatcgcaggcagcaaaggacaggcaattatcgcgaccgcagatggccgcgttgtttatgccggtaacgcgctgcgcggctacggtaatctgattatcatcaaacataatgatgattacctgagtgcctacgcccataacgacacaatgctggtccgggaacaacaagaagtgaaggcggggcaaaaaatagcaaccatgggtagcaccggaaccagttcaacacgcttgcattttgaaattcgttacaaggggaaatccgtaaacccgctgcgttatttgccgcagcgataa

SEQ ID NO: 459252 - DNA, 993 bp, Shigella boydii
atgagtcagaatacgctgaaagttcatgatttaaatgaagatgcggaatttgatgagaacggagttgaggtttttgacgaaaaggccttagtagaagaggaacccagtgataacgatttggccgaagaggaactgttatcgcagggagccacacagcgtgtgttggacgcgactcagctttaccttggtgagattggttattcaccactgttaacggccgaagaagaagtttattttgcgcgtcgcgcactgcgtggagatgtcgcctctcgccgccggatgatcgagagtaacttgcgtctggtggtaaaaattgcccgccgttatggcaatcgtggtctggcgttgctggaccttatcgaagagggcaacctggggctgatccgcgcggtagagaagtttgacccggaacgtggtttccgcttctcaacatacgcaacctggtggattcgccagacgattgaacgggcgattatgaaccaaacccgtactattcgtttgccgattcacatcgtaaaggagctgaacgtttacctgcgaaccgcacgtgagttgtcccataagctggaccatgaaccaagtgcggaagagatcgcagagcaactggataagccagttgatgacgtcagccgtatgcttcgtcttaacgagcgcattacctcggtagacaccccgctgggtggtgattccgaaaaagcgttgctggacatcctggccgatgaaaaagagaacggtccggaagataccacgcaagatgacgatatgaagcagagcatcgtcaaatggctgttcgagctgaacgccaaacagcgtgaagtgctggcacgtcgattcggtttgctggggtacgaagcggcaacactggaagatgtaggtcgtgaaattggcctcacccgtgaacgtgttcgccagattcaggttgaaggcctgcgccgtttgcgtgaaatcctgcaaacgcaggggctgaatatcgaagcgctgttccgcgagtaa

SEQ ID NO: 459253 - DNA, 1365 bp, Shigella boydii
atgtccacaattacattgttatacattgcgttagctggcgtaatcatgctgttgctgctggtcatcaaggcaaaggtacaaccattcgttgctctgctcctcgtcagcctgttagtcgcacttgcggcgggtataccggcgggcgaagtgggtaaagtgatgatcgccgggatgggcggtgtgcttggttccgtcactattattattggtctgggcgctatgctggggcgtatgatcgaacactctggtggtgcagagtcactggctaattatttcagtcgcaagttaggtgacaaacgaactatcgctgcgctgactctggcagcgttcttcctcggtattcccgtcttctttgatgtcagctttattattcttgcgccaatcatttacggttttgccaaggttgccaaaatatcgccactcaaatttggcctgcctgtcgctggaatcatgctaactgttcatgtggcagtaccgccgcatccaggccctgtcgccacagcggggttactccacgcagacatcggctggctaaccatcatcggtattgcgatttctattcccgtagggattgttggctactttgcagcgaaaataatcaataagcgccaatatgcgatgtcagtagaagtactggaacagatgcaactggctccggccagtgaggaaggcgcgacaaaattaagcgataaaataaatccaccgggcgtcgcgctggtcacctcgctaattgttattcctatcgcgattatcatgacgggtacggtttccgcaacactgatgccgccttcgcatcccctgcttggtacgctacagctgatcggctcaccaatggtagctctaatgattgcgctggtgctggcattctggttattggctttacgtcgcggctggagcttacaacacaccagcgacattatgggctcagcccttcccactgcggcggtagtgattttggttactggtgctggaggggtatttggcaaagtgctggtggaatcgggcgtcggcaaagcccttgccaatatgctacaaatgattgacctgcctctgttaccagccgcatttattatttcactggctctgcgtgcatcgcaggggtcagcaaccgtagcaatcctgacaaccggcgggttactctcagaagcggtgatgggattgaatccgattcagtgcgtattggtgacgctggcagcctgctttggtgggcttggcgcgtcacatattaatgactcagggttctggattgtgaccaaatatctggggttgtcggtagcagacggtctgaaaacctggacagtgttaacgaccattctcggttttaccggattcttaattacctggtgcgtatgggcggtaatttga

SEQ ID NO: 459254 - DNA, 777 bp, Shigella boydii
atgcctcgttttgcagctaatttatccatgatgttcaccgaagtgccttttattgaacgcttcgccgcagcgcgaaaagccgggttcgatgctgtggaatttctgtttccctatgactactccaccctgcaaatccaaaagcaactggagcaaaaccatctgacactggcgctgttcaataccgctcccggagatattaatgcgggggaatggggattatccgcccttcccggacgtgagcacgaagcacacgcagacatcgacctggcactggaatatgcattggcgctcaattgtgaacaagtccatgtgatggcaggcgtcgtgcccgctggcgaagatgctgaacggtaccgggcagtatttatcgataatctccgctacgctgccgaccgctttgcaccacacggcaagcgaatattagttgaagcactcagccccgacgttaagcctcattatctcttctccagccagtatcaggcactggctattgttgaagaggttgcgcgagataacgtgtttattcaactagatacttttcatgcgcaaaaagtagatggcaacctgacgcatttaatccgcgactacgctgggaaatatgcgcacgtacaaattgccggactacctgatcgacatgaaccggacgatggagaaatcaactatccgtggctgttccgcctgttcgatgaggtgggatatcagggctggatcggttgtgaatataaacctcgtggcctcaccgaagaagggcttggctggtttgacgcctggcgctaa

SEQ ID NO: 459255 - DNA, 402 bp, Shigella boydii
gtgctctttcatctggcgctgtatcgcaacaatccgcgctgtaaagcggtggtgcatttgcacagcacatggtcgacggcgctttcctgcctgcaagggctggacagcagcaacgttattcgtccgttcacaccatacgtggtgatgcggatgggaaatgtcccgctggtgccctattaccgaccgggcgataaacgcatcgcacaggatctggcggaactggcagcagacaatcaggcttttttactggcaaatcatggcccagtggtttgcggtgaaagcctgcaagaagccgccaacaatatggaagagctggaggaaacggcaaaactgatttttattctcggtgaccgcccgatccgttatctgaccgcaggtgaaattgcggaattaaggagttaa

SEQ ID NO: 459256 - DNA, 1380 bp, Shigella boydii
atgatcaagattggcgttatcgccgatgattttaccggcgcgacggatatcgccagttttctggtggaaaacggtctaccaacggtacaaattaacggtgttccaacaggtaaaatgccggaagcaatcgacgcactggtgatcagcctgaaaacgcgctcctgtccggtggttgaagccacacagcaatcgctggcggctctgagctggttgcaacagcaaggttgcaaacagatctatttcaaatactgctctactttctacagtacggcgaaaggtaatatcggcccggttaccgatgcattaatggatgctctcgacacgccgtttacggtcttctctccggccctgtcggtcaacggacgtacggtttatcaggggtatttgttcgtaatgaatcaactgctggccgaatccgggatgcgccatcacccggtaaatcccatgaccgacagctatcttccccgtctggttgaagcgcaatccacagggcgctgcggcgtcgtttcggcacatgttttcgaacaaggtgtggatgccgttcgtcaagagctggctcgcttacagcaagagggctaccgctacgcggtgcttgatgcgctgaccgaacaccatctggaaattcagggagaagccttgcgcgatgccccactggtaacgggcggttctggtctggcgattggcctggcccggcagtgggcgcaagaaaacggtaaccaggctcgcgaagcagggcatccgctcgctgggcgcggcgtagtgctctccggttcatgctctcaaatgaccaaccgccaggtggcacattaccgtcaaattgcaccagcccgtgaagttgatgtggcacgctgcctctcaaccgaaactctggccgcttatgcacacgaactggcagagtgggttctgggccaggaaagtgtacttgctccactggtttttgccaccgccagcactgacgcattggcagcaattcaacagcaatacggtgcacaaaaagccagtcaggcagtagaaactctgttttctcaactagcggcgcggttagcagcggaaggcgtgacacgctttattgtcgcaggcggtgagacctccggcgtagtcacacagagcctgggcataaaagggtttcatattggcccaaccatttcccccggcgtgccgtgggtaaacgcactggataagcctgtctcactcgcccttaaatctggcaacttcggtgatgaagccttttttcacgagcccaaagagagtttttatcatgagcgatttcgcaaaagtagagcagtctttgcgagaggagatgacgcggattgccagttcattctttcagcgcggctatgcaaccggttcggctggcaatctgtcgctgcttttacctga

SEQ ID NO: 459257 - DNA, 909 bp, Shigella boydii
atgaaaacgggatctgagtttcatgtcggtatcgttggcttagggtcaatgggaatgggagcagcactgtcatgtgtccgcgcaggtctttctacctggggcgcagacctgaacagcaatgcctgcgctacgttgaaagaggcaggtgcttgcggggtttctgataacgccgcgacgtttgccgaaaaactggacgctctgctggtgctggtggtcaatgcggcccaggttaaacaggtgctgtttggtgaaacaggcgttgcacaacatctgaaacccggtacggcagtaatggtttcttccactatcgctagtgctgatgcgcaagaaattgctaccgctctggctggattcgatctggaaatgctggatgcgccagtttctggtggtgcagtaaaagccgctaacggtgaaatgactgtcatggcctccggtagcgatattgcctttgaacgactggcacccgtgctggaagccgttgccggaaaagtttatcgcataggtgcagaaccgggactaggttcgaccgtaaaaattattcaccagttgttagcgggcgtacatattgctgccggagccgaagcgatggcacttgcagcccgtgcggggatcccgctggatgtgatgtatgacgtcgtgaccaatgccgccggaaattcctggatgttcgaaaaccggatgcgtcatgtggtggatggcgattacaccccgcattcagccgtcgatatttttgttaaggatcttggtctggttgccgatacagccaaagccctgcacttcccgctgccattggcctcaacagcattgaatatgttcaccagcgccagtaacgcaggttacgggaaagaagacgatagcgcagttatcaagattttctctggcatcactctaccgggagcgaaatcatga

SEQ ID NO: 459258 - DNA, 768 bp, Shigella boydii
ttgatacccgtagagcgtcgccaaatcatccttgagatggtagctgaaaaaggcattgtcagtattgctgaactaacggacagaatgaatgtgtcacatatgaccattcgtcgggatttacaaaaactggagcagcagggagccgttgtgctggtgtccggaggcgtccagtctccgggacgcgtggcgcatgaaccttctcatcaggtaaaaactgcgctggcaatgacgcaaaaagcggctattggcaagctggcggcaagtcttgttcagccgggaagttgtatctatctggatgcgggaacgaccacgttagcgatagcacagcatctgattcacatggagtcactgactgtggtcacaaacgatttcgttattgcgaactacttgctcgacaacagtaattgcacaattattcacactggcggtgcagtgtgtcgggaaaaccgttcctgtgtcggggaagccgctgcgaccatgctgcgcagcctgatgattgatcaggcttttatttctgcatcgtcatggagtgtgcgggggatttctacgccagcggaagataaagtcacggtgaaacgggcgattgctagtgccagccgccagcgagttttggtctgtgatgcgacgaaatatggtcaggtggcgacatggctggcgttaccattaagcgagtttgatcagattattacagacgacggtttgccggagagtgccagtcgcgcgctggcgaagcaggatctctctttgctggtagcgaaaaatgaataa

SEQ ID NO: 459259 - DNA, 321 bp, Shigella boydii
ttggatttaggttctgcggaagcaaaagcgtggattggtgttgaaaacccgcatcgcgcagacgtattaacagaactgcgtcgcagcaccgtggcccgcgtttgtaccggtcgtgccggtccgcgtccgcgtacccaggcgttgctgcgtttcctggccgatcactctcgttcgaaagataccgtactgaaagaagtgccggaagagtgggtgaaagcgcagggcttgctggaagtacgctccgaaattagcgacaaaaatctctacctgactcgcccggatatgggccgcgcctgtgtgcagaagctgttgaagcgctga

SEQ ID NO: 459260 - DNA, 363 bp, Shigella boydii
gtgaactacgaagagatcctgccgccgctgatggcgggcctgaaacaggccgggctgaaagtcggcacgccattctttgttcgttatggtcgcgtgaagattgaagatcagatcggtgagatcctcggcgcgaaagtggtgatcctgctggtgggggaacgtccggggttgggtcagtcagaaagcctctcctgttacgccgtttactcgccgcgtatggcgaccaccgttgaggccgatcgcacctgcatctctaacattcaccagggcggcacgccgccggttgaagccgcagccgtcattgtggatttggcgaaacgtatgctggagcagaaagcatccggcatcaacatgacccgataa

SEQ ID NO: 459261 - DNA, 660 bp, Shigella boydii
atgccagctttagatttgattcgaccgtcggtaaccgccatgcgggtgattgcctccgttaacgctgaatttgcgcgtgaactaaaattgccgccgcatattcgtagcctcgggctgatttctgctgattccgatgacgtcacctacattgcggctgacgaagcgaccaagcaggcgatggtcgaagtggtatatggccgctcgctgtatgcgggagcagcacacggaccgtcaccgactgccggtgaagtgctgattatgcttggtgggccaaacccggcggaagtgcgtgctggtctggatgcgatggttgcgcatattgaaaatggcgctgctttccagtgggctaatgacgcagaaaacaccgcattcctggcacatgtagtttcgcgtaccggttcttatctctcatcaaccgccgggatcacgcttggcgatccgatggcgtatctggtggcaccgccgctggaagcgacctacggcattgatgcagcgttgaaatctgccgacgtacagctggtgacctatgtcccgccaccgtctgaaaccaactactcggcagcatttttaaccggtagccaggccgcgtgtaaagcagcctgtaacgcctttaccgatgcagtgctggaaatcgcgcgtaatccaatccagcgtgcgtaa

SEQ ID NO: 459262 - DNA, 501 bp, Shigella boydii
atgatcaatgcactgggattgctggaagtggacggcatggtcgccgcgatagatgcagcggatgccatgctcaaagcagctaacgttcgtctgctcagtcacgaagtgcttgaccctggtcgcttaacgctggtggtggaaggcgatctggcggcgtgtcgtgcggcgctggacgcaggttgtgctgccgcgatgcgtaccgggcgtgtcatcagccgcaaggagatcggtcggccagacgatgacacccagtggctggttactggctttaaccgccagccgaagcaacccgtaagggaacccgacgcgccagttatcgtcgcggaatctgctgacgagttgttggcgctgttaacatcagtacgtcagggaatgacggcaggagaagtggctgcccactttggctggccgctggaaaaagccagaaatgcgctcgaacagctcttttctgccgggacgttacgtaaacgcagtagtcgttatcgtctcaagccccattaa

SEQ ID NO: 459263 - DNA, 1053 bp, Shigella boydii
atgaaaaagacccgtacagccaatttgcaccatctttatcatgaacccttacccgaaaacctgaagctcacgccgaaggtcgaagtggataatgttcatcaacgacagacaacggatgtctatgaacatgctttaacgattaccgcctggcagcagatttacgatcagctgcatccgggcaagtttcatggtgaatttacggaaattctactcgatgatattcaggtttttcgtgaatacaccggtctggcgctgcgtcagtcgtgcctggtctggccgaactcgttctggtttggcattccggcgacgcgcggtgagcagggatttatcggttcgcaatgtctgggaagcgcggaaatcgccacccgccctggtggcactgaatttgaactgagcacgccggatgattacacgatcctgggcgtggtgctttctgaagatgtcatcacccggcaggctaactttttgcataacccggatcgggtattacatatgctgcgtagccagtcggcgctggaagtgaaagagcagcataaagccgcgctgtggggctttgtccaacaggcgctggcgacgttttgcgagaacccggaaaatctccatcagcctgcagtgcgaaaagtgctgggggataatttgctaatggcgatgggggcgatgctggaagacgcgcaaccaatggtgacggcggaaagcatcagtcatcagagttaccgtagattactttcccgcgcccgtgaatatgtgctggaaaatatgtctgagccggtgacggtgctggacttgtgtaatcaactgcatgtcagtcgccgcacgctacaaaacgcgtttcacgctattttaggcattggcccaaacgcgtggctgaaacgcattcgcctgaacgccgtacgccgcgaactgataagcccgtggtcgcaaagcacaacggtaaaagacgccgccatgcagtggggattctggcatctggggcaatttgtcacggattaccagcagctgtttgccgagaagccgtcgttgacgttgcatcagcggatgcgggaatgggggtga

SEQ ID NO: 459264 - DNA, 900 bp, Shigella boydii
atgaaacccgacgcacaccaggttaaacagtttctgctcaaccttcaggatacgatttgtcagcagctgaccgccgtcgatggcgcagaatttgtcgaagatagttggcagcgcgaagctggcggcggcgggcgtagtcgggtgttgcgtaatggtggtgttttcgaacaggcaggcgtcaacttttctcacgtccacggcgaggcgatgcctgcttccgccaccgctcatcgcccggaacttgccgggcgcagtttcgaggcgatgggcgtttcactggtagtgcatccgcataacccgtatgttcccaccagccacgcgaatgtgcgtttttttattgccgaaaaaccgggtgcagagcccgtctggtggtttggcggcggcttcgatttaacccctttctatggttttgaagaagacgccattcactggcaccgcaccgcccgtgacctgtgcctgccatttggtgaagacgtttatccccgttacaaaaagtggtgcgacgattacttctacctcaaacatcgcaacgaacagcgcggtattggcgggctgttctttgatgatctgaacacgccagatttcgaccactgttttgcctttatgcaggcggtaggcaaaggctacaccgacgcttatttaccaattgtagagcgacgtaaagcgatggcctacggcgagcgcgagcgcaattttcagctctaccgtcgcggtcgttatgtcgagttcaatctggtctgggatcgcggcactctgtttggcctgcaaactggcgggcgcaccgagtcgatcctgatgtcaatgccgccactggtacgctgggagtatgattatcagccaaaagatggcagcccagaagcggcgttaagtgagtttattaaggtcagggattgggtgtaa

SEQ ID NO: 459265 - DNA, 870 bp, Shigella boydii
atgagcacttttaaaccactaaaaacactcacttcgcgccgccaggtgctgaaagccggtttggctgccctgacgttgtcaggaatgtcgcaagccatcgccaaagacgaacctttaaaaaccagcaacggacacagcaagccgaaagccaaaaaatctggcggcaaacgtgtcgttgttctcgatccaggccacggcggaattgataccggagcgatcggacgcaacggttcgaaagaaaaacatgtggtgctggcgattgctaaaaacgtccgttccattttgcgtaatcatgggattgatgcgcgtttaacgcgttctggcgatacgtttatcccactttacgatcgcgttgaaatcgcccataaacatggcgcagatctgtttatgtcaattcatgccgatggctttaccaacccgaaagctgccggtgcttcggtatttgccctctctaaccgtggggcaagtagcgcaatggcgaaatacctgtctgaacgcgaaaaccgcgccgatgaagttgccggtaaaaaggcgactgacaaggatcacctattgcagcaagtgctgtttgatctggtgcaaaccgatactattaaaaacagcctgacgcttggctcgcatattctgaaaaagattaagccggtgcataaactgcacagccgcaacaccgaacaagccgcgtttgtggtgttgaaatcgccgtcggttccttcggtgctggtggaaacctcgtttatcaccaacccggaagaagagcggctgttaggcacggcggcgtttcgtcagaaaatcgccacagcgattgctgaaggcgtgatcagttatttccactggttcgacaaccagaaagcacattcgaaaaagcgataa

SEQ ID NO: 459266 - DNA, 426 bp, Shigella boydii
atggagatacgcgtatttcgccaggaagatttcgaagaggtcatcaccctttgggagcgttgcgacttgctgcgtccgtggaacgatccggaaatggacatcgagcgtaagatgaaccatgacgtcagtttgtttttggtcgctgaggtgaacggtgaagtggtcggaacggtgatgggcggttatgacgggcatcgcgggtctgcttattatcttggcgtgcatccagagtttcgtgggcgtgggattgccaatgcgttgcttaatcggctggagaaaaagctgattgctcgtggctgcccgaaaattcagatcaatgtgccggaagataacgacatggtgctcggaatgtatgaacgcctgggatatgaacacgccgacatgctgagtctgggtaagcgtttgattgaagatgaagagtactga

SEQ ID NO: 459267 - DNA, 450 bp, Shigella boydii
atgaagagtactgagttccatcctgtccattatgatgcgcacggacgcctgcgtttacccttgctcttctggcttgtgctattgcttcaggcgcgaacctgggtgctgtttatcattgccggtgcgtcgcgcgagcagggtactgcgctgctaaatctgttttatcccgatcacgataatttctggctggggttgattcccggtattccggcggtgctggcgtttttgttgagcggtcggcgggcttcgtttcctcgcacctggcatgtgctctattttctgttgctgttggcgcaggtggttttactttgctggcaaccgtggctgtggctgaacggtgaatccgttagcggtatcggtctggcgctggtagtggcggatattgtggagttaatctggctgctgaccaatcgacgtttacgcgcttgttttaatgaagaaaaagaataa

SEQ ID NO: 459268 - DNA, 576 bp, Shigella boydii
atgaaatcgctgcgtttaatgttatgcgctatgccgttgatgctgaccggctgttccacgatgtcgtcagttaactggtcggccgctaacccgtggaactggtttggatcgtccaccaaagtgagcgagcagggcgtgggtgaattaacggcgtccacaccactgcaagaacaagccattgctgatgcgcttgatggcgattatcgcctgcgcagcggaatgaaaaccgcgaacggcaacgtggtgcgcttttttgaagtgatgaaaggcgacaacgtggcgatggtgattaacggcgatcaaggcacgatcagtcgcattgacgtgctggatagcgatattcctgctgacaccggtgttaaaatcggtacaccgtttagcgacctttacagcaaagcatttggcaattgccaaaaagctgatggtgatgataatcgtgccgtcgaatgtaaagccgaaggcagtcaacatattagctaccagttcagtggggaatggcgtggtcctgaagggttaatgccttcggacgataccctgaaaaactggaaagtcagtaaaattatctggcggcgttaa

SEQ ID NO: 459269 - DNA, 900 bp, Shigella boydii
atgtctcaggttcagagtggcattttgccagaacattgccgcgcggcgatttggatcgaagccaacgtgaaaggggaagttgacgccctgcgtgcggccagtaaaacatttgccgacaaactggcaacttttgaagcgaaattcccggacgcgcatcttggtgcggtggttgcctttggtaacaacacctggcgcgctctgagcggcggcgttggggcagaagagctgaaagattttccgggctacggtaaaggccttgcgccgacgacccagttcgatgtgttgatccacattctttctctgcgtcacgacgtaaacttctctgtcgctcaggcggcgatggaagcctttggtgactgcattgaagtgaaagaagagatccacggcttccgttgggtggaagagcgtgacctgagcggctttgttgacggtacagaaaacccggcgggtgaagagacgcgccgcgaagtggcggttatcaaagacggcgtggatgccggcggcagctatgtgtttgtgcagcgttgggagcacaacctgaagcagctcaaccggatgagcgttcacgatcaggagatgatgatcgggcgcaccaaagaggccaacgaagagattgacggcgacgaacgtccggaaacctctcacctcacccgcgttgatctgaaagaagatggcaaagggctgaagattgttcgccagagcctgccgtacggcaccgccagtggcactcacggtctgtacttctgcgcctactgcgcgcgtctgcataacattgagcagcaactgctgagcatgtttggcgataccgatggtaagcgtgatgcgatgttgcgtttcaccaaaccggtaaccggcggctattacttcgcgccgtcgctggacaagctgatggcgctgtaa

SEQ ID NO: 459270 - DNA, 747 bp, Shigella boydii
atgatcaagcgcacgccgctggaatatcagcccggcagcaaacatatctacagcgatgtcgattatatgctgcttggatttatcgtcgagtcggttaccggtcagccgcttgaccgctatgttgaagagtcgatttatcgcccgctcggcctgacacatacggtatttaacccgctgctgaaaggctttaaaccgcaacaaattgccgccacggaattgaacggcaatacccgcgatggcgtgatccatttcccgaatatccgcacctccactctctggggtcaggtgcacgatgaaaaagccttttattcgatgggcggcgtttccgggcacgcaggtttgttttccaataccggcgatattgcggtgttaatgcaaacgatgctgaacggcgggggctatggcgatgtgcagctgttcagtgcggaaacggtgaagatgttcaccaccagctctaaggaagatgccacttttggcctcggctggcgcgtgaatggtaatgccaccatgacgccgacgtttggcacgctggcaagcccgcaaacctacggtcacactggctggaccgggacagtaaccgttatcgatccggtcaatcatatggcgattgtgatgttaagcaacaagccccattcgccagttgccgatccacaaaaaaatcccaatatgttcgaaagcggtcagttaccgattgcaacttatggttgggtagttgatcaggtgtatgcggcgttgaagcaaaagtaa

SEQ ID NO: 459271 - DNA, 537 bp, Shigella boydii
atgaaacggacaatgctctatctttctctgctggctgttagttgtagcgtcagcgccgcaaaataccctgttctgacagaaagctcgccagagaaagcagggtttaacgtcaaacggcttaaccagatggatcgctggattagccagcaagttgatgccggttatcccggcgtaaacctgctgatcattaaagataatcagattgtgtatcgcaaagcctggggagcggcgaaaaagtacgatggcagcgtgttgatggaacagcctgtcaaagccaccaccgggacgctgtatgacctggcctcaaacaccaaaatgtacgccacgaacttcgccctgcaaaagctgatgagcgaaggcaaactgcatcctgacgatcggattgcgaaatatattccggggtttgccgatagtccaaatgacaccattaaaggcaaaaacaccctgcggatttctgacctgctgcatcacagcggcggtttcccggcagatccgcaatacccgaataaagcggtcgcgggcgcgttatattcctag

SEQ ID NO: 459272 - DNA, 1425 bp, Shigella boydii
atggccaaagagatcagcagtgaacttctgaacaccattcttacccgtgtcggcggaccgggaaatatcgccagttgtggtaactgtatgacgcgcctgcgtctgggtgtacatgacagttcactggttgatcccaatatcaaaacgctggaaggcgtgaagagcgtcattttgaccagcgaccaggtgcaggtcgtttttggacctggtaaagcgcatcgtgccgcaaaagcgatgagcgagctgctgggcgaggcaccggtacaggatgccgcagaaatcgccgcccagaacaaacgtcagttaaaagccaaacaaacctccggcgtgcaacaatttctcgccaaattcgccaccatcttcacgccgctgatccccggttttattgccgccggtctgctgctggggatagcgacgttaattgccacggtgatgcacgttccggcagatgctcagggcacgctacccgacgcgctgaattttatgaaggtgttcagcaaaggtttgttcaccttcctggtgattctggtgggctataacgccgcccaggcatttggcggcacgggcgtcaatggcgcaattattgccgcactctttttgctcggttataaccccgctgcaaccaccggttactacgccggttttcacgatttctttggtctgcccatcgatccgcgcggcaatattatcggcgtgctgattgccgcgtgggcctgcgcccgcattgaaggcatggtgcgccgctttatgccggacgatctcgacatgctgctgacctcgttaatcaccctgctgatcaccgctacgcttgcgtacctgatcattatgccgctgggtggctggttattcgaaggtatgtcatggctgtttatgcacctgaacagtaatccgttcggttgtgcggttttagccgggctgttcctgatcgccgtggtatttggcgtgcatcagggctttattcctgtttacctcgcgttaatggacagccagggattcaacagcttatttcccatcctttcaatggcaggcgcgggccaggtgggcgcggcgctggcactctactggcggtcgcaaccgcacagtgcgctacgcagtcaggtacgcggggcgattattcccggcctgctgggcgttggtgaaccgctgatttacggtgtcaccctgccccgcatgaagccgtttgtcaccgcctgtttaggcggtacggcgggcggtttgtttatcggcctgatagcctggtggggtctgccgatgggcttaaacagcgcctttgggccgtctggtctggtagcgctgccgctgatgacttccgcacaaggcatccttccggccatggcggtttatgctggcgggattctggtggcatgggtttgcgggtttattttcaccacgctctttggctgccgtaacgtcaatctggactga

SEQ ID NO: 459273 - DNA, 897 bp, Shigella boydii
atgcaacttgaaaagatgattactgaaggctcgaacgccgcctcggctgaaattgaccgcgtatcaacgctggaaatgtgccggattatcaacgatgaagataaaaccgtaccgcttgccgttgagcgcgtactgccggatatcgccgcggcgatcgatgttatccacgcccaggtaagcggcggcgggcgtctgatttacctcggtgcgggaacatccggtcgtctggggattctggatgccagcgaatgtccgcccacctacggcgtgaaaccgggtctggtggttggtttgattgctggcggcgaatatgccattcagcacgcggtggaaggcgcggaagatagccgggaaggcggtgttaatgatctgaaaaatattaatttaacggcacaggatgtggtggttggcattgctgccagcggtcgcacgccgtatgtgattgccggactggaatacgcacgccagctcggctgccgcacagtgggaatttcctgtaatccggggagcgccgtttcaaccaccgctgagtttgccattacaccgattgtaggtgccgaagttgttaccggttcttcgcggatgaaagcaggtacagcgcagaaactggtgctcaatatgctttccaccgggctgatgattaaatccggcaaagtgttcggcaaccttatggtcgatgtggtcgccaccaacgaaaaactgcatgtgcgccaggtcaatatcgttaaaaacgccaccggatgtaatgccgaacaagcggaagcggcgttaattgcctgcgagcgcaactgtaaaacggccattgtgatggtgctgaaaaatctcgatgccgcagaagctaaaaaacgcctggatcaacacggcggctttattcgtcaggttttagacaaggaataa

SEQ ID NO: 459274 - DNA, 858 bp, Shigella boydii
atgttgtacctgacgaaaataagcaatgcggggagtgaattcaccgaaaacgagcaaaaaatcgctgactttctgcaggccaacgtgagtgagctgcaatccgtttcttcacggcagatggcgaaacagctcggcattagccagtcgagcatagtgaaatttgcccaaaaactcggcgcgcaaggatttactgaattgcgtatggcgttaataggcgaatacagtgccagccgggagaaaacgaataccacggcgctgcacctgcacagttcgattaccagtgatgattcgctggaagtgattgcccgcaaattgaatcgcgaaaaagagctggcgctggagcaaacctgtgcgttgttcgactacgcgcggctgcaaaaaatcattgaggtcatcagtaaagcaccgtttatccagataacgggcctgggcggatcggcgctggtggggcgcgatctgtcgttcaaactgatgaaaattggctatcgcgtggcctgcgaagccgacacgcacgtacaagccaccgtttcccaggcgttgaaaaaaggcgatgtacaaatcgctatctcttacagcggcagtaaaaaagagattgtcttgtgcgcagaagcggcacgaaagcagggggcaacggtgattgccattacttctctggctgactctccgctgcggcggctggcgcatttcacgctcgataccgtttccggtgaaaccgaatggcgtagctcgtcgatgtctacccgcacggcgcaaaattctgttaccgatttactgtttgttggtcttgtgcaactcaatgatgtggcgtcattgaaaatgattcagcgcagcagtgagctaacacaacgcctgaaatga

SEQ ID NO: 459275 - DNA, 792 bp, Shigella boydii
atgggtaaactcacgggcaagacagcactgattacgggcgcattgcagggaattggcgaaggaattgccagaacttttgcacgtcatggcgcgaacctaatcttgctggatatctcccctgagatcgaaaagctggcggacgaactgtgtggtcgtggtcatcgctgtacggcggttgtcgccgatgtgcgtgacccggcgtcggtagccgcagctatcaaacgcgcgaaggaaaaagaagggcgcattgatatcctggtgaataacgcaggcgtttgtcgtctgggcagtttcctcgatatgagcgatgacgatcgcgatttccatattgatatcaatattaaaggcgtatggaacgtcacgaaggcggtgctgccggagatgattgcgcgcaaagatggtcgcattgtgatgatgtcttcagtcactggtgatatggtggccgatcctggcgaaacggcgtacgccttaacgaaagcggcgattgttggcctgacaaaatcgctggcggtggagtacgcgcagtctggtattcgcgttaacgccatttgcccgggatacgtgcgcacaccaatggcggaaagcattgcccgccagtcgaacccggaagatccagagtcggtgctgactgaaatggcgaaagcaatcccgatgcgtcgcctcgccgatccgctggaagtcggcgaactggcggccttcctcgcatcggatgaatccagctatttaactggtacacagaatgtgattgatggcggcagcacactgccggagacggttagcgtcggtatctga

SEQ ID NO: 459276 - DNA, 1017 bp, Shigella boydii
atggccgttaacttactgaaaaagaactcactcgcgctggtcgcttctctgctgctggcgggccatgtacaggcaacggaactgctgaacagttcttatgacgtctcccgcgagctgtttgccgccctgaatccgccgtttgaacagcaatgggcaaaagataacggcggcgacaaactgacgataaaacaatctcatgccgggtcatcaaaacaggtgctggcaattttgcagggcttaaaaaccgacgttgtcacttataaccaggtgaccgacgtacaaattctgcacgacaaaggcaagctgatcccggctgactggcagtcgcgcctgccgaataatagctcgccgttctactccaccatgggcttcctggtgcgtaagggcaacccgaagaatatccacgactggaacgacctggtgcgctccgacgtgaagctgattttcccgaacccgaaaacgtcgggtaacgcgcgttatacctatctggcggcatggggcgcagcggataaagctgacggtggcgacaaagccaaaaccgaacagtttatgacccagttcctgaaaaacgttgaagtgttcgatactggcggtcgtggcgcgaccaccacttttgccgagcgcggcctgggcgatgtactgatcagcttcgagtcggaagtgaacaacatccgtaaacagtatgaagcgcaaggctttgaagtggtgattccgaaaaccaacattctggcggaattcccggtggcgtgggtcgataaaaacgtgcaggccaacggtacggaaaaagcagcaaaagcctacctgaactggctctacagcccgcaggcgcagaccatcatcaccgactattactaccgcgtaaataacccggaagtcatggacaaactgaaagataaattcccgcagaccgagctgttccgcgtggaagacaaatttggctcctggccggaagtgatgaaaacccacttcaccagcggcggcgagttagacaagctgttagcggcggggcgtaactga

SEQ ID NO: 459277 - DNA, 834 bp, Shigella boydii
atgtttgcagtttcatcaagacgcgtgctgccgggctttaccttaagcctcggcaccagtctgctgtttgtgtgcctgattttgctgctgccgctctccgcgctggtgatgcagctggctcagatgagctgggcgcagtactgggaggtgatcaccaacccacaagtggtcgcggcctacaaagtgacgctgctgtcggcgtttgtggcatcgatttttaacggcgttttcggtctgctgatggcgtggattttaacacgttatcgctttccgggccgcacgctgcttgatgcgctgatggatttaccctttgcgctgccaacggcagtcgccggtttaacgctggcctcgctcttttccgtaaacggtttttacggtgaatggctggcgaagtttgatatcaaagtcacctatacctggcttggtattgcggtggcgatggcctttaccagcattccgtttgtggtgcgtaccgtgcagccggtgctggaagagttaggcccagaatatgaagaagcggcggaaacgcttggtgcaacgcgctggcagagtttctgcaaagtggtgctgccggaactttctccagcgctggtggcgggcgtggcgttgtcgtttacccgtagtcttggtgagtttggcgcggtgatatttatcgccgggaacatcgcctggaagacggaagtgacgtcgctgatgatttttgtgcgcttgcaggagtttgattacccggcggcgagcgcgattgcttcggtgatcctcgcggcatccctgctgctgctgttctcaattaacactctgcaaagtcgctttggtcggcgtgtggtaggtcattaa

SEQ ID NO: 459278 - DNA, 876 bp, Shigella boydii
atggcggaagttacccaattgaagcgttatgacgcgcgcccgattaactggggcaaatggtttctgattggcatcgggatgctggtatcggcgttcatcctgctggtgccgatgatttatatcttcgtacaggcgttcagcaaagggctgatgccggttttacagaatctggccgatccggacatgctgcacgccatttggctgacggtgatgattgcgctgattgccgtaccggtgaacctggtgttcggcattctgctggcgtggctggtaacgcgctttaacttccccggacgccagttactgctgacgctactggacattccgtttgccgtatcgccggtggttgccggtctggtgtatctgctgttctacggctctaacggtccgctgggcggctggctggatgaacataatttgcagattatgttctcctggccgggaatggtgctggtcaccatctttgtgacctgtccttttgtggtgcgcgagctggtgccggtgatgttaagccagggcagccaggaagacgaagcggcgattttgcttggcgcgtctggctggcagatgttccgtcgcgtcacattgccgaacattcgctgggcgctgctgtatggtgtggtgctaaccaacgcccgcgcgattggcgagtttggtgcggtgtcggtggtttccggctcgattcgcggcgaaacactttcgctgccgttacagattgaattgctggagcaggactacaacaccgtcggctcctttaccgccgccgcgctgttgacgctgatggcgattatcaccctgtttttaaagagtatgttgcagtggcgtctggagaatcaggaaaaacgcgcgcagcaggaggagcatcatgagcattga

SEQ ID NO: 459279 - DNA, 1098 bp, Shigella boydii
atgagcattgagattgccaatattaagaagtcgtttggtcgcacccaggtgctgaacgatatctcactggatattccttctggtcagatggtcgcgctgctggggccgtccggttccggaaaaaccacgctgctgcgcattattgccgggctggagcatcaaaccagcgggcatattcgcttccacggtaccgacgtgagccgcctgcacgcacgcgatcgtaaagtcggtttcgtgttccagcattacgcgctgttccgtcatatgacggtgttcgacaatatcgcttttggcctgacggtgctgccacgtcgcgagcgcccgaattccgcagccatcaaagcgaaagtgacaaaattgctggagatggtccagcttgcgcatctggcggatcgttatccggcacagctttccggcggccagaaacagcgcgtggcgctggcgcgcgcgctggctgttgaaccgcaaattctcctgcttgatgaaccgtttggcgcgctggatgcgcaggtgcgtaaagagctgcgtcgctggctgcgtcaactgcatgaagagctgaaattcaccagcgtgttcgtgacccacgaccaggaagaagcgaccgaagtagctgatcgtgtagtggtgatgagcctgggcaatatcgagcaggctgatgcgccggaccaggtatggcgcgaaccagcgacccgatttgtgctcgaatttatgggcgaagtgaaccgcctgcagggaaccattcgcggcgggcagttccatgttggcgcacatcgctggccgctggggtatacgcctgcgtatcaggggccggtggatctcttcctgcgcccgtgggaagtggatatcagccgccgtaccagtctcgattcgccgctgccggtacaggtactggaagccagcccgaaaggtcactacacccaattagtggtgcagccgctggggtggtacaacgaaccgctgacggtcgtgatgcatggcgacgatgccccgcagcgtggcgagcgtttattcgttggtctgcaacatgcgtggctgtataacggcgacgagcgtatcgaaacccgagatgaggaacttgctctcgcacaaagcgcctga

SEQ ID NO: 459280 - DNA, 912 bp, Shigella boydii
gtgagtacattagaacaaacaataggcaatacgcctctggtaaagttgcagcgaatggggccgaataacggcagtgaagtctggttgaaactggaaggcaataacccggcaggttcggtgaaagatcgtgcggcactttcgatgatcgtcgaggcggaaaagcgcggggaaattaaaccgggtgatgtgttaatcgaagccaccagtggtaacaccggcattgcgctggcaatgattgccgcgcttaaaggctatcgcatgaaattgctgatgcccgacaacatgagccaggaacgccgtgcggcgatgcgtgcttatggtgcggaactgattcttgtcaccaaagagcagggcatggaaggtgcgcgcgatctggcgctggagatggcgaatcgtggcgaaggaaagctgctcgatcagttcaataatcccgataacccttacgcccattacaccactaccgggccggaaatctggcagcaaaccggcgggcgcattacccattttgtctccagcatgggaacaaccggcactatcaccggcgtttcacgctttatgcgcgaacaatccaaaccggtgaccattgtcggcctgcagccggaagaaggcagcagtattcccggcattcgccgctggcctgcggaatatctgccggggattttcaacgcttctctggtggatgaggtgctggatattcatcagcgcgatgcggaaaacaccatgcgcgaactggcggtgcgggaaggaatattctgtggcgtcagctcaggcggcgcggttgctggagcactgcgggtggcaaaagctaaccctggtgcggtggtggtagcgatcatctgcgatcgtggcgatcgctacctctccaccggagtgtttggggaagagcattttagccagggggcggggatttaa

SEQ ID NO: 459281 - DNA, 369 bp, Shigella boydii
atgaagaaaatcatttgtctggtcattacactactaatgacactccccgcttacgcgaagttaactgcccatgaagaagcccgcatcaacgccatgctggagggattatcacagaaaaaggatttgatatttgtgcgcaacggtgatgaacatacctgcgatgaagcggtttctcatctgcgtctgaagctcggcaatacccgtaaccgcattgacactgccgagcagtttattgataaggttgcttcgtcgtcatcgattaccgggaagccgtatattgtgaagatccccggtaagagcgatgagaacgcacagccttttttacatgcgctaattgcgcagacggataaaacggtgcctgcgcaataa

SEQ ID NO: 459282 - DNA, 852 bp, Shigella boydii
atgagtagtttgttgttgtttaacgataagagcagggcgctgcaggcggatatcgtcgccgtgcagtcgcaggtggtttacggcagcgtgggcaacagcattgccgtgcctgctatcaaacagaacggtctgaatgtttttgccgtgccgacggtattgctgagcaatacgccgcattatgacactttctacggtggtgcgattccggatgaatggtttagcggttatttgcgtgcgcttcaggagcatgatgcgctgcgccagctgcgcgctgtaaccacgggctatatgggaacggcatcgcaaatcaaaatccttgccgagtggctgactgcgctacgcaaagaccatcctgacctattgatcatggtcgatccggtgattggcgatattgatagcggaatttatgtcaaacctgaccttcccgaggcgtatcgacaatatttactgccgctggcgcagggaattacccccaatatctttgagctggaaatcctgaccggtaaaaattgccgcgatctcgacagtgccattgctgccgcaaaaagtctgctttcagacacattaaaatgggtggtgattaccagcgcctccggtaatgaagaaaatcaggagatgcaggtggtggtggtcagtgccgacagcgtgaatgtcatttcccattcacgggtaaaaaccgacctgaaagggactggcgacctgttttgtgctcagcttatcagtggtttgctgaaagggaaggcgttaaacgatgcggtgcaccgtgcggggttgcgcgtactggaagtgatgcgctacacccagcagcatgagagcgatgaattgattttgccgccgctggcggaagcataa

SEQ ID NO: 459283 - DNA, 474 bp, Shigella boydii
atgctaaacatcgtactttacgaaccagaaattccgccaaatactggcaacatcatccgtctttgcgctaataccggctttcgtctgcatatcatcgaaccgatgggatttgcctgggacgataagcgcctgcgccgcgcggggctggactatcacgagtttaccgccgttacgcgtcatcatgactatcgcgcgttcctcgaagcagaaaatccccagcgcctgtttgccctcaccacgaaaggtacgcctgctcacagcgccgtaagctatcaggatggcgattatctgatgttcggcccggaaacacgcggcctgccagcgagcattcttgatgccctgcccgctgaacaaaaaattcgcattccgatggtgccggacagccgcagcatgaatctgtccaatgcggtgtcggtagtggtgtatgaagcctggcggcagctgggatatccgggagcgttgttgagagattag

SEQ ID NO: 459284 - DNA, 822 bp, Shigella boydii
atgtcgtgtgaagaactggaaattgtctggaacaatattaaagccgaagccagaacgctggcggactgtgagccaatgctggccagtttttaccacgcgacgctactcaagcacgaaaaccttggtagtgcactgagctacatgctggcgaacaagctgtcatcgccaattatgcctgctattgctatccgtgaagtggtggaagaagcctacgccgctgacccggaaatgatcgcctctgcggcctgtgatattcaggcggtgcgtacccgcgacccggcagtcgataaatactcaaccccgttgttatacctgaagggttttcatgccttgcaggcctatcgcatcggtcactggttgtggaatcaggggcgtcgcgcattggcaatctttctgcaaaaccaggtttctgtgacgttccaggtcgatattcacccggcagcaaaaattggccgtggcattatgctcgaccacgccacgggcatcgttgtgggtgaaacggcggtaattgaaaacgacgtatcgattctgcaatctgtgacgcttggcggtacgggtaaatctggtggtgaccgtcacccgaaaattcgtgaaggtgtgatgattggcgcgggcgcgaaaatcctcggcaatattgaagttggtcgcggcgcgaagattggcgcaggttccgtggtgctgcaaccggtgccgccgcatacaaccgccgctggcgttccggctcgtattgtcggtaaaccagacagcgataagccatcaatggatatggaccagcatttcaacggtattaaccatacatttgagtatggggatgggatctaa

SEQ ID NO: 459285 - DNA, 1020 bp, Shigella boydii
atgaaccaacgtaatgcttcaatgactgtgatcggtgccggctcgtacggcaccgctcttgccattaccctggcaagaaatggccacgaggttgtcctctggggccatgaccctgaacatatcgcaacgcttgaacgcgaccgctgtaacgccgcgtttctccccgatgtgccttttcccgatacgctccatcttgaaagcgatctcgccactgcgctggcagccagccgtaatattctcgtcgtcgtacccagccatgtctttggtgaagtgctgcgccagattaaaccgctgatgcgtcctgatgcgcgtctggtgtgggcgaccaaagggctggaagcggaaaccggacgtctgttacaggacgtggcgcgtgaggccttaggcgatcaaattccgctggcggttatctctggcccaacgtttgcgaaagaactggcggcaggtttaccgacggctatttcgttggcctctaccgaccagacctttgccgatgatctccaacaattgctgcactgtggcaaaagtttccgcgtttacagcaacccggatttcatcggtgtgcagcttggcggtgcggtgaaaaacgtcattgccattggcgcggggatgtccgacggtatcggttttggtgcgaatgcgcgtacggcactgatcacccgtgggctggctgaaatgtcgcgtcttggcgcggcgctgggtgccgagcctgccacctttatgggcatggcggggctgggcgatcttgtgcttacctgtaccgacaaccagtcgcgtaaccgccgttttggcatgatgctcggtcagggcatggatgtacaaagcgcgcaggagaagattggtcaggtggtggaaggctaccgcaatacgaaagaagtccgcgaactggcgcatcgcttcggcgtagaaatgccaataaccgaggaaatttatcaagtattatattgcggaaaaaacgcgcgcgaggcagcattgacgttattaggtcgtgcacgcaaggacgagcgcagcagccactaa

SEQ ID NO: 459286 - DNA, 468 bp, Shigella boydii
atgtcagaacaaaacaacactgaaatgactttccagatccaacgtatttataccaaggatatctctttcgaagcgccgaacgcgccgcacgttttccagaaagattggcaaccagaagttaaacttgatctggatacggcatcttcccaactggcagatgacgtatacgaagtggtactgcgtgttaccgtaacggcctccctgggcgaagaaaccgcgttcctgtgtgaagttcagcagggcggtattttctccatcgcgggtatcgaaggcacccagatggcacattgcctgggcgcatactgcccgaacattctgttcccgtatgctcgtgagtgcatcaccagcatggtatcccgcggtacattcccgcaactgaaccttgcgccggttaacttcgatgcgctgttcatgaactatttgcagcagcaggctggcgaaggtactgaagaacatcaggatgcctga

SEQ ID NO: 459287 - DNA, 252 bp, Shigella boydii
atggccaatgttgaaatctataccaaagaaacctgcccgtattgccatcgtgcaaaagcactgctgagcagcaagggcgtgagttttcaggagttgccgatcgatggcaatgccgccaagcgtgaagagatgatcaaacgcagcggtcgcaccacggttccccagatttttattgacgcacagcacattggcggctgtgatgacttgtatgcattggatgcacgtggtggactggatcccctgctgaaataa

SEQ ID NO: 459288 - DNA, 432 bp, Shigella boydii
atgcaagaaattatgcaatttgttggccgtcatcccatactgagtatcgcctggatcgcgttactggtggcggttcttgtgactacgtttaagagcctgacctcgaaagtgaaggtgattactcgtggtgaagctacgcgtctgatcaacaaagaagacgctgtggttgtggatttacgtcagcgtgatgacttccgtaaaggccatatagcaggttctatcaatctgttgccgagcgaaatcaaagccaacaatgttggtgagcttgagaagcacaaagacaaaccggttatcgtggtagacggttctggcatgcagtgccaggagcctgcaaacgcgctgacgaaagctggttttgcgcaagtattcgtgctgaaagagggcgttgctggctgggctggcgaaaacttgcctctggtgcgcggcaaataa

SEQ ID NO: 459289 - DNA, 1545 bp, Shigella boydii
atgtcggtttctaaaaaacctatggtactggtgattctggatggctatggctatcgtgaagaacagcaggataacgccatttttagtgctaaaaccccggtaatggatgcactgtgggccaatcgtccgcataccctgatcgacgcttccggtctggaagtcggtctgcctgaccgtcagatgggtaactccgaagtaggccacgttaacctgggtgccggccgcatcgtgtatcaggacctgactcgtctggacgttgaaatcaaagatcgcgctttctttgctaatccagtgctgactggcgcggtagataaagcgaaaaacgcaggtaaagcagtacacattatgggtctgctctccgcaggcggcgtacacagccacgaagatcacatcatggcgatggtagaactggcagctgaacgcggcgcagaaaaaatctacctgcacgcattccttgacggtcgcgacaccccgccgcgcagtgctgaatcctcgctgaaaaaatttgaagagaaatttgctgcgctgggtaaaggccgcgtagcgtccatcattggtcgttactacgcgatggaccgcgataaccgttgggatcgcgttgaaaaagcctatgacctgctgactctggcgcagggtgagttccaggccgatactgccgttgctggtttgcaggcagcttatgctcgcgacgaaaacgacgagttcgtgaaagcgaccgttattcgtgcagaaggtcagccagatgcggcaatggaagacggcgatgcgctgattttcatgaacttccgtgctgaccgcgcgcgcgaaatcactcgtgcattcgtaaacgcagatttcgacggcttcgcgcgtaagaaagtggttaacgtcgatttcgtgatgctgaccgaatacgccgctgacatcaaaactgcggttgcttacccacccgcttccctggttaacaccttcggcgagtggatggcgaaaaacgacaaaactcagttgcgtatttccgaaaccgaaaaatatgcccacgttactttcttcttcaacggtggcgtagaagagtcattcaaaggcgaagatcgcattctgatcaactcaccgaaagtggctacctacgatctgcaaccggaaatgagctccgcagagctgaccgaaaaactggttgcggccatcaagagcggcaaatacgacaccattatctgtaactatccgaacggcgacatggtaggtcacaccggggtgatggaagcggcggttaaagcggttgaagcactggatcactgcgtggaagaagtcgcgaaagcggttgagtccgtgggtggacaactgctgatcaccgctgaccacggtaacgctgaacagatgcgcgatccggcaacgggtcaggcacacacggcacacaccaacctgccagttccgctgatttacgttggtgataagaacgtgaaagcggttgcaggcggcaaactttctgacatcgcgccgaccatgttgtcgctgatgggtatggaaatcccgcaagagatgactggtaagccgctgttcatcgtggaataa

SEQ ID NO: 459290 - DNA, 1260 bp, Shigella boydii
atgacacgggccgtgaaaccgcgcaggtttgcaatcaggcccatcatctacgccagcgttcttagcgctggcgtattgttgtgcgccttttccgcccacgcggatgagcgtgaccaactcaaatctattcaggccgatatcgccgcaaaagagcgcgcggtacgccaaaagcaacaacaacgcgcaagcctgctcgcacaattgaaaaagcaggaagaagcgatctctgaagccacccgtaagctgcgcgaaacgcaaaacacgctcaatcaactcaataaacagattgatgagatgaacgcgtcgattgccaaactggagcagcaaaaagccgcccaggagcgcagcctcgccgcacaactggatgccgcattccgtcagggcgagcataccggtattcagctaattctcagcggtgaagaaagccagtgtggacagcgtttacaggcttatttcggctatctcaaccaggcgcgacaagaaaccattgcccagttgaagcaaacgcgtgaagaagtcgccatgcagcgtgctgaactggaagagaaacaaagcgagcaacaaacgctgttatatgaacagcgcgcccaacaggcgaaactgactcaggctctgaacgagcgtaaaaagacgctggcggggctggaatcttccatccagcaaggtcagcagcagctaagtgaactgcgtgccaacgaatcccgtctgcgtaacagcattgcccgtgcggaagccgcggcgaaagcgcgtgctgaacgagaagcgcgtgaggcccaggcggttcgcgaccgccagaaagaagcgacgcgcaaaggcaccacctacaaaccgaccgaaagcgaaaaatcgctgatgtcccgaactggtggtctgggtgcgccgcgtggtcaggcattctggccggttcgcgggccgacgctgcatcgctatggcgagcagctacagggtgaattacgctggaaagggatggttatcggtgcctctgaaggtactgaagttaaagcaattgccgacggtcgagtgattctggctgactggctgcaaggttacggtctggtggtggtggttgagcacggtaaaggcgacatgagtctttacggctataatcagagcgcactggtgagcgttggttcgcaggttcgcgcgggccagccaattgcactggtgggcagcagtggcggtcagggtcggccttcactctatttcgaaattcgccgccagggtcaggcggtcaatccacagccgtggttgggaagataa

SEQ ID NO: 459291 - DNA, 960 bp, Shigella boydii
ttgtttccatttcgtcgtaacgttcttgcatttgccgctctgttggcgctctcctcccccgtacttgctggcaaacttgccatcgtcattgatgattttgggtatcgcccgcacaacgaaaaccaggtgctggcgatgccctccgctatctccgtcgctgtattacccgattcaccgcacgccagagagatggcgaccaaagcgcataacagcgggcacgaagtgttgattcatctcccgatggcaccactgagtaaacagccgctggagaaaaatacgctgcgcccggagatgagcagcgacgaaattgagcgcattattcgtagtgcggtcaataacgtgccctatgccgtggggatcaacaaccacatgggtagcaagatgacctctaacctgtttggtatgcagaaagtgatgcaggcactggagcgttacaatctttacttcctcgacagcgtaaccatcggtaatacccaggcgatgcgcgccgcgcaaggtactggcgtgaaggttattaaacggaaggtgttcctcgacgattcgcagaacgaagcggacatccgtgtgcaatttaatcgcgcaattgatctggcgcgtcgcaacggttcaaccattgccattgggcatcctcaccctttaacggtacgcgtgctacaacagatggtttataacctgccgccagacattacgctggtgaaagccagcagcttgctgaatgaaccgcaggttgatacttctacaccgccgaaaaacgctgtgcctgatgcaccgcgtaatccgttccgtggcgtgaagctgtgcaaaccgaagaaaccgatagaacctgtttatgctaatcgcttctttgaagtattaagcgaaagcatcagccagagcacgctgatcgtttacttccagcatcagtggcaaggctggggtaaacagcccgaagcggcgaagtttaacgctagcgcaaattaa

SEQ ID NO: 459292 - DNA, 1035 bp, Shigella boydii
atgatgaacagcaccaataaacttagtgttattattccgttatataatgcgggcgatgatttccgcacttgtatggaatctttaattacgcaaacctggactgctctggaaatcattattattaacgatggttcaacggataattctgttgaaatagcaaagcattacgcagaaaactatccgcacgttcgtttgttgcatcaggcgaatgctggcgcatcggtagcgcgtaatcgtgggatcgaggtggcgacgggcaaatatgtcgcttttgtcgatgctgacgatgaggtctatcccaccatgtacgaaacgctgatgaccatggcgttagaggacgacctcgacgtggcgcagtgcaacgctgactggtcttttcgtgaaacgggagaaacctggcaatccatccccagcgatcgccttcgctcaaccggcgtattaaccggcccggactggctgcggatggggctttcttcgcgccgttggactcacgttgtctggatgggggtttatcgccgtgatgttattgttaaaaataacattaaatttattgccggattacatcatcaggatattgtctggacaacagaattcatgtttaacgcgctgcgtgcgcgatataccgagcaatcattatataaatattatctgcataatacgtcagtgagtcggttgcatagacaagggaataaaaaccttaattatcaacgtcactatattaagattacccgcctgctggagaaattaaatcgaaattatgctgacaaaattacgatttatccggaatttcatcagcaaataacttacgaagcattgcgtgtttgccatgcggtgcgcaaagagccggatattcttacccgccaacggatgattgccgagatatttacttccggtatgtataagcgcctgattaccaatgtgcgcagcgtgaaggtcggttaccaggcgttactgtggtctttccgcttatggcaatggcgcgacaaaacgcggtcgcaccatcgcattacgcgtagcgcctttaatttgcgctag

SEQ ID NO: 459293 - DNA, 1026 bp, Shigella boydii
atgaaagcgttatccaaactgaaagcggaagagggcatctggatgaccgacgtccctgtaccggaactcgggcataacgatctgctgattaaaatccgtaaaacagccatctgcgggactgacgttcacatctataactgggatgagtggtcgcaaaaaaccatcccggtgccgatggtcgtaggccatgaatatgtcggtgaagtggtaggtattggtcaggaagtgaaaggcttcaaaatcggcgatcgcgtttctggcgaaggccatatcacctgcggtcactgtcgcaactgtcgtggcggtcgtacccatctgtgccgcaacacgatcggcgtcggcgttaaccgtccgggctgcttcgccgaatatctggtgatcccggcgttcaacgccttcaaaatcccagacaatatctccgacgacctggcttccatttttgatcccttcggtaacgccgtgcataccgcgctgtcgttcgatctggttggcgaggatgtgctggtctctggtgcaggtccgataggtattatggctgcggcggtggcgaaacacgttggtgcacgcaatgtggtgatcactgatgttaacgaataccgccttgagctggcgcgcaaaatgggtatcacccgtgcggttaacgtcgcgaaagaaaaccttaatgatgtgatggctgaactgggcatgaccgaaggctttgatgtcggtctggaaatgtccggtgcgccgccagcgtttcgtaccatgcttgacaccatgaaccacggcggccgtattgcgatgctgggtattccgccgtctgatatgtctatcgactggaccaaagtgatctttaaaggcttgttcattaaaggtatttacggtcgtgagatgtttgaaacctggtacaagatggcggcgctgattcagtctggcctcgatctctcgccgatcattacccatcgtttctctatcgatgatttccagaagggctttgacgctatgcgttcgggccagtccgggaaagtaattctgagctgggattaa

SEQ ID NO: 459294 - DNA, 1197 bp, Shigella boydii
atgcgtggagaattttatcagcagttaaccaacgatctggaaaccgcacgggcggaagggttgtttaaagaagagcgcattattacgtctgcgcagcaagcagatatcactgtggctgatggaagccacgtcattaacttttgtgccaacaactatctcgggctggcgaatcatccggatctgattgcggcagcaaaggcgggaatggattctcacggtttcggcatggcttcggtgcgttttatttgcggcactcaggacagccataaagagcttgaacaaaaactggcggcattcctggggatggaagatgcgattctctactcttcctgctttgatgctaacggtggactgtttgaaacgctgctgggtgcggaagacgccattatctccgacgcactgaaccacgcgtctattattgatggtgtgcgtctgtgcaaagctaaacgctatcgctatgccaacaacgatatgcaggagctggaagcacgtctgaaagaagcgcgtgaagccggtgcgcgtcatgtgctgattgccaccgatggtgtgttctcaatggacggcgtgattgccaacctgaaaggcgtttgcgatctggcagataaatacgatgccttggtgatggtggatgactcccacgcggtcggttttgtcggtgaaaatggtcgtggttcccatgaatactgcgatgtgatgggccgggtcgatattatcaccggtacgcttggtaaagcgctgggcggggcttctggtggttataccgcggcgcgcaaagaggtggttgagtggctgcgccagcgttctcgtccgtacctgttctccaactcgctggcaccggccattgttgccgcgtccatcaaagtactggagatggtcgaagcgggcagcgaactgcgtgaccgtctgtgggcgaacgcgcgtcagttccgtgagcaaatgtcggcggcgggctttaccctggcgggagccgatcacgccattattccggtcatacttggtgatgcggtagtggcgcagaaatttgcccgagagctgcaaaaagagggcatttacgtcaccggtttcttctatccggtcgttccgaaaggtcaggcgcgtattcgtacccagatgtctgcggcgcatacccctgagcaaattacgcgtgcagtagaagcattcacgcgtattggtaaacaactgggcgttatcgcctga

SEQ ID NO: 459295 - DNA, 933 bp, Shigella boydii
atgatcatcgttaccggcggcgcgggctttatcggcagcaacatcgttaaggccctgaatgataaaggcatcaccgatattctggtggtggacaacctgaaagacggcaccaagtttgtgaacctggtggatctggatatcgcggactatatggataaggaagacttcctgatccagattatggctggcgaagagttcggcgatgtcgaagcgattttccacgaaggcgcatgctcttccaccaccgagtgggacggcaagtatatgatggataacaactatcaatactccaaggagctgctgcactactgcctggagcgcgaaatcccgttcctgtacgcttcttccgcagccacctacggcggacgcacctccgactttattgaatcccgcgagtacgaaaaaccgttgaacgtctacggttactcaaaattcctgtttgatgaatatgttcgccaaatcctgcctgaagcgaactcgcagattgttggcttccgctatttcaacgtttatggaccgcgtgaaggccataaaggcagcatggcgagcgtcgctttccatctcaacactcagcttaacaacggtgaatcaccgaagctgtttgaaggtagcgagaacttcaaacgtgacttcgtctatgtgggcgacgtggcagatgtaaacctgtggttcctggaaaatggcgtttccggtatcttcaacctcggtactggtcgtgcggaatccttccaggccgtagcagatgctactctggcttatcacaagaaaggccagatcgaatacattccgttcccggataagctgaaaggccgctaccaggcgttcactcaggcagatctgacaaatctgcgcgcggcgggttacgacaaaccgttcaaaaccgttgctgaaggtgtaacggaatacatggcctggctgaatcgcgacgcataa

SEQ ID NO: 459296 - DNA, 1047 bp, Shigella boydii
atgaaaatactggtgatcggcccgtcttgggttggcgacatgatgatgtcgcaaagtctctatcgcacgctccaggcgcgctatccccaggcgataatcgatgtgatggcaccggcatggtgccgtccattattatcgcggatgccggaagttaacgaagctatccctatgcctctcggtcacggagcgctggaaatcggcgaacgccgcaaactgggtcatagcctgcgtgaaaagcgctacgaccgcgcctacgtcttacccaactccttcaaatctgcattagtgcctttcttcgcgggtattcctcatcgcaccggctggcgcggcgagatgcgctacggtttactcaacgatgtacgcgtgctcgataaagaagcctggccgctaatggtggaacgctatgtcgcgctggcctatgacaaaggcattatgcgtaccgcacaagatctgccgcagccattgttatggccgcagttgcaggtgagcgaaggtgaaaaatcatatacctgtaatcaattttcgctttcatcagaacgtccgatgattggcttttgcccgggtgcggagtttggtccggcaaaacgctggccacactaccactatgcggaactggcaaagcagctgattgatgaaggttatcaggtggttctgtttggctctgcgaaagatcatgaagcgggcaatgagattcttgccgctttgaataccgagcagcaggcatggtgtcggaacctggcgggggaaacacagcttgatcaagcggttatcctgattgcagcctgtaaagccattgtcactaacgattctggcctgatgcacgttgcggcggcgctcaatcgtccgctggttgccctgtatggtccaagtagcccggacttcacaccgccgctatcccataaagcgcgcgtgatccgtctgattaccggctatcacaaagtgcgtaaaggtgacgctgcggagggttatcaccagagcttgatcgacattactccccagcgcgtactggaagaactcaacacgctattgttacaagaggaagcctga

SEQ ID NO: 459297 - DNA, 981 bp, Shigella boydii
atgcgggttttgatcgttaaaacatcgtcgatgggcgatgttctccatacgttgcccgcactcactgatgcccagcaggcaatcccagggattaagtttgactgggtggtggaagaagggttcgcacagattccttcctggcacgctgccgttgagcgagttattcctgtggcaatacgtcgctggcgtaaagcctggttctcggcccccataaaagctgaacgcaaagcgtttcgtgaagcgctacaagcagagaactatgacgcagttatcgacgctcaggggctggtaaaaagcgcggcactggtgacacgtctggcgcatggcgtaaagcatggattggactggcaaaccgctcgcgaacctttagccagcctgttttacaattgtaagcatcatattgcaaaacagcagcacgccgtagaacgcacccgcgaactgtttgccaaaagtttgggctatagcaaaccgcaaacccagggcgattatgctatcgcacagcattttctgacgaacctgcctacagatgctggcgaatatgccgtatttcttcatgcgacgacccgtgatgataaacactggccggaagaacactggcgagaattgattggtttactggctgattcaggaatacggattaaacttccgtggggcgcgccgcatgaggaagaacgggcgaaacgactggcggaaggatttgattatgttgaagtattgccgaagatgagtctggaaggcgttgcccgcgtgctggccggggctaaatttgtagtgtcggtggatacggggttaagccatttaacggcggcactggatagacccaatatcacggtttatggaccaaccgatccgggattaattggtgggtatgggaagaatcagatggtttgtagggctccggggaatgagttgtctcaattgacagcaaatgctgttaagcgattcattgaagaaaacgctgaaaacgctgctatgatttaa

SEQ ID NO: 459298 - DNA, 1254 bp, Shigella boydii
atgtcgttttgttggaatgaaattaattctggtataaagtctttaattctcatattatgtattttttctttaatgactttgtctttatgggatgatgttgcaacaaagtttcttcatgcagctggaattatatctgcattgtattttcttgcgacaccaaaaaaaacaataactaataatcctactttgttaattttcatctcattatgtcttttgggtatcgtaaatatcatctggtattcacattataaagtttcaggctctgtttataccaatgcatatcgtggcccaatggaaacaggaaaaattgccttgtgtagcgcttttattttcttagttctttttgctaaaaatgagatgagaacaaaaataaaatttgggaaactaattctgttcgcatccctggcaacgcagttacttttttttgcgcatgccatgtggcaacatttctatttaaacgtcgaccgtgttgcattatcagcttcccacgctacaacagcaggctacatcatcctttttccttctttactggcatcaattctcattttaaaatccgactttagacataaaacaacattatatacaattaacttcatgcttagcttatgtgctgtcatagtaactgagacgcgtgcagccatattagtgtttccattctttgcgttaatattaatcgtaatggatagttatattaataagcgaattaattataagttatattgttttattgcgattgcattattagcaggtgtattttcttttaaagatacattgcttatgagaatgaatgacttaaataacgatttagttaattattcgcatgataacaccagaacttcagtcggtgcccgtctggcaatgtatgaagttggcttaaaaacatattctccaataggacaatcactggaaaaacgtgcagaaaaaatacatgagctagaagaaaaagagcctagattgagtggcgctttaccctttgtagattctcatttgcataacgatctcatagatacgttatcaacgcgtggtattcctggagttgtattaacaattttagcattttcagcaatactcatatatgccttaagaactgctaaagaaccttatattttaatcttgcttttttcactactggtagtaggcctaagtgatgtaatactcttttctaaaccggttccgactgctgtgtttgtcaccataatattgctttgtgcttattttaaagcacaatcagaccaatatttattagataagtaa

SEQ ID NO: 459299 - DNA, 984 bp, Shigella boydii
atgagcaatgattaccctttagtatccataataataccgacgtataattcatctgattacattactgaaactctaacgaaattagaaaaacaaacttacccaaattttgaaattgttattgttaatgatggttctaaagataacacatcaaacgttttgagagagtatgggttaacccactctcgattaattattatcaataaagaaaatggcggtgtttcgtctgccaggaatacaggtatccgcaaggcgcaaggacagtttatatgttttatggatgatgatgatgagatagatcctaactatctgctgaagatgtataccagacaacatgagacgggaggggatgcgatttattgtgggctttatggccattatataaaagatggtgttacttactcacctataaatacagagtttaatgaaggatctttacttttcgactttttttataaaaaggttagattccatatagggtgcttgtttataagaaaacaacttctggaagagaataatcttttttttgatgaagatttacgactaggagaagatcttgattttatctatcgactgctaattacatgcgatatgtatgcggttccatattatatgtataagcataactatagagaaaattccttaatgaactcatgtagaaccatcactcattatcgacatgagtcatttgcgcacgaaagaatctactcttctgtgatgcagttatacaaaggtaaccggaaagaagaaattcatacattattgagtcaaaatagagcttatcataaaactcgttatttatggaatgttctacttaatggtgattttaaactattgaatcaattagttgaaagcaatgaaaaagaattaagagattgtaatcttcctggcaagagagataagagacgagcaaaaatattagcatcaaaaaattatattctctggaggatggtaagactggtaaatagaaaaaagaataaacgttag

SEQ ID NO: 459300 - DNA, 1026 bp, Shigella boydii
atggatttattagctgagagtattactgaagtcgctgtctctggggaaattgctaacaccgatcgtgtgttaaatatcgcttacggtattgaccgtaactttttatttggtgcggcagtatctatgcaatcagttgttatgcataacccggaccttgcggttaagtttcatctctttaccgactacattgatgaagattatctacaacgtgttaatgcttttaccagcaaaaatgctaacgttgaagtaataatttataaagtctccaatgcctttattgatatcttccccagcctgaaacagtggtcttatgcaacattcttccgtttagttgcgttccagtatttgagtgaaactattgaaaatctgttatatatcgatgctgatgtcatctgtaaaggctcattagctggattgcttgatattaattttgatgaggataagttcgcagctgttattaaagatgtgccttttatgcaggaaaaaccagcgaagcgtctggctatagagggacttccagggaattatttcaacgccggtgtagtatatctgcagcttgaagcatgggcgaaaaatgattttatgaataaagccattgctatgctggcaagtgacccgcagcacacgaagtataaatgccttgatcaggatattttaaatattctgttctttggtcattgtaattttattagcggcgattatgattgcttttatggcattgactatgagttaaaaaataaaagcgatgaagattataaaaagaccattaccgatgatactaagctgattcattatgttggcgtaacgaagccctggaacgactggacgaattatccctgccagaagtattttaatgaggcttatcaggcttcttgctggaatgatgtggcgtttattccagccacgaatgaaaagcagtatcaagtgaaatatcaacatgcaaagaaaaatggtgatacgtttaacgcttttatttacttcattaaatttaaattaaataagtataaaagaaaactatttggataa

SEQ ID NO: 459301 - DNA, 693 bp, Shigella boydii
atgattacaagtatacgttatcgcggcttctcattttattacaaagataatgataataaatataaagaaatctttgatgaaatactggcctataattttaaaacagtaaaagtattatgtaatattgatgataccaaagtatcgttgattgatacgaaatatggtcgctatgtttttaaagtctttgctccgaaaacgaaaaggaatgaacgttttttaaaatcttttgtaaaaggtgactactatcagaatttgatcgttgaaaccgatcgtgtcataagtgcaggtcttacttttcctaatgatttttattttctggctgggcgtaaaattttcaactatgccagtgtttttatcatgcttatcgagtatgtcgagggcgtagagctcaatgatatgccgattattccagaaaatgttaaagcagaaattaaggcttcaatggaaaaattgcatgccttaaatatgctatcgggcgacccacaccggggtaactttatcgttagtaaagatggtgtcaggataattgacctatccggtaaaagctgtacggcagagcgtaaagctcgtgatcgtctggccatggaacgtcacctgggtattgccaacgaaataaaagattatggctactattcagtaatctacagaaccaaactacgcaaatttattaaaaaattaaaaggcaaagcgtaa

SEQ ID NO: 459302 - DNA, 813 bp, Shigella boydii
gtggatgatgattatttaaagtcatttaatgaaacagcaaaacaatttaatacctcaattattgtatatttaattgaccccaaatactttgctgatctgccgacgtcacagttttggtcatacgcgacatacttcagggtattgtcttttgaatatctgagtgaaagtatttccacactgctgtatctggatgccgatgttgtttgtaaaggaagcctgaaacctctcacagaaattatatttaaagatgagtttgctgcggtcattcctgacaatgatagtactcaggcggcatgtgcaaaacgcctcaacattcccgaaatgaatggacgttatttcaatgcaggcgttatctatgtcaatcttaaaaaatggcatgaagcaaatttgacaccgtatttactcaaacttttacgaggggaaactaaatatggctctcttaaatatttagatcaggatgcgttgaatatcgcatttaatatgaataatatctaccttgcgaaggattttgatactatttataccctgaaaaacgaactttatgatcgtagtcatcgaaagtatcagcaaaccattaccgataaaacagtgttgattcactatacagggataactaaaccatggcatagctgggctggatatccgtctgcatcatactttaatatcgcgcgtgaacaatctccctggaagaaatatcctcttaaagaggcgcggactgttgcagaaatgcagaaacaatataagcatctgtttgcccatggtgagtatataaaaggcataacttcattaattaagtacaagcttaagaaataa

SEQ ID NO: 459303 - DNA, 546 bp, Shigella boydii
atgaacgtaattaaaactgaaattcctgatgtgttaattttcgagccgaaagtttttggtgatgagcgtggtttctttatggaaagctttaatcagaaagttttcgaagaggctgtagggcgtaaggttgaatttgttcaggataatcattcgaagtctagtaaaggcgttttacgtgggctgcactatcagttagaaccttatgcgcaaggaaaactggtacgctgcgttgttggtgaagtttttgacgtagcggttgatattcgtaaatcgtcaccaacttttggcaaatgggttggggtgaatttatctgctgagaataagcgccagttgtggatccctgaaggatttgcacatggttttttggtgctgagtgaaacggcggagtttttgtataagacgactaattattatcatccgataagtgaaagaggggttaaatgggatgatccctgtattgatattaagtggcctctagtatcgtctcccctgttatcagaaaaagataagtgttattcatggctaacgaaacaaaatgaacagtaa

SEQ ID NO: 459304 - DNA, 879 bp, Shigella boydii
atgaaaacgcgtaaaggtattattttagcgggtggttctggtactcgtctttatcctgtgactatggcagtcagtaaacagctgctaccgatttatgataaaccgatgatctattatccgctctctacactgatgttggcgggtattcgcgatattttgattatcagtacgccacaggatactcctcgttttcaacaactgttgggtgacggtagccagtgggggctgaatcttcagtacaaagtgcaagcgagtccggatggtcttgcgcaggcgtttattatcggtgaagagtttattggtggtgatgattgtgctttgattcttggtgataatatcttttacggtcacgatctgccgaagttaatggatgccgctgttaacaaagaaagtggtgcaacggtatttgcatatcacgtaaatgatcctgaacgctatggtgtcgtggagtttgataataacggaacagccattagccttgaagaaaaaccgttagagccaaaaagcaattatgctgtaaccggactttatttctatgacaatgatgttgtagaaatggcgaaaaaccttaagccttctgcccgtggcgaactggaaattaccgatattaaccgtatttatatggagcagggacgtttatctgttgccatgatgggacgtggatatgcatggttggacacggggacacatcaaagtcttattgaggcaagcaattttatcgcaacaatagaagaacgtcaggggctgaaagtttcctgcccggaagaaattgcttaccgtaaagggtttatcgatgctgagcaggtgaaagtattagctgaaccgttgaagaaaaatgcttatggtcagtatctgctgaaaatgattaaaggttattaa

SEQ ID NO: 459305 - DNA, 900 bp, Shigella boydii
atgaatattctccttttcggcaaaacagggcaggtaggttgggaactacagcgtgctctggcacctctgggtaatttgattgctcttgatgttcactccactgattattgtggtgattttagtaatcctgaaggtgtagctgaaaccgtaagaagcattcggcctgatattattgtcaacgcagccgctcacaccgcagtagacaaagcagaatcagaaccggagtttgcacaattacttaacgcgacaagtgtcgaagcgattgcgaaagcagccaatgaagtcggcgcctgggttattcactactctactgactacgtatttccggggaccggtgaaataccatggcaggagacggatgcaaccgcaccgctaaatgtgtacggtgaaaccaagttagctggagaaaaagcattacaagagcattgtgcgaagcaccttattttccgtaccagctgggtatatgcaggtaaaggaaacaattttgccaagacaatgttacgtctggcaaaagagcgcgaagaattagctgtcattaacgatcagtttggtgcaccaacaggtgctgagttgctggctgattgtacggcacatgccattcgtgttgcactgaataaaccagaagtcgcaggcttataccatctggtagccagtggtaccacaacctggtacgattatgctgcgctggtttttgaagaggcgcgcgaagcaggcattccccttgcactcaacaagctcaacgcagtaccaacaacagcctatcctacactagctcgtcgtccgcataactctcgccttgatacagaaaaatttcagcagaactttgcgcttgtcttgcctgactggcagattggcgtgaaacgcatgctcaacgaattatttacgactacagctatttaa

SEQ ID NO: 459306 - DNA, 1086 bp, Shigella boydii
gtgaagatacttgttactggtggcgcaggatttattggttctgctgtagttcgtcacattataaataatacgcaggatagtgttgttaatgtcgataaattaacgtacgccggaaacctggaatcacttgctgatgtttctgattctgaacgctatgtttttgaacatgcggatatttgcgatgctgctgcaatggcgcgaattttttctcagcatcagccggatgcagtgatgcacctggctgctgaaagccatgttgaccgttcaattacaggccctgcggcatttattgaaaccaatattgttggtacttatgtccttttggaagctgctcgcaattactggtctgctcttgatagcgacaagaaaaatagcttccgttttcatcatatttctactgacgaagtctatggtgatttgcctcatcctgacgaagtaaataataaagaaaaattacccttatttattgagacaacagcttacgcaccaagcagcccttattccgcatccaaagcatccagcgatcatttagtccgcgcgtggaaacgtacctatggtttaccgaccattgtgactaattgctctaacaattatggcccttatcatttcccggaaaaattgattccattggttattctgaatgctctggaaggtaagatgttgcctatttatggcaaaggggatcaaattcgtgattggctgtatgtagaggatcatgctcgagcgttatatacagttgttactgaaggtaaagcaggtgaaacctataatattggtggacacaacgaaaagaaaaacatcgatgtagtgctcactatttgtgatttgttggatgagattgtcccgaaagagaaatcttaccgcgagcaaattacttatgttgccgatcgtccgggacacgatcgccgttatgcgattaatgctgagaagattggtcgcgaattgggctggaaaccacaggaaacgtttgagagcgggattcgtaaaacagtggaatggtaccttgctaatgcaaaatgggtcgaaaatatgaaaagtggtgcctatcaatcgtggattgaacagaactatgagggccgccagtaa

SEQ ID NO: 459307 - DNA, 894 bp, Shigella boydii
atgacgaatttaaaagcagttattcctgtagcgggtctagggatgcatatgttgcctgctactaaggcgattcccaaagagatgctaccgatcgtcgacaagccaatgattcagtacattgttgacgagattgtggctgcagggatcaaagaaatcctcctggtaactcacgcgtccaaaaacgcggtcgaaaaccacttcgacacctcttatgaattagaatctctccttgaactgcgcgtgaagcgtcagctgctggcggaagtacagtccatctgtccgccgggcgtgaccattatgaacgtgcgtcagggcgaacctttaggtttaggccactccattttgtgtgcacgacccgccattggtgacaacccatttgttgtggtattgccggacgttgtgatcgacgacgccagtgccgacccgctgcgctacaaccttgctgccatgattgcgcgcttcaatgaaacgggccgcagccaggtgctggcaaaacgtatgccgggtgacctctctgaatactccgtcattcagaccaaagaaccactggatcgtgaaggtaaagtcagccgcatcgtcgaatttatcgaaaaaccggatcagccgcagacgctggactcagacatcatggccgttggtcgctatgtgctttctgccgatatttggccggaactggaacgtactcagcctggtgcatggggacgtattcagctgactgatgctattgccgagctggcgaaaaaacagtccgttgatgccatgctgatgactggggacagttacgactgcggtaaaaaaatgggttatatgcaggcatttgtgaagtatggactacgcaacctcaaagaaggggtgaagttccgtaaagggattgagaagctgttaagcgaataa

SEQ ID NO: 459308 - DNA, 1395 bp, Shigella boydii
atgccatttaaaaaactctcccgacgcaccttcctgacggcaagctcggcgcttgccttcctccatacccctttcgctcgcgcacttcctgcccgacaaagcgtcaatatcaacgactacaatccacacgactggatcgcctcatttaaacaagccttcagcgaagggcaaacggtcgtcgtgcctggcggattggtttgcgacaatatcaacactggcatcttcatcccccctggcaaaacgttacacatcctgggaagcctgcgcggcaacggcagagggcgatttgtcttacaggacggcagccaggtgacaggggaggagggcggcagtatgaataacatcaccctggatgtgcgtggttctgactgcaccatcaaagggctggcgatgagcggctttggtccggtaacgcagatttatatcggcggcaaaaacaaacgggtcatgcgcaacctgaccatcgataacctgaccgttagccacgctaattacgccatcttacgccagggatttcataaccagataatcggtgccaacatcaccaactgtaagttcagcgacttacagggcgacgccattgaatggaacgtggcaattaacgacagtgatattttgatctccgaccatgtcatcgagcgcatcaactgtactaacggcaaaatcaactggggcattggcataggccttgcgggaagcacttacgataataattacccggaagatcaggcagtgaaaaacgttgtcgtggcgaatatcacgggatcggattgtcggcagttgatacatgttgaaaatggtaaacattttgttattcgtaatatcaaagcccgcaatatcacgccggatttcagtaagaaagcaggcattgataacgccacagtcgctatttacggttgtgacaatttcgtgattgataatattgaaatgattaatagcgccgggatgttaattggctatggggtaattaaaggcaaatatctctcgataccgcaaaatttccgagtgaataatattcaactggataacactcaccttgcttataaattgcgcggcatccaaatctccgccgggaatgctgtctcctttgtggcactgactaacattgagatgaagcgtgcctcgcttgagctacacaataaaccgcaacacctttttatgcgtaatatcaaggtgatgcagaaatcctctgttggaccagcattgagcatgaactttgacatgcgcaaagacgttcgcggcgtctttatggcgaaaaaagaaacactgctatctcttgcaaatgttcatgcggtgaatgaaagagggcaaagctccgtcgatatcgacaggataaatcaccatattgttaatgtggaaaagattaactttagattgccggaacggagggagtag

SEQ ID NO: 459309 - DNA, 1221 bp, Shigella boydii
atgaaggtcggcttctttttacttaaatttccgctgtcgtcggaaaccttcgttctcaaccaaatcactgcgtttattgatatgggctttgaggtggagattgtcgcgctgcaaaaaggcgatacgcaaaacacccacgcggcatggacgaaatataaccttgccgccagaacccgctggttacaggacgaacctacgggcaaagtggcgaaactgcgccaccgcgccagccagaccttacgcggcattcatcgtaaaaatacctggcaggcgctcaacctcaaacgctatggtgccgagtcgcggaacctgattttgtctgccatttgcggccaggtcgcaacaccatttcatgccgatgtatttatcgctcattttggcccggcgggggtaaccgcagcaaaactacgcgaactgggtgtcattcgcggcaaaattgctactatcttccacggcattgatatctccagtcgggaagtgctcaaccattacactcccgaatatcaacaactgtttcgccgtggcgatttgatgctaccgataagcgatctgtgggccggaaggctgcaaaaaatgggctgccccagagaaaaaatcgccgtatcgcgtatgggcgtggacatgacgcgctttagcccgcgtccggtaaaaccgcccgcaacgccgctggaaatcatttccgtcgcacgcttaaccgagaaaaaaggcctgcatgtggcgattgaagcctgccgtcagttgaaagagcagggcgtggcatttcgctatcgcatcctcggcattggcccgtgggaacgacgcctgcgcaccctcatcgaacaatatcaactggaagatgttgtagagatgccgggctttaaaccaagccacgaagtgaaggcgatgctcgacgacgcggatgtcttcctgttgccatcggttacaggtgcggatggcgatatggaaggtattccggtggcgctaatggaagcgatggcggtcggtattccggtggtttctactctgcatagcggaattccggaactggtggaggccgacaaatccggctggctggtgcctgagaacgatgctcgtgcactggcgcaacgactggtggcgtttagccaactggacaccgacgaactggctccggtcgtcaaacgtgcgcgcgaaaaagtcgaacacgattttaaccagcaggtgatcaatcgagaactcgccagcttgctgcaggctttatag

SEQ ID NO: 459310 - DNA, 1281 bp, Shigella boydii
atgaaattattgattctgggcaaccacacttgcggcaatcgcggcgacagcgccatcttgcgcggcttccttgatgccatcaacatcctcaatccacacgccgaagtggacgtaatgagccgctatccggtcagttcttcctggctgctcaaccgtccggtaatgggcgatccgctgttcctgcaaatgaaacaacacaacagcgcggcgggtgttgtcgggcgcgtaaaaaaagtcctccgtcgccgctaccagcaccaggtattgctctcacgcgtcaccgatactggcaagctgcgtaatatcgccattgcccagggatttactgactttgttcgcctgctttcaggttacgatgccattatccaggtcggcggttcgttttttgttgatctctacggcgtgccgcagtttgaacacgcgctttgcacgtttatggcgaaaaagccgctgtttatgattggtcacagcgtcggcccgttccaggatgagcaatttaaccaactggcaaactacgtattcgggcactgcgacgcgctgatcctgcgcgaatcggtcagcctggatctaatgaaacgcagcaatatcactaccgcaaaagttgaacatggcgtcgataccgcgtggctggtcgatcaccacaccgaagatttcaccgccagctatgccgtccaacactggctggacgttgccgcacaacagaaaacggtggccattaccctgcgcgaactggcaccgttcgacaaacgtctcggcaccactcaacaagcgtatgaaaaagcctttgccggggtggtcaatcgcattctcgatgaagggtatcaggtgattgcgctctccacctgtacgggtatcgacagctataacaaagacgaccgcatggtggcgctcaacctgcgtcagcacatcagcgatcctgcccgttatcacgtggtgatggatgaactcaacgatctggaaatgggcaaaatcctcggtgcctgtgaactcaccgtcggtacgcgcctgcactctgccattatctcgatgaatttctccactccggcaattgccatcaactacgaacacaaatccgccgggattatgcagcagcttgggctacctgagatggcgattgatatccgtcatttattagacggcagcctgcaagcgatggttgcggataccttaggccagcttccggagctgaatacacgacttaacgaagccgtcagtcgcgaacgccaggcaggaatgcagatggtgcaatctgtgcttgagcgtatcggggaggcgaaatga

SEQ ID NO: 459311 - DNA, 1479 bp, Shigella boydii
atgagcttacgtgaaaaaaccattagcggcgcgaagtggtcggcgattgctacggtgatcatcatcggcctcgggctagtgcagatgaccgtgctggcgcggattatcgacaaccaccagttcggtttgcttaccgtgtcgctggtgattatcgcgctggcagatacactctctgacttcggcatcgctaactcgattattcagcgaaaagaaatcagccatcttgaactcaccacgctgtactggctgaacgtcgggttggggcttgtggtgtgcgtggcggtgtttttgttgagtgatgccattggtgacgtgctgaataacccggatctggcgccgttgattaaaacattgtcgctggcgtttgtggtgatcccccacgggcaacagttccgcgcgttgatgcaaaaggagctggagttcaacaaaatcggcatgatcgaaactagcgcggtgctggcgggctttacttttacagtggttagcgcccatttctggccgttggcgatgaccgcgatcctcggttatctggtcaatagtgcggtgagaacgctgctgtttggctactttggccgcaaaatttatcgccctggtctgcatttctcgctggcttcggtggcaccgaacttacgctttggtgcatggctgacggcggacagcatcatcaactatctcaacaccaacctttcgacgctggtgctggcgcgtattctcggcgcgggcgtggcagggggatacaacctggcgtacaacgtggccgttgtgccgccgatgaaattgaacccgatcatcacccgcgtgttgtttccggcgtttgccaaaattcaggacgacaccgaaaagctgcgcgttaacttctacaagctgctgtcggtggtggggattatcaattttccggcgctgctggggctgatggtggtgtcgaataactttgtaccgctggtctttggcgaaaagtggaacagcattattccggtgctgcaattgctgtgtattgtggggctactgcgctcagtgggtaacccgattggctcgctgctgatggcgaaagcgcgggtggatatcagctttaaattcaacgtattcaaaacctttctgtttattcctgcgattgttattggcggacagatggcgggtgcaatcggcgtcacgcttggtttcctgctggtgcagattatcaacaccattctgagttacttcgtgatgattaaaccggtgctcggttccagttatcgccagtacatcctgagtttgtggctgccgttttatctctcgctgccgacgctggtggttagttatgcgctgggcattgtgctgaaaggccaactgacgctggggatgctgctggcggtgcaaatagccacaggcgtgctggcgtttgtggtgatgattgtgttgtcgcgccatccgctggtggtggaagtgaagcgtcagttttgtcgcagcgaaaaaatgaaaatgcttttgcgggccgggtga

SEQ ID NO: 459312 - DNA, 1395 bp, Shigella boydii
atgacaaatctaaaaaagcgcgagcgagcgaaaaccaatgcatcgttaatctctatggtgcaacgcttttcagatatcaccatcatgtttgccgggctatggctggtttgcgaagtcagcggactgtcattcctctacatgcacctgttggtggcgctgattacgctggtggtgttccagatgttggacggcatcaccgatttttatcgctcatggcgaggtgttcgggcaacgacagaatttgccctgctgctgcaaaactggaccttaagcgtgatttttagcgccggactggtggcgttcaacaatgatttcgacacgcaactgaaaatctggctggcgtggtatgggctgaccagcatcgggttggtggcgtgtcgttcgtgtattcgcattggtgcgggctggttgcgtaatcatggctataacaagcgtatggttgccgtggcgggggatttagctgccgggcaaatgctgatggagagcttccgtaatcagccgtggttagggtttgaagtggtgggcgtttaccatgacccaaaaccgggcggcgtttctaacgactgggcgggcaatctgcaacagctggtcgaggatgcaaaagcgggcaagattcacaacgtctatatcgcgatgcaaatgtgcgacggcgcacgagtgaaaaaactggtccatcaactggcggacaccacctgttcggtgctgctgatccccgacgtctttaccttcaacattctccattcacgcctcgaagagatgaacggcgttccggtggtgccgctgtacgacacgccactttccggggttaaccgcctgataaaacgtgcggaagacattgtgctggcaacgctgatcttgctgctgatctccccggtgctgtgctgtattgcgctggcggtgaaactcagttcaccagggccggttattttccgccagactcgctacggcatggatggcaagccgatcaaagtgtggaagttccgttccatgaaagtgatggagaacgacaaagtggtgactcaggcgacgcagaacgatccgcgcgtcaccaaagtggggaactttctgcgccgcacctcgctggatgaattgccgcagtttatcaatgtgctgaccggggggatgtcgattgtgggcccacgtccgcacgcggtggcgcataacgaacaatatcgccagctcattgaaggctacatgctgcgccacaaagtgaaaccgggcattaccggttgggcgcagattaacggccggcgcggcgaaaccgacacgctggagaaaatggaaaaacgcgtcgagttcgaccttgagtacatccgtgaatggagcgtctggttcgatatcaaaatcgttttcctgacggtattcaaaggcttcgttaacaaagcggcatattga

SEQ ID NO: 459313 - DNA, 1371 bp, Shigella boydii
atgaaaaaattaacctgctttaaagcctatgatattcgcggaaaattaggcgaagaactgaatgaagatatcacctggcgtattgggcgtgcctatggcgaatttctcaaaccgaaaaccattgttttaggcggtgatgtccgtctcaccagcgaaaccttaaaactggcgctggcgaaaggtttacaggatgcgggcgtcgatgtgctggatattggcatgtccggcaccgaagagatctatttcgccacgttccatctcggtgtggatggcggcatcgaagttaccgccagccataatccgatggattacaacggcatgaaactggtgcgcgaaggggctcgcccgatcagcggtgataccggactgcgcgacgtccagcgtctggcagaagccaacgattttcctcccgtcgatgaaaccaaacgcggtcgctatcggcaaatcaacctgcgcgacgcttacgttgatcatctgttcggttatatcaacgtcaaaaaccttacgccgctcaagctggtgatcaactccgggaacggcgcggtgggtccggtggtggatgccatcgaagcccgctttaaagccctcggcgcacccgtggaattgatcaaagtgcacaacacgccggacggcaatttccccaacggtattcctaacccgctgctaccggaatgtcgcgatgacacccgtaatgcggtcatcaaacacggcgcggatatgggcattgcttttgatggcgattttgaccgctgtttcctgtttgacgaaaaagggcagtttatcgagggctactacattgtcggtttactggcagaagcgttcctcgaaaaaaatcccggcgcgaagatcatccacgatccacgtctctcctggaacaccgttgatgtggtgactgccgcaggtggcacgccggtaatgtcgaaaaccggacacgcctttattaaagaacgtatgcgcaaggaagacgccatctacggtggcgaaatgagcgcccaccattacttccgttatttcgcttactgcgacagcggcatgatcccgtggctgctggtcgccgaactggtgtgcattaaagggaaaacgctgggcgaactggtgcgcgaccgcatggcggcattcccggcaagcggtgagatcaacagcaaactggcgcaacccgttgaggcgattaatcgcgtcgaacagcattttagccgcgaggcgctggcggtggatcgcaccgatggtatcagcatgacctttgccgactggcgctttaacctgcgctcctccaacaccgaaccggtggtacgcctgaatgtggaatcgcgcggtgatgtgccgctgatggaagcgcgaacgcgaactctgctgacgttgctgaacgagtaa

SEQ ID NO: 459314 - DNA, 1437 bp, Shigella boydii
atgtcgcagtcgaaactctatccagttgtgatggcaggtggctccggtagccgcttatggccgctttcccgcgtactttatcccaagcagtttttatgcctgaaaggcgatcttaccatgctgcaaaccaccatctgccgcctgaacggcgtggagtgcgaaagcccggtggtgatttgcaatgagcagcaccgctttattgtcgcggaacagctgcgtcaactgaacaaactcaccgagaacattattctcgaaccggcagggcgtaacactgcacctgccattgcgttggcggcgctggcggcaaaacgtcatagtccggacagcgatccgttaatgttggtcctggcggcagatcatgtgattgccgacgaagacgcgttccgcgccgccgtgcgtaatgccatgccgtatgccgaagcgggcaagctggtcaccttcggcattgtgccggatctaccagaaaccggttatggctatattcgtcgcggtgaagtgtctgcgggcgagcaggatacggtggcctttgaagtggcgcagtttgtcgaaaaaccgaatctggaaaccgcccaggcctatgtggcaagcggtgaatattactggaacagcggcatgttcctgttccgcgccggacgctatctcgaagaactgaaaaaatatcgcccggatattctcgacgcctgcgaaaaagcgatgagcgccgtcgatccggatctcgattttattcgtgtggatgaagaggcgtttcttgcctgcccggaagagtcggtggattacgcggtcatggaacgtacggcagatgccgttgtggtgccgatggatgcgggctggagcgatgtcggttcctggtcctctttatgggagatcagcgcccacaccgcggaaggcaacgtttgccacggcgatgtgattaatcacaaaaccgaaaacagctacgtgtatgccgaatctggcctggtcaccaccgtcggggtgaaagatctggtagtggtgcagaccaaagacgcggtgctgattgcagatcgtaacgcggtgcaggatgtgaaaaaagtggtcgagcagatcaaagccgatggtcgccatgagcatcgggtgcatcgcgaagtgtatcgcccgtggggcaaatatgactctatcgacgcgggcgaccgctaccaggtgaaacgcatcaccgtgaaaccgggcgagggcttgtcggtacagatgcaccatcaccgcgcggaacactgggtagtggtcgcgggaacggcaaaagtcaccattgacggtgatatcaaactgcttggtgaaaacgagtccatttatattccgctgggggcgaagcactgcctggaaaacccggggaaaattccgctcgatttaattgaagtgcgctccggctcttatctcgaagaggatgatgtggtgcgcttcgcggatcgctacggacgggtgtag

SEQ ID NO: 459315 - DNA, 1224 bp, Shigella boydii
atgaaaatactggtctacggcattaactactcgccggagttaaccggcatcggcaaatacaccggcgagatggtggaatggctggcagcacaaggtcatgaggtgcgggtcattaccgcaccgccgtactacccgcagtggcaggtgggcgagaactattccgcctggcggtacaaacgagaagagggggccgccacggtgtggcgctgcccgctgtatgtgccaaaacagccgagcaccctgaaacgcctgttacatctcggcagctttgccgccagcagtttttttcccctgatggcgcaacgtcgctggaagccggatcgcattatcggcgtagtaccaacgctgttttgcacgccgggaatgcgcctgctggcgaaactctctggtgcgcgtaccgtgctgcatattcaggattacgaagtagatgccatgctggggctgggccttgccggaaaaggtaaaggcggcaaagtggcacagctggcgacagccttcgaacgtagcggactgcataacgtcgataacgtctccacgatttcgcgttcgatgatgaataaagccgttgaaaaaggcgtggcggcggaaaacgtcattttcttccccaactggtcggaaatcgcccgttttcagcatgtcgcagacgccgatgttgctgcacttcgtaaccaacttggcctgccggataacaaaaaaatcattctttactccggcaatattggtgaaaagcaggggctggaaaacgttattgaagctgccgatcgcctgcgcgatgaaccgctgatttttgccattgtcgggcagggcggcggcaaagcgcggctggaaaaaatggcgcagcagcgcggactgcgcaatatgcaatttttcccgctgcaatcgtatgacgctttacccgcactgctgaagatgggcgattgccatctggtggtgcaaaaacgcggtgcggcagatgccgtattgccgtcgaaactgaccaatattctggcggtaggcggtaacgcggtgattaccgcagaagcccacacagaactggggcagctttgcgaaaccttctcaggaattgcggtttgcgtagaaccagaatcggtcgaggcgctggtggcggggatccgtcaggcgctcctgctgcccaaacacaacacggtggcacgtgaatatgctgaacgcacgctcgataaagagaacgtgttacgtcaatttatacatgatattcggggataa

SEQ ID NO: 459316 - DNA, 483 bp, Shigella boydii
atgatgtttttacgtcaggaagactttgccacggtagtgcgctccactccgcttgtctctctcgactttattgtcgagaacagccgcggcgagtttctgcttggcaaaagaaccaaccgcccggcacagggttactggtttgtgccgggagggcgcgtgcagaaggacgaaacgctggaagccgcatttgagcggctgacgatggcggaactggggctgcgtctgccgatgacagcgggccagttttacggtgtctggcagcacttttatgacgataacttctccggcacggatttcaccacgcactatgtagtgctcggttttcgcttcagagtcgcggaagaggaactattactgccggatgagcagcatgacgattaccgctggctgacgccggacgcgctgctcgccagtgacgatgttcacgctaacagccgcgcctattttctcgctgagaagcgtgccggagtacccggattatga

SEQ ID NO: 459317 - DNA, 771 bp, Shigella boydii
gtgggcgggattgtcgccaacaacacgtatccggcggatttcatctaccagaatatgatgattgagagcaacatcattcacgctgcgcatcagaacgacgtgaacaaactgctgtttctcggatcgtcctgcatctacccaaaactggcaaaacagccgatggcagaaggcgagctgttacagggcacgctggagccgaccaacgagccatacgccattgccaaaatcgccgggatcaaactgtgcgaatcttacaaccgccagtatggatgcgattatcgctctgtcatgccgaccaacctgtacgggccgcacgacaacttccatccgaataattcgcatgtgatccccgcattgctgcgccgcttccacgaggcgacagcacagaatgcaccggacgtggtggtgtggggcagcggtacgccgatgcgcgaatttctgcatgtcgatgatatggcggtggcaagcattcatgtcatggagctggcgcacgaagtctggctggagaacacccagccgatgctgtcgcacattaacgtcggcacgggtgttgactgcactatccgcgagctggcgcaaaccatcgccaaagtggtgggttacaaaggccgggtggttttcgatgccagtaaaccggatggcacaccgcgcaaactgctggatgtgacgcgcctgcatcagcttggctggtatcacgaaatctcactggaagcggggcttgccagcacttaccagtggttccttgagaatcaagaccgctttcgggggtaa

SEQ ID NO: 459318 - DNA, 174 bp, Shigella boydii
atgagtaaacaacgtatttttatcgctggccatcgcgggatggtcggttctgccatcaagcgacagctcgaacagcgcggtgatgtggaactggtattacgcacccgcgacgaactgaacctgctggacagccgcgcggtgcatgatttctttgccagcgagcgcattgactag

SEQ ID NO: 459319 - DNA, 1122 bp, Shigella boydii
atgtcaaaagtcgctctcatcaccggtgtaaccggacaagacggttcttacctggcagagtttctgctggaaaaaggttacgaggtgcatggtattaagcgtcgtgcatcgtcattcaacaccgagcgcgtggatcatatttatcaggatccgcatacctgtaacccgaaattccatctgcattatggcgacctgagtgatacctccaacctgacgtgtattttgcgtgaagtgcagccggatgaagtgtacaacctgggcgcaatgagccacgttgcggtttcttttgagtcaccggaatataccgcagacgttgatgcgatgggcacactgcgtctgctggaggcgatccgcttccttggtctggaaaagaaaacccgtttctatcaggcttccacttctgaactgtacggtctggtgcaggaaattccgcagaaagaaaccacgccgttctatccgcgatctccatatgcggtcgccaagctgtatgcctactggatcaccgttaactaccgcgaatcctacggcatgtacgcctgtaacggcattctctttaaccatgaatccccgcgccgtggcgaaaccttcgttacccgcaaaatcacccgcgctatcgccaatatcgctcaagggctggagtcgtgtctgtacctcggcaatatggattccctgcgtgactggggccacgccaaagactacgtaaaaatgcagtggatgatgctgcaacaggaacagccagaagatttcgttattgccaccggcgttcagtactccgtgcgtcagttcgtggaaatggcggcagcacagctgggcatcaaactgcgctttgaaggctcgggcgttgaagagaagggcattgtggtttccgtcaccgggcatgacgcgccgggcgttaaaccgggcgatgtgattatcgccgttgacccgcgttacttccgtcctgctgaagtagaaacgctgctcggcgacccggccaaagcgcacgaaaagctgggctggaaaccggaaatcaccctcagagagatggtatctgaaatggtggctaatgacctcgaagcggcgaaaaaacactctctgctgaaatctcacggctacgacgtggcgatcgcgctggagtcataa

SEQ ID NO: 459320 - DNA, 294 bp, Shigella boydii
atgcacattggacaggctcttgatctggtatcccgttacgattctctgcgtaacccactgacttctctgggggattacctcgaccccgaactcatctctcgttgccttgccgaatcaggtactgtaacgctacgcaagcgccgtcttcccctcgaaatgatggtctggtgtattgttggcatggcgcttgagcgtaaagaacctcttcaccagattgtgaatcgcctggacatcatgctgccgggcaatcgccccttcggtaagcgtaaactgaccgccgtatgtagccattaa

SEQ ID NO: 459321 - DNA, 2448 bp, Shigella boydii
atgaatgctccgtttacatattcatcgcccacgcttagcgtagaagctcttaagcactctatcgcttacaagctgatgtttacgattggaaaggacccggtcgtcgccaataaacatgaatggctgaacgcaacgttatttgctgtgcgcgatcgtctcgtggagcgctggttacgttcaaaccgtgcccagttgtcgcaagaaactcgtcaggtttactacctgtcgatggagtttttgattggccgtacgctctccaacgccatgttgtcgctaggaatttacgaagatgtacagggcgcactggaagcgatggggttaaatctcgaagagctgattgatgaagaaaatgacccaggcctcggtaacggtggcctgggacgtctggcggcttgcttccttgattctctggcgacgttagggttgccggggcgcggttacggcatccgctatgactacggtatgttcaagcagaacatcgttaacggtagccagaaagagtcgccagactactggctggaatacggtaacccgtgggaattcaaacgccacaacacgcgctataaagtccgttttggtggtcgcattcagcaggaaggtaaaaaaacgcgctggattgaaaccgaagagattctgggagtcgcttacgatcagataatccctggttacgacaccgacgcgaccaacacgttgcgtttgtggagtgcgcaagccagtagcgaaattaacctcggtaaattcaaccaaggtgactacttcgcggcagtggaagataaaaaccactccgagaacgtatctcgcgtactgtatccggatgactccacctactccgggcgtgagctgcgcctgcgtcaggaatactttctggtttcctcgaccattcaggacattttaagccgccattatcagttgcataaaacctacgataacctggcggataaaatcgcgattcatctcaatgatacccatccggtactgtcgattcctgagatgatgcgtctgctgatcgatgagcaccaatttagctgggacgacgcgtttgaggtgtgttgtcaggtcttctcctacactaaccacacgctgatgagcgaggcgctggaaacctggccggttgatatgctgggtaaaattctgccgcgtcacctgcagatcatctttgaaatcaacgactatttcctgaaaaccttgcaggaacagtatccgaacgataccgatctgctgggacgggcgtcgatcattgatgaatccaacggtcgtcgtgtgcgtatggcctggctggcggttgttgtgagccacaaagttaacggtgtatcggaactgcactctaatctgatggtgcaatcgttgtttgccgactttgcgaaaatcttcccgggtcgtttcaccaacgtcaccaacggtgtgacgccgcgtcgctggctagcggtagcgaacccatcgctttcagccgtgctggacgaacacctgggccgtaactggcgcaccgaccttagcctgcttaatgagctgcaacaacactgtgatttcccaatggttaatcacgctgtgcatcaggcgaagctggagaacaaaaagcgtctggcagagtatatcgcccagcagctgaatgtggtggtgaatccaaaggcgttgttcgatgtacaaatcaaacgtattcacgaatacaaacgtcaattgatgaatgtgttgcatgtgattacccgctataaccgcatcaaggccgacccggatgcgaagtgggtaccgcgcgtgaatatttttggcggtaaggcggcttcggcctattacatggcgaagcacattattcatttgatcaatgacgtagcgaaagtgatcaacaacgatccgcagattggcgataagctgaaagtcgtgttcatcccgaactacagcgttagcctggcgcagttgatcattccggcggcagatctgtctgaacagatttcgctggcagggacggaagcttccggcaccagtaacatgaagtttgcgcttaacggtgcgctgactatcggtacgttggacggtgcgaatgtcgagatgctggatcatgtcggtgctgacaatatctttatttttggtaacacagcggaagaagtggaagaactgcgtcgtcagggctacaaaccgcgtgaatactacgagaaagatgaggagctgcatcaggtgctgacgcaaatcggcagcggtgtattcagtccggaagatccgggtcgctatcgcgatctggttgattcgctgatcaacttcggcgatcactatcaggttctggcggattatcgcagctatgtcgattgtcaggataaagtcgacgaactctacgagcttcaggaagagtggaccgcaaaagcgatgctgaacattgccaatatgggctacttctcttctgaccgtactatcaaagagtacgccgatcatatctggcatatcgatccggtgagattgtaa

SEQ ID NO: 459322 - DNA, 1434 bp, Shigella boydii
atgcaagttttacatgtatgttcagagatgttcccgctgcttaaaaccggcggtctggctgatgttattggggcattacccgcagcacaaatcgcagacggcgttgacgctcgcgtactgttgcctgcatttcccgatattcgccgtggcgtgaccgatgcgcaggtagtatcccgtcgtgataccttcgccggacatatcacgctgttgttcggtcattacaacggggttggcatatacctgattgacgcgccgcatctctatgatcgtccgggaagcccgtatcacgataccaacttatttgcctataccgacaacgtattgcgttttgcgctgctggggtgggttggggcagaaatggccagcgggcttgacccattctggcgtcctgatgtggtgcatgcgcacgactggcatgcaggccttgcgcctgcgtatctggcggcgcgcgggcgtccggcgaagtcggtgtttactgtgcacaacttggcctatcaaggcatgttttatgcacatcacatgaatgacatccaattgccatggtcattctttaatattcatgggctggaattcaacggacaaatctctttcctgaaggccggtctgtactatgccgatcacattacggcggtcagtccaacctacactcgcgagatcaccgaaccgcagtttgcctacggtatggaaggtctgttgcaacagcgtcaccgtgaagggcgtctttccggcgtactgaacggcgtggacgagaaaatctggagtccagagacggacttactgttggcctcgcgttacacccgcgatacgttggaagataaagcggaaaataagcgccagttacaaatcgcaatggggcttaaggttgacgataaagtgccgctttttgcagtggtgagccgtctgaccagccagaaaggtctcgacctggtgctggaagccttaccgggtcttctggagcagggcgggcagctggcgctactcggcgcgggcgatccggtgctgcaggaaggtttccttgcggcggcagctgaataccccggccaggtgggcgttcagattggctatcacgaagcattttcgcatcgcattatgggcggcgcggacgtcattctggtgcccagccgttttgaaccgtgcggcttaacgcaactttatggattgaagtacggtacgctgccgttagtgcggcgcaccggtgggcttgctgatacggtttctgactgttctcttgagaaccttgcagatggcgtcgccagtgggtttgtctttgaagatagtaatgcctggtcgctgttacgggctattcgacgtgcttttgtactgtggtctcgtccttcactgtggcggtttgtgcaacgtcaggctatggcaatggattttagctggcaggtcgcggcgaagtcgtaccgtgagctttactatcgcttgaaatag

SEQ ID NO: 459323 - DNA, 1296 bp, Shigella boydii
atggttagtttagagaagaacgatcacttaatgttggcgcgccagctgccattgaaatctgttgccctgatactggcgggaggacgtggtacccgcctgaaggatttaaccaataagcgagcaaaaccggccgtacacttcggcggtaagttccgcattatcgactttgcgctgtctaactgcatcaactccgggatccgtcgtatgggcgtgatcacccagtaccagtcccacactctggtgcagcacattcagcgcggctggtcattcttcaatgaagaaatgaacgagtttgtcgatctgctgccagcacagcagagaatgaaaggggaaaactggtatcgcggcaccgcagatgcggtcacccaaaacctcgacattatccgccgttataaagcggaatacgtggtgatcctggcgggcgaccatatctacaagcaagactactcgcgtatgcttatcgatcacgtcgaaaaaggcgcacgttgcaccgttgcttgtatgccagtaccgattgaagaagcctccgcatttggcgttatggcggttgatgagaacgataaaattatcgaattcgttgaaaaacctgctaacccaccgtcaatgccgaacgatccgagcaaatctctggcgagtatgggtatctacgtctttgacgccgactatctgtatgaactgctggaagaagacgatcgtgatgagaactccagccacgactttggcaaagatttgattcccaagatcaccgaagccggtctggcctatgcgcacccgttcccgctctcttgcgtacaatccgacccggatgccgagccgtactggcgcgatgtgggtacgctgaaagcttactggaaagcgaatctcgatctggcctctgtggtgccggaactggatatgtacgatcgcaattggccaattcgcacctacaatgaatcattaccgccagcgaaattcgtgcaggatcgctccggtagccacgggatgacccttaactcactggtatccggcggttgtgtgatctccggttcggtggtggtgcagtccgttctgttctcgcgcgttcgcgtgaattcattctgcaacattgattccgccgtattgttaccggaagtatgggtaggtcgctcgtgccgtctgcgccgctgcgtcatcgatcgtgcttgtgttatcccggaaggcatggtgattggtgaaaacgcagaggaagatgcacgtcgtttctatcgttcagaagaaggcatcgtgctggtaacgcgcgaaatgctacggaagttagggcataaacaggagcgataa

SEQ ID NO: 459324 - DNA, 1974 bp, Shigella boydii
atgacacagctcgccattggcaaacccgctcccctcggcgcgcattacgacggtcagggcgtcaacttcacacttttctccgctcatgccgagcgggtagaactgtgtgtctttgacgccaatggccaggaacatcgctatgacttgccagggcacagtggcgacatttggcacggttatctgccggatgcgcgcccgggtttgcgttatggttatcgcgttcatggcccctggcaacccgccgatgggcatcgctttaacccggcgaagttgttgattgatccttgcgcgcggcaaattgacggggagtttaaagataacccgctgctgcacgccggtcataatgaacctgactatcgcgacaacgccgccattgcgccgaaatgcgtagtggtggttgatcactatgactgggaagatgatgccccgccgcgcacgccgtggggcagcaccatcatttatgaagcccatgtcaaaggattaacgtacttgcacccggagattccggtcgagatccgtggcacttataaagccctcgggcatccggtgatgatcaactatttgaaacaattgggcattaccgcgctggaactgctgccagtggcgcagtttgccagtgaaccacgtctgcaacgcatggggctaagtaactactggggttacaacccggtggcgatgtttgcgctgcatccggcgtatgcctgctcgccagaaacggcgctggatgagtttcgcgatgcaatcaaagcactgcataaagcgggtatcgaagtcattcttgatatcgtgctcaaccatagtgcggaactggacctcgacggcccgttattctcactgcgtgggatcgataaccgtagctattattggataagagaagacggcgattatcacaactggaccggttgcggcaacacgctcaatttgagtcatccggcggtggtggattatgccagcgcctgcctgcgttattgggtagaaacctgtcacgtcgatggtttccgctttgatctggcggcagtcatgggccgtacgccagagttccgtcaggatgcgccgttgtttaccgctatccagaactgcccggtgctctcgcaggtgaagttaattgctgaaccgtgggatatcgcccctggtggttatcaggtgggaaatttcccgccgctgtttgccgagtggaacgatcatttccgcgatgctgcccgtcgtttctggctacattatgatttgcctctgggggcgtttgccgggcgttttgctgcctccagcgatgtttttaaacgtaatggtcgtctgccgagtgccgcgattaatctcgtcactgcgcatgacggttttacgcttcgcgactgcgtttgcttcaaccataaacacaatgaagcaaacggagaagaaaatcgcgacgggaccaacaacaattacagtaacaatcatggtaaagaagggttaggcggttctcttgacctggttgaacggcggcgcgacagtattcacgccttgttaacaacgttgttgctctcccagggtacgccgatgttactggccggtgacgaacatggtcacagccagcatggcaataacaatgcctactgtcaggataaccaattaacctggttggactggtcgcaggcaagcagtggtttaaccgcatttaccgccgcgttaatccatctgcgcaagcgcattcccgctttggtggagaatcgctggtgggaagaaggcgatggcaatgtccgttggctaaatcgatatgctcaacctttaagcacggatgagtggcaaaacgggccgaaacagctgcaaattctgctctcggatcgctttttgatcgcaattaacgccacgcttgaggtaacagagattgttttacctgctggggagtggcacgccattcccccattcgctggagaggataacccagtgattacggctgtctggcagggacctgcacacggattgtgtgtgttccagagatga

SEQ ID NO: 459325 - DNA, 2187 bp, Shigella boydii
atgtccgatcgtatcgatagagacgtgattaacgcgctaattgcaggccattttgcggatcctttttccgtactgggaatgcataaaaccaccgcgggactggaagtccgtgcccttttacccgacgctaccgatgtgtgggtgattgaaccgaaaaccgggcgcaaactcgcaaaactggagtgtcttgactcacggggattctttagcggtgtcattccgcgacgtaagaattttttccgctatcagttggctgttgtctggcatggtcagcaaaacctgattgatgatccttaccgttttggcccgctaatccaggaaatggatgcctggctattatctgaaggtactcacctgcgcccgtatgaaaccttaggcgcgcatgcagatactatggatggcgtcacaggtacgcgtttctctgtttgggctccaaacgcccgtcgggtctcggtggttgggcaattcaactactgggacggtcgccgtcacccgatgcgtctgcgtaaagagagcggcatttgggaactgtttatccctggggcgcataacggtcagctctataaatacgagatgattgatgccaatggcaacttgcgtctgaagtccgacccttatgccttcgaagcgcaaatgcgcccggaaaccgcgtctcttatttgcgggctgccggaaaaggttgtacagactgaagagcgcaaaaaagcgaatcagtttgatgcgtcaatctctatttatgaagttcacctgggctcctggcgtcgccacaccgataacaatttctggttgagctaccgcgagctggccgatcaactggtgccttatgctaaatggatgggctttacccacctcgaactactgcccattaacgagcatcccttcgatggcagttggggttatcagccaaccggcctgtatgcaccaacccgccgttttggtactcgcgacgacttccgttatttcattgatgccgcacacgcagcgggtctgaacgtgattctcgactgggtgccaggccacttcccgaccgatgactttgcgcttgccgaatttgatggcacgaacttgtatgaacacagcgatccgcgcgaaggctatcatcaggactggaatacgctgatctacaattatggtcgccgtgaagtcagtaacttcctcgtcggtaacgcgctttactggattgaacgttttggtattgatgcgctgcgcgtcgatgcggtggcgtcaatgatttatcgcgactacagccgtaaagagggggagtggatcccgaacgaatttggcgggcgcgagaatcttgaagcgattgaattcttgcgtaataccaaccgtattcttggtgagcaggtttccggtgcggtgacaatggctgaggagtctaccgatttccctggcgtttctcgtccgcaggatatgggcggtctgggcttctggtacaagtggaacctcggctggatgcatgacaccctggactacatgaagctcgacccggtttatcgtcagtatcatcacgataaactcaccttcgggattctctacaactacactgaaaacttcgtcctgccgttgtcgcatgatgaagtggtccacggtaaaaaatcgattctcgaccgcatgccgggcgacgcatggcagaaattcgctaacctgcgcgcctactatggctggatgtgggcattcccgggcaagaaactgctgttcatggggaacgaatttgcccagggccgtgagtggaaccatgacgccagcctcgactggcatctgttggaaggtggcgataactggcaccacggtgtccagcgtctggtgcgcgatctgaacctcacctaccgccaccataaagcaatgcatgaactggattttgacccgtacggctttgaatggctggtggtggatgacaaagaacgctcggtgctgatctttgtgcgtcgcgataaagagggtaacgaaattatcgttgccagtaactttacgccggtgccgcgtcatgattatcgcttcggcattaatcagccaggcaaatggcgtgaaatcctcaataccgattccatgcactatcacggcagtaatgcaggcaatggcggcacggtacacagcgatgagattgccagccacggtcgtcagcattcactaagcctgacactaccaccgctggccactatctggctggttcgggaggcagaatga

SEQ ID NO: 459326 - DNA, 1104 bp, Shigella boydii
atgaaaaatgttggttttatcggctggcgcggtatggtcggctccgttctcatgcaacgcatggttgaagagcgcgacttcaacgccattcgccctgtcttcttttctacttctcagcttggccaggctgcgccgtcttttggcggaaccactggcacacttcaggatgcctttgatctggaggcgctaaaggccctcgatatcattgtgacctgtcagggcggcgattataccaacgaaatctatccaaagcttcgtgaaagcggatggcaaggttactggattgacgcagcatcgtctctgcgcatgaaagatgacgccatcatcattcttgaccccgtcaatcaggacgtcattaccgacggattaaataatggcatcaggacttttgttggcggtaactgtaccgtaagcctgatgttgatgtcgttgggtggtttattcgccaatgatcttgttgattgggtgtccgttgcaacctaccaggccgcttccggcggtggtgcgcgacatatgcgtgagttattaacccagatgggccatctgtatggccatgtggcagatgaactcgcgaccccgtcctctgctattctcgatatcgaacgcaaagtcacaaccttaacccgtagcggtgagctgccggtggataactttggcgtgccgctggcgggtagcctgattccgtggatcgacaaacagctcgataacggtcagagccgcgaagagtggaaagggcaggcggaaaccaacaagatcctcaacacatcttccgtaattccggtagatggtttatgtgtgcgtgtcggggcattgcgctgccacagccaggcattcactattaaattgaaaaaagatgtgtctattccgaccgtcgaagaactgctggctgcgcacaatccgtgggcgaaagtcgttccgaacgatcgggaaatcactatgcgtgagctaaccccagctgccgttaccggcacgctgaccacgccggtaggccgcctgcgtaagctgaatatgggaccggagttcctgtcagcctttaccgtgggtgaccagctgctgtggggggccgcggagccgctgcgtcggatgcttcgtcaactggcgtaa

SEQ ID NO: 459327 - DNA, 594 bp, Shigella boydii
atgaatgaaatcatttctgcagcagttttattgatcctgattatggatccgctcggaaacctgcctattttcatgtccgtactgaaacatactgaaccgaaaagacggcgggcaatcatggtgcgagagttgcttattgctctcctggtgatgctggtgttcctgtttgcgggtgagaaaattctggcatttctcagcctgcgagcagaaaccgtctccatttctggcggcatcattctgtttttaatcgccattaagatgattttccccagcgcttcaggaaatagcagcgggcttccggcaggtgaagagccatttatcgtgccgttggcaattccgttagtcgccgggccgactattctcgccacgctgatgttgttgtctcatcagtacccgaatcagatgggacatctggtgattgctctgctgctggcctggggcggcacctttgtcatcctgctacagtcttcgctatttttacgtctgctgggcgagaaaggggtgaacgcacttgaacgcctgatgggattgattctggtgatgatggcaacccagatgttcctcgacggcattcgaatgtggatgaaggggtaa

SEQ ID NO: 459328 - DNA, 1341 bp, Shigella boydii
gtgactacattaacgcttgttttaacagcagtagggtctgttttactgctgctgtttttagtcatgaaggcgcgtatgcacgctttcctggctttgatggtggtgtccatgggggctggccttttttccggtatgccgctcgataaaatcgcagcgacgatggaaaaagggatgggaggcaccctcggcttcctggcggtggttgtcgccctgggagctatgtttggcaagatcttacatgaaaccggcgcagtcgatcagattgccgtcaaaatgctcaaatccttcggtcacagccgcgagcattatgccatcggccttgcggggttggtctgtgcgctaccgctgttctttgaagtggcgatagttctgctgattagcgttgctttctcaatggcgcgccacaccggtacgaacctggtgaagctggtaatcccattattcgcaggcgtggcggcagcggcggcatttctggtgcctggaccagcgccgatgctgctggcatcgcagatgaatgccgactttggctggatgatcctgattggtctgtgtgcggcaattccgggaatgattattgccgggccgctgtggggtaatttcatcagccgttacgtggagttgcatattcctgacgacatcagcgaaccgcatctcggcgaaggcaaaatgccgtccttcggattcagcctgtcgctgatcctgttgccgctggtgctggtggggctgaaaaccattgccgctcgttttgtgccagaaggatcaactgcttacgaatggttcgagtttattggtcatccatttaccgcgattctggttgcttgtctggtagcgatttatggcctggcaatgcgtcagggcatgccaaaagacaaagtgatggagatttgcggtcacgcgctacaaccggcggggatcattctgctggtgattggtgcaggcggcgtgttcaaacaggtgctggttgactctggcgtaggtccggcactgggcgaagcgttaaccggcatgggcctgccgattgctatcacctgcttcgtgctggccgctgcagtgcgcatcattcaggggtctgccaccgttgcctgtttaacggcggtggggctggtgatgccggtcattgaacaactgaactactccggtgcgcaaatggcggcactgtcgatttgtatcgctggtggttcgattgttgtcagccacgttaacgacgccggtttctggttgttcggtaaatttaccggcgcgaccgaagccgaaacgctgaaaacctggaccatgatggaaaccatcctcggcactgttggtgccatcgttgggatgattgcgttccagctgttgagttaa

SEQ ID NO: 459329 - DNA, 528 bp, Shigella boydii
ttgagcacgactaaccatgatcaccacatttacgtcttgatgggcgtatcgggcagcggcaaatctgcggtcgccagtgaagtggcgcatcaacttcatgccgcgtttcttgatggcgatttcctccatccacggtgcaatatcgaaaaaatggcgtctggcgaaccgctgaatgacgacgatcgcaaaccctggttgcaggcgctgaacgacgccgcgtttgctatgcagcgcaccaataaagtgtcgctgatcgtctgttctgcactgaaaaagcactatcgcgacttgctgcgtgaaggtaatccgaatctctctttcatctacctgaaaggcgattttgatgtgattgaaagtcgcttgaaagcgcgcaaaggccatttctttaaaacccaaatgttggtgacgcagtttgaaacgctgcaggagccgggtgcggacgaaaccgatgtactggtggtggatatcgatcaaccgctggaaggtgttgtggcaagcaccattgaggttattaaaaaaggcaaataa

SEQ ID NO: 459330 - DNA, 996 bp, Shigella boydii
atgaaaaagaaaagacccgtacttcaggatgtggctgaccgtgtaggcgtgaccaaaatgacggtcagccgttttttacgcaacccggagcaggtttccgtcgctctacgcggcaagattgccgccgctcttgatgaactgggctatattcccaatcgtgcgcccgatatcctctctaacgccaccagccgggcgattggcgtcctgttaccttctctcaccaaccaggttttcgcggaagtattacgcggaatcgaaagcgtcaccgacgcgcacggttatcagaccatgctggctcactacggttataaaccggaaatggagcaagaacgtctcgaatccatgctctcatggaatatcgacggactgatcctcaccgaacgtacccacacgccgcgcaccttaaagatgattgaagtggcggggatcccggtggtggaactcatggacagccagtcgccgtgcctcgatatcgccgtcggttttgataactttgaagcggcacgccagatgaccaccgccattattgctcgcgggcattgccacattgcctatctcggcgcgcgtctcgacgaacgtactatcatcaaacagaagggatacgaacaggcgatgctggatgcaggtctggtgtcgtatagcgtgatggttgagcaatcttcttcttactcttccggtattgaactgattcgccaggcgcggcgggaatatccgcagctggatggcgtgttctgtaccaacgatgacctggcggtcggcgcggcgtttgaatgtcagcgtctgggattgaaggttcctgacgatatggcgattgccggtttccacggtcatgacattggccaggtgatggagccgcggttagcgagcgtgctgacgccgcgtgagcggatgggcagtattggcgctgaacgcctgctggcgcgtattcgtggcgaatctgtgacaccgaaaatgttagatttaggtttcaccttgtcaccgggcggatctatttaa

SEQ ID NO: 459331 - DNA, 696 bp, Shigella boydii
atgatctacttacgcaaagcaaatgaacgtggtcatgcaaatcatggctggctggattcctggcatactttctcttttgccaactattacgatccgaactttatgggcttctccgcgctgcgcgtgattaacgacgacgtgattgaagcagggcagggcttcggcactcacccgcataaagatatggaaattttgacctacgtgctggaaggtactgttgagcatcaggacagcatgggcaataaagagcaggttccggcgggtgagttccagattatgagtgcgggtacgggtattcgtcactcagagtacaacccaagcagcaccgagcgtctgcatctgtatcagatctggatcatgcctgaagaaaacggtattacgccgcgttatgaacagcgtcgcttcgatgccgtacagggcaaacagctggtgctctcgccggatgcgcgagatggttcattgaaagtgcatcaggatatggaactgtaccgctgggcgttgctgaaagatgagcagtcggtgcatcagattgccgctgaacgccgcgtctggatccaggtggtgaaaggcaatgtcaccattaacggcgtgaaagcctcgaccagcgatggtctggcaatctgggatgagcaggcaatctccatccatgcggatagcgacagcgaagtgttactgttcgatctgccgccggtttaa

SEQ ID NO: 459332 - DNA, 927 bp, Shigella boydii
atggtcatcaactgcgcctttattggcttcggcaaaagcaccacccgttaccatctgccgtatgtacttaaccgcaaggatagctggcatgtcgcgcatatttttcgtcgccatgcgaagccggaagaacaggctcccatttattcccatatccatttcaccagcgatctcgacgaagtactaaacgatcccgatgttaagctggttgttgtctgcacccacgcggacagccatttcgagtacgcgaaacgcgcgctggaagccgggaaaaatgtgctggtcgaaaaaccgttcaccccgacgcttgcccaggcgaaggagctgtttgcgttggcgaaaagcaaagggctgaccgtcacgccgtatcagaatcgtcgctttgactcctgcttcctgacagcgaaaaaagcgattgaaagtggcaagttgggagagattgttgaagtggaaagccattttgactattaccgcccggtggcagaaaccaaacctgggctgccgcaggatggcgcgttttatggccttggtgtgcatacgatggaccagattatttctctgttcggtcgcccggatcacgtcgcttatgacatccgcagcctgcgtaataaagccaatcctgacgacacctttgaagcgcaactgttttatggcgacctgaaagccatcgtcaaaaccagccatctggtgaaaatcgattatccgaaatttatcgttcacggtaagaaaggttcgtttattaaatacggtatcgaccagcaggaaaccagcctgaaggctaatattatgccgggcgaaccgggattcgcagcggatgattcggtcggtgcgccaaattacgtcaaggaatctgaagttcttaccaatctggaaatccttgaacgcggatttgagcaagcctctccctccacagtgactctcgcgaattaa

SEQ ID NO: 459333 - DNA, 489 bp, Shigella boydii
atgagtgagatagtaatacgccacgcagaaacacgggattacgaggccatcaggcagattcacgcccagccggaggtgtattgcaacacactacaggtgcctcatccttccgatcatatgtggcaggagcgactcgccgatcgtcccggcatcaagcaactcgtcgcctgtattgatggagacgtcgtgggccatctcaccattgacgtgcaacagcgcccacgccgcagtcatgttgccgattttggtatctgtgtcgactctcgttggaagaaccgcggcgtcgccagcgccctgatgcgagagatgattgaaatgtgcgacaactggttgcgggtagatcgcattgaactaaccgtgtttgtcgataacgccccggcaattaaggtctataaaaaatacggctttgaaattgaagggactggtaagaagtacgcattgcgtaatggtgaatatgtcgatgcatattatatggcgcgggtgaagtaa

SEQ ID NO: 459334 - DNA, 747 bp, Shigella boydii
atggcaatgagtgaacaaacccagcctgtggcgggcgcggctgcgtcaacgaccaaggcccgaacatcgtttggtattttaggtgctatcagcctctcacatctgctgaacgacatgatccaatcgctgattctggcgatttatcctctgcttcagtcagaattttctctgacatttatgcagattggcatgataaccctcaccttccagctcgcctcttcgctactgcaaccagtggtcggctactggaccgataaatatccgatgccgtggtcgttgccaattggcatgtgctttaccttaagtggtctggtgctgcttgcgctggcgggcagttttggcgcagttctgctggcggcggcgctggtcggtaccggttcatcggtctttcatccggaatcttctcgcgtagcccgtatggcttccggcgggcggcatggcctggcgcaatctatctttcaggtcggcggcaactttggcagttccctgggacccttgctgacggcggtgattatcgcgccttatggcaaaggcaacgttgcctggtttgtgcttgcggcactgctggcgatcgtggtgttggcgcaaattagccgttggtactcggcacagctccgaatgaataaaggaaaacccaaagcgacgataatcaatccactgccgcgcaacaaagtggtactggcagtcagcattctgttaatcctcattttctcgaaatatttctatatggcgagcatcagcagctag

SEQ ID NO: 459335 - DNA, 1653 bp, Shigella boydii
atgaaattattgcagcggggcgtggcgttagcgctgttaaccacatttacactggcgagtgaaactgctctggcgtatgagcaggataaaacctacaaaattacagttctgcataccaatgatcatcatgggcatttttggcgcaatgaatatggcgaatatggtctggcggcgcaaaaaacgctggtggatggtatccgcaaagaggttgcggctgaaggcggtagcgtgctgctactttccggtggcgacattaacactggcgtgcccgagtctgacttacaggatgccgaacctgattttcgcggtatgaatctggtgggctatgacgcgatggcgatcggtaatcatgaatttgataatccgctcaccgtattacgccagcaggaaaagtgggccaagttcccgttgctttccgcgaatatctatcagaaaagtaccggcgagcgcctgtttaaaccatgggcgctgtttaagcgtcaggatctgaaaattgccgtcattgggctgacaaccgatgacacagcaaaaattggtaacccggaatacttcactgatgtcgaatttcgtaagcccgccgatgaagcgaagctggtgattcaggagctgcaacagacagaaaagccagacattattatcgcggcgacccatatggggcattacgataatggtgagcacggctctaacgcaccgggcgatgtggagatggcacgcgcgctgcctgccggatcgctggcgatgatcgtcggtggtcactcgcaagctccggtctgcatggcggcagaaaacaaaaaacaggtcgattacgtgccgggtacgccatgcaaaccagatcaacaaaacggcatctggattgtgcaggcgcatgagtggggcaaatacgtgggacgggctgattttgagtttcgtaatggcgaaatgaaaatggttaactaccagctgattccggtgaacctgaagaagaaagtgacctgggaagacgggaaaagcgagcgcgtgctttacactcctgaaatcgctgagaaccagcaaatgatctcgctgttatcgccgttccagaacaaaggcaaagcgcagttggaagtgaaaataggcgaaaccaatggtcgtctggaaggcgatcgtgacaaagtgcgttttgtacagaccaatatggggcggttgattctggcagcccaaatggatcgcactggtgccgaatttgcggtgatgagtggaggaggaattcgtgattctatcgaagcaggcgatatcagctataaaaacgtactgaaagtgcagccattcggcaatgtggtggtgtatgccgacatgaccggtaaagaggtgattgattacctgaccgccgtcacacaaatgaagccagattcaggtgcctacccgcaatttgccaacgttagctttgtgacgaaagacggcaaactcaacgacctgaaaatcaaaggcgaaccggtcgatccggcgaaaacttaccgtatggcgacattaaacttcaatgccaccggcggtgatggctatccgcgccttgataacaaaccgggctatgtgaataccggctttattgatgccgaagtgctgaaagcgtatatccagaaaagctcgccgctggatgtgagtgtttatgaaccgaaaggtgaggtgagctggcagtaa

SEQ ID NO: 459336 - DNA, 480 bp, Shigella boydii
atgacacccgcagttaaattactcgaaaaaaacaagatttcgtttcaaatccatacctacgagcacgatccggctgaaaccaattttggcgatgaagtcgtcaaaaaattaggtttgaatccggatcaagtctacaaaacgctactggtggcagtgaacggtgatatgaaacatctggcagtggccgttacgccggtcgcaggtcaactggatcttaaaaaagtagcaaaagcgctgggtgccaagaaagttgagatggccgatccgatggccgcgcagcgttcgacgggatacctggttggggggattagcccactggggcagaaaaaacgtctgccgacgattatcgacgcccccgcacaagaatttgccactatttatgtttctggcggcaagcgcggactggatatcgaactggcggcaggcgatctggcgaagatcctcgatgccaaatttgctgatatcgcccgccgcgattaa

SEQ ID NO: 459337 - DNA, 795 bp, Shigella boydii
atggatctgttgtaccgggtaaaaacgctttgggccgcgctgcgcggtaatcattacacctggcctgccatcgatatcacccttcccggcaatcgccattttcatctgattggcagtattcatatgggtagccacgatatgactcccctgcccacccgtttgctcaaaaagctcaaaaacgccgatgcgctgatcgtcgaggcggatgtttccaccagcgatacgccttttgctaatttgcctacttgcgaggcgctggaagagcgcattaacgaggagcaactccaaaatctgcagcacattagccaggagatgggcatttctccgtcgctcttttctactcaaccgctgtggcaaatcgcgatggttcttcaggcgacgcaggcacaaaaactggggctgcgggcagaatacggtatcgattaccagttattgcaggcggcgaagcaacaacataaacccgtgattgaactggaaggggctgaaaaccagattaccatgttgctccagctccctgacaaaggactggcgctgctggacgatacgctgacccactggcataccaacgcacggttgctgcaacaaatgatgagctggtggctgaatgcacctccgcaaaataatgatataacgctgcccaatacgttcagtcagtcgctgtacgatgtgctgatgcatcagcgaaatctcgcctggcgggataaattacgcgccatgccgccggggcgatatgtggtcgcggtcggtgcactacacctgtatggagaagggaatttgccgcaaatgttgcgctaa

SEQ ID NO: 459338 - DNA, 396 bp, Shigella boydii
atgattcagtatgttcttgcatcgctattcacagggaagcaacagttaaaaaccatgaaacaggcaacaagaaaaccgacgacacccggagatattcttctctatgaatatctggaaccgctcgatttgaaaatcaatgagttagcagagttgctgcatgttcatcgtaatagcgtcagtacactgatcaataataatcgtaaactcaccactgagatggcattccgtctggcgaaagtttttgataccacagtcgatttttggctaaacctccaggcggcagttgatctttgggaagttgaaaacaacatgcgcacccaggaagaattgggacggattgaaacagtggctgaatatttggcacgccgtgaagagcgtgcaaaaaaggtcgcgtaa

SEQ ID NO: 459339 - DNA, 2505 bp, Shigella boydii
atgtcacaaactatcgacctgaccctggacggcctgtcctgcggtcactgcgttaaacgcgtgaaagaaagtctcgaacagcgcccggatgtggaacaagcggatgtgtctatcactgaagcgcacgttaccgggactgccagtgcagaacagctgatcgaaaccatcaaacaagcgggttatgacgcatctgtaagccacccaaaggctaaaccgctggcggagtcatcaatcccgtcggaagcactgacagcggtttctgaggcgcttccggcagcgaccgccgatgacgatgacagccagcagttgctgctgagcggcatgagctgcgccagctgtgtcacccgcgtacaaaatgcgctgcaaagcgtaccgggcgtcactcaggcacgggtaaacctggcggagcgtactgcgctggtgatgggcagtgcctccccacaagatttagtgcaggcggtggaaaaagcgggctacggcgcggaagcgattgaagatgacgcgaaacgccgcgagcgccagcaggaaaccgccgtcgctacgatgaagcgcttccgctggcaggcgattgtcgcactggcggtgggtattccggtaatggtctgggggatgatcggcgataacatgatggtcaccgctgacaaccgcagcctgtggttagttatcggcctgataaccctggcggtaatggttttcgccggcgggcatttttaccgcagcgcgtggaaaagcctgctgaacggtgcggcgacgatggatacgctggtggcgctgggtacgggtgtggcgtggctctattcgatgagcgtcaacctgtggccgcagtggttcccgatggaagcgcggcatctttactatgaagccagtgcgatgattatcggtctgattaatctcggccatatgctggaagcgcgcgcgcgtcagcgttcttctaaggcgctggagaaattactcgatttaaccccaccgacggcgcgagtggtcaccgcagagggtgaaaaaagcgtgccgctggcggaagttcagccagggatgttactgcgcctgacgaccggcgatcgcgtgccggtagatggcgagattacccagggcgaagcatggctggatgaagcgatgctgacgggcgaaccaatcccgcagcaaaaaggcgaaggcgaaagcgtccatgccgggacagtggtacaggacggtagcgtgctatttcgcgccagtgcggttggcagccataccacgctgtcaaggattattcgcatggtgcgccaggcccagagcagcaagccagaaatcggtcagctggcggataaaatctcagccgtatttgtgccggtagtagtggtgattgcgctgatcagtgcagcaatctggtatttctttggtccggcaccgcagattgtctataccctggtgatagccaccacggtgctgattattgcctgtccgtgtgcgctggggctggcgacgccaatgtcgattatttccggcgtcgggcgggcggctgagtttggcgtgctggtgcgggacgccgacgcgctgcaacgcgccagtacactcgataccgtcgtgttcgataaaaccgggacgctgaccgaagggaagccgcaggttgtcgcagtaaaaacatttgctgatgttgatgaagcgcaagcattgcgtctggcggcggcgctggagcaaggttccagccatccgctggcacgagcgatcctcgataaagcaggcgatatgcagctgccgcaggtcaacggtttccgcacattgcgcgggctgggcgtaagcggtgaagctgaaggtcatgcgttattgctgggtaatcaggcgctgttaaatgaccagcaagtcgatactaaagcgattgaagccgatatttcagctcaggcatcgcaaggagcaacgcctgtgctgctggcgattgacgggaaagtagtagccctgctggctgtacgcgatccgttgcgtagtgatagcgtggcggcgctgcaacgcctgcataaagcgggatatcgtctggtgatgttgaccggggataacccaaccaccgccaatgcgatcgccaaagaagcagggattgatgaggtgatcgccggggtgctgccagacggtaaagccgaagcgatcaaacgtctgcaaagtgaaggacgtcaggtggcaatggtgggcgacggcattaacgacgcgccagcgctggctcaggcggatgtcggtattgcgatgggtggcggcagtgatgttgccattgaaaccgcggcgattaccctgatgcgccatagcctgatgggtgttgcagatgcgctcgcgatttcccgcgcaacgctgcgcaatatgaagcagaacctgctcggtgcgtttatctacaacagcattggtattccggtcgccgctggtattttgtggccgtttactggaacactgcttaacccggtagttgccggagcggcaatggcgctctcgtcgattaccgtagtgagtaacgccaaccggttgctgcggtttaaaccgaaggaataa

SEQ ID NO: 459340 - DNA, 933 bp, Shigella boydii
atgttagatgcaaacaaattacagcaggcagtggatcaggcttacacccaatttcactcacttaacggcggacaaaatgccgattacattccctttctggcgaatgtaccaggtcaactggcggcagtggctatcgtgacctgcgatggcaacgtctatagtgcgggtgacagtgattaccgctttgcactggaatccatctcgaaagtctgtacgttagcccttgcgttagaagatgtcggcccgcaggcggtacaggacaaaattggcgctgacccgaccggattgccctttaactcagttatcgccttagagttgcatggcggcaaaccgctttcgccactggtaaatgctggcgctattgccaccaccagcctgattaacgctgaaaatattgaacaacgctggcagcgaattttacatatccaacagcaactggctggtgagcaggtagcgctctctgacgaagtcaaccagtcggaacaaacaaccaacttccataaccgggccatagcctggctgctgtactccgccggatatctctattgtgatgcaatggaagcctgtgacgtgtacacccgtcagtgctccacgctcatcaatactgttgaactggcaacgcttggcgcgacgctggcggcgggtggtctgaatccactgacgcataaacgcgttcttcaggccgacaacgtgccgtacattctggccgaaatgatgatggaagggctgtatggtcgctccggtgactgggcgtatcgcgttggtttaccgggcaaaagcggtgtaggtggcggtattctggcggtcgtccctggcgtgatgggaattgccgcgttctcaccaccgctggacgaagaaggtaacagtgttcgcggtcaaaaaatggtggcatcggtcgctaagcaactcggctataacgtgtttaagggctga

SEQ ID NO: 459341 - DNA, 1293 bp, Shigella boydii
atgatgaacacggaaggtaataacggtaacaaacccctcggtctatggaatgtcgtttccatcggtattggggcaatggtgggggcggggatcttcgcgctgctggggcaggctgcgttgctaatggaagcctcgacctgggtcgcctttgcttttggcggtattgtggcgatgttttccggttatgcctatgcgcgtctgggggcgagctatcccagtaatggcggcattatcgacttctttcgtcgcggattaggcaacggcgtcttttcgctggcgctctcgttactgtacctgttgacgctggcggtgagcatcgccatggtcgcccatgcttttggcgcttatgccgtgcagtttttgcatgaaggcagccaggaggagcaccttattttgctctacgcgttggggagcattgcggtgatgacgcttttcaactccttaagcaaccatgcggtagggcggctggaagtgatcctcgtcggcattaaaatgatgatcctgttattgctgattattgccggtgtctggtcgctgcaaccagcgcatatttccgtctctgcgccccccagctccggtgcgttcttctcctgtattgggataactttccttgcctatgcgggctttggcatgatggcgaacgcggcggataaagtgaaagatccgcaggtcattatgccacgggcgtttctggtggcgattggcgttaccacgttgctttatatctcgctggcactggttttgcttagcgatgtatcggcattagagttagaaaaatatgccgataccgccgtagcgcaggctgcttttccgctgctcggacatgtgggttatgtgatcgtcgtcatcggcgctttactggcgacggcttcagccattaacgcgaacctgttcgccgtgtttaacatcatggacaacatgggcagcgaacgcgaactgccgaagctaatgaataaatccctgtggcggcagagtacctggggcaacatcattgtcgtggtgttgattatgctgatgacggcggcactgaatttaggctcactcgccagcgttgccagcgccacctttttgatttgctacctggcggtgtttgtggtggcgatccgcctgcgtcatgatattcacgcctcgttgccgattcttatcgttggtacgttggtgatgttgttggtgatcgttggctttatctacagtctgtggtcccagggtagccgtgcgttgatatggattattggctcactcttactcagccttattgtggcaatggtcatgaagcgcaataaaaccgtataa

SEQ ID NO: 459342 - DNA, 408 bp, Shigella boydii
atgaacatcagcgatgtagcaaaaattaccggcctgactagcaaagccattcgcttctatgaagagaaggggctggtgacgccgccgatgcgcagcgaaaacggttatcgcacctacacgcagcagcatctcaacgaactgaccttactgcgccaggcacggcaggtgggctttaacctggaagagagcggcgagctggtgaatctgtttaacgacccgcagcggcacagcgccgacgtcaaacggcgcacgctggagaaggtggcggagatcgaacgacacattgaggagctgcaatccatgcgcgaccagctgctggcactggcgaatgcctgccctggcgatgacagcgccgactgcccgattatcgaaaatctctccggctgctgtcatcatcgggcagggtga

SEQ ID NO: 459343 - DNA, 459 bp, Shigella boydii
atgatggagttaatggtcgttcatccacatattttctggctcagtctcggcggtttgctgctggcagccgagatgctgggcggaaatggttatttgttgtggagcggcgtggcagcggtgattaccggcctggtggtctggctggtgccgctgggttgggagtggcaaggggtaatgtttgccatcctgacgctgctcgccgcctggctgtggtggaaatggttgtcgcggcgggggcgcgaacaaaagcacagcgatagtcatttaaaccagcgcgggcagcagctgattggccgacgttttgtgctggaatctccgctggtcaacgggcgcggtcatatgcgcgtcggtgacagttcatggcctgtcagcgccagcgaggatctcggtgcaggtacgcatgttgaagtcattgcgatagaagggataaccctacatatccgagccatctcgtcttaa

SEQ ID NO: 459344 - DNA, 918 bp, Shigella boydii
atgcttatctttatcccgattctcatttttgtcgcgctggtcattgtcggcgcgggcgtcaaaatcgtgccgcagggctatcaatggacggtagaacgttttggtcgctataccaaaacgttacagccggggctcagtctggtggtgccgtttatggatcgcattggtcgcaagatcaatatgatggagcaagtgctcgatatcccttcccaggaagttatctcgaaagataacgccaacgttaccatcgacgcagtctgttttattcaggtgattgacgcgccacgcgctgcctatgaagtcagcaatctggagctggcgatcatcaacctgaccatgactaacatccgtaccgtgttgggttcaatggaacttgacgaaatgctctctcagcgcgacagcatcaactcacgcctgctgcgtattgtcgatgaagccaccaacccgtgggggattaaagtcacccgtattgaaattcgcgacgtgcgcccaccggcagagcttatctcttcaatgaacgcgcagatgaaagcggaacgtaccaaacgcgcttacattcttgaagcggaagggatccgtcaggcggaaatcctcaaagccgaaggtgaaaaacagtcgcaaatcctgaaagcggaaggcgaacgtcagtcggcgtttttacaggctgaagcgcgtgaacgttccgccgaagcagaagcccgcgccaccaaaatggtgtctgaagctatcgcctccggtgatattcaggcggtgaactacttcgtagcgcagaaatacaccgaagcgttacagcagatcggttcctccactaacagcaaagtagtgatgatgccattagaggccagcagcctgatggggtcgattgccgggattgccgaactggtgaaagacagcgccaacaaacggactcagccatga

SEQ ID NO: 459345 - DNA, 678 bp, Shigella boydii
atgcaggaaaatagtcctttgcttcagctacaaaacgtaggatatctggcgggtgatgcgaagattcttaataacatcaatttttcgctgcgtgctggcgaatttaagttaattaccggtccttctggttgtggcaaaagtacgttgctaaaaatagttgcttcattgatcagcccaaccagcggaacgttactgtttgaaggtgaggatgtcagcacactaaagccagaaatctaccgccaacaagtctcttactgcgcccagacaccgacgctgtttggcgatacggtatacgataatctgatctttccctggcagatccgtaaccggcagcctgacccagccatttttctcgattttctcgaacgcttcgccttgccggacagcattttgacgaaaaatatcgccgagctatctggtggtgaaaaacaacgcatctcactgattcgtaacctgcaatttatgccgaaggttttattgctggatgaaatcaccagtgcgctggatgaaagtaataaacataacgttaatgagatgatccatcgttatgtgcgcgagcaaaatattgccgtgctgtgggtgacacacgataaagacgaaattaatcatgcggataaagtgattacactgcaaccgcatgccggagaaatgcaggaagcacgctatgaactcgcataa

SEQ ID NO: 459346 - DNA, 780 bp, Shigella boydii
atgaactcgcataatattactaacgaatcattggcactggcattaatgctggtggtggtggcaatcttaattagccataaagaaaaactggcgctggagaaagatattttctggagcgtcgggcgcgcgataattcagctgattattgtcggctatgtgctgaagtatattttcagcgcggatgatgccagcctgacattattgatggtgttatttatctgctttaatgcggcgtggaacgcgcaaaaacgcagtaaatatattgctaaagcttttatctcatcgtttattgccattacggtcggggcgggaattaccctggcggtgctgattctctcagggtcgattgaatttatcccgatgcaggtgatccctatcgccgggatgattgccggtaacgccatggtagcggtggggttgtgttacaacaatttagggcaacgggtcattagcgaacagcaacagattcaggagaaactgagtcttggcgcgacgccgaagcaggcttcagcgatattgattcgcgacagtattcgcgcggctttaattccgacggtcgattcagcaaaaacggttggcttagtgagtttaccaggaatgatgtccgggctgatatttgccgggattgatccggtgaaggcgattaaatatcagattatggtgacctttatgctgctctcaaccgccagcttgtcgaccattattgcctgctatttaacctatcgtaagttttataattcgcgccaccagttggtggtgacgcaattgaagaagaaatga

SEQ ID NO: 459347 - DNA, 855 bp, Shigella boydii
atgtccgtagaaaatattgtcaacattaacgaatctaacctgcaacaggttcttgaacagtcgatgaccactccggtgctgttctatttttggtctgaacgtagccagcactgtttgcagttaaccccgatcctggaaagcctcgcggcgcagtacaacgggcaatttattctggcgaagctggactgcgacgcggagcagatgattgccgcccagtttggtctgcgcgcgattccgaccgtgtatctgttccagaacgggcaaccggtagatggcttccaggggccgcaaccggaagaggcgatccgcgccctgctggataaagtgctgccgcgcgaagaagagctgaaagcgcagcaggcgatgcaactgatgcaggaaggcaattacaccgatgccctgccattgctgaaagacgcctggcagttgtcgaatcagaacggggagatcggcctgctgctggcagaaacgctgattgcgctgaaccgttctgaagatgcggaagcggtgctgaaaaccattccgttgcaggatcaggacacccgctaccaggggctggtggcgcaaatcgaactgctgaagcaggcggctgatacgccggaaattcaacagttgcaacagcaggtggcggagaatccagaagatgccgcactggcgacgcaactggcgctgcaactgcatcaggttgggcgcaatgaagaggcgctggagttgctgttcgggcatctgcgtaaagatctcaccgccgcagacggtcagacgcgtaaaacgttccaggagatcctcgctgcgctgggtacgggtgatgcactggcgtcgaagtatcgccgccagctgtatgcattgttgtattga

SEQ ID NO: 459348 - DNA, 771 bp, Shigella boydii
atgcaaaaatcggtcttaattaccggatgttccagtggaattggcctggaaagcgcactcgaattaaaacgccagggttttcatgtgctggcaggttgccgaaaaccggatgatgttgagcgtatgaacaacatgggatttaccggcgtgttgatcgatctggattcaccagaaagtgttgatcgcgcagcagacgaggtgatcgccctgaccgataattgtctgtatgggatctttaacaatgccggattcggcatgtatggccccctttccaccatcagccgtgcgcagatggaacagcagttttccgccaactttttcggcgcacaccagctcaccatgcgcctgttacccgcgatgttaccgcacggtgaagggcgtattgtgatgacatcatcggtgatgggattaatctccacgccgggtcgtggcgcttacgcggccagtaaatatgcgctggaggcgtggtcagacgcgctgcgcatggagctacgccacagcggaattaaagtcagcctgatcgaacccggtcccattcgtactcgcttcaccgacaacgtcaaccagacgcaaagtgataaaccagtcgaaaatcccggcatcgccgcccgctttacgttgggaccggaagcggtggtcgacaaagtgcgccatgcttttattagcgagaagccgaagatgcgctatccggtaacgctggtgacctgggcagtaatggtgctcaagcgcctgctgcctgggcgcgtgatggacaaaatattgcaggggtga

SEQ ID NO: 459349 - DNA, 594 bp, Shigella boydii
ttgcccttcctgttcctggtcctgttaaccttccgtgccgccgcagcggacacgttattgattctgggtgatagcctgagcgccgggtatcgaatgtctgccagcgcggcctggcctgccttgttgaatgataagtggcagagtaaaacgtcggtagttaatgccagcatcagcggcgacacctcgcaacaaggactggcgcgccttccggctctgctgaaacagcatcagccgcgctgggtgctggttgaactgggcggcaatgacggtttgcgtggttttcagccacagcaaaccgagcaaacgctgcgccagattttgcaggatgtcaaagccgccaacgctgaaccattgttaatgcaaatacgtctgcctgcaaactatggtcgccgttataatgaagcctttagcgccatttaccccaaactcgccaaagagtttgatgttccgctgctgcccttttttatggaagaggtctacctcaagccacaatggatgcaggatgacggtattcatcccaaccgcgacgcccagccgtttattgccgactggatggcgaagcagttgcagcctttagtaaatcatgactcataa

SEQ ID NO: 459350 - DNA, 687 bp, Shigella boydii; identical to SEQ ID NO: 11195

SEQ ID NO: 459351 - DNA, 2418 bp, Shigella boydii
atgattgcacgttggttctggcgcgaatggcgttcgccgtcgctattaattgtctggctggcgctaagcctggcggtggcctgcgtgctggcgctgggcaatatcagcgatcgcatggagaagggcttaagccagcaaagccgtgagtttatggcgggcgatcgggcgttgcgcagttcacgcgaagtgccgcaagcgtggctggaggaagcgcaaaagcgcggcctgaaagtcggcaagcagctgactttcgccacaatgacctttgcaggcgacacaccgcagctggcgaacgtcaaagcggtggatgatatctacccgatgtatggcgatctgcaaactaatccccctggcctgaaaccgcaggcgggcagcgtattgctggccccacgcctgatggcactgcttaacctgaaaacgggcgacaccattgacgtgggcgatgccaccttgcggattgccggagaagtgattcaggaaccggattccggttttaaccccttccagatggctccgcgtctgatgatgaatctggcggatgtcgataaaaccggagccgtgcagccggggagtcgggtcacctggcgttataaattcggcggcaacgagaaccagctcgacggctatgagaaatggttgttacctcagcttaaacccgaacaacgctggtacggtctggaacaggacgaaggcgcgctggggcgatcgatggaacgctcgcaacagttcctgctgctttcggcgcttctgaccttgctgctggcagtggcagtggcagcggtggcggtagcgatgaatcattactgtcgcagtcgctacgatctggtggcgatcctcaaaacgctgggggcagggcgagcgcaactgcgtaagctaatcgtcgatcagtggttgatggtgctgacgctttcagccgttaccggtggggccataggcctgttgttcgaaaacgtgttgatggtgctgctcaagcccgttctgcctgctgcactaccgccagccagcctctggccgtggctgtgggcgcttggcaccatgacggtcatctcgctgctggtggggctacgaccataccgcttgttgctggcaacgcagcctttacgcgtattacgtaatgatgtggtagcgaacgtctggccgctgaagttttatctgccgattgtcagtatggtggttgtgctgctgctcgccggattaatgggtggcagcatgctgctttgggcggtgctggcgggcgtggtagtactggctttgctgtgcggtgtgctgggctggatgcagctgaatgtacttcgccgcatgacgctgaaatcgctacctctgcgcctggcggttagccgcctgttacgtcagccgtggtcaacgttaagccagctttcggcattttcgctctcctttatgctgctggcgctgttgctggtattgcgtggcgatctgctcgaccgctggcagcagctaccgccagaaagcccgaactactttttaattaacatcgccacagaacaggtagcaccgctaaaagcgttcctcgcggaacatcatatagtcccggaatcattttatccggtagtgcgggcgcggctgacggcgattaacgataagccgacagaaggtaatgaagatgaggcgcttaatcgcgaactcaatcttacctggcaaaatacgcggcccgatcataatccgattgtcgccggtaactggccgccaaaagccgatgaagtgtcgatggaagaggggctggcgaaacgcttaaacgttgccctcggtgataccgtgacttttatgggcgatacccaggagttccgcgctaaagtgaccagcctgcgcaaagtggactgggaaagtctgcggcctaatttctattttattttcccggaaggggcattagacgggcaaccgcagagctggcttaccagtttccgctgggagaatggcaacggcatgttgacgcaactcaaccgccagttcccgaccattagcctgttagatattggcgcgattttaaaacaggtcggtcaggtgctggagcaggtaagtcgggcgctggaggtgatggtggtgctggtcaccgcctgcggtatgttgctgttgctggcacaggtgcaggtgggaatgcgccagcgtcatcaggagctggtggtatggcgcacactcggtgcggggaaaaaactgctgcgcacgacattgtggtgtgagttcgccatgcttgggtttgtttccggcctggtggccgcaattggtgcggaaacggcactggcagtgttgcaggcgaaagtgtttgatttcccgtgggagccagactggcgattgtggattgttctgccgtgcagcggtgcgctgctgctgtcgcttttcggcggctggctgggtgcgcgactggttaagggtaaggcgctgttcaggcagtttgcggggtga

SEQ ID NO: 459352 - DNA, 228 bp, Shigella boydii
atgcaatacactccagatactgcgtggaaaatcactggcttttcccgtgaaatcagcccggcatatcgccaaaaactgctttctcttggcatgttacctggctcctcttttaatgtggtgcgcgtcgctccactcggcgaccccattcatatcgaaacccgtcgtgtgagcctggtattacgcaaaaaagatctggccttattagaagtggaagcggtttcctgttaa

SEQ ID NO: 459353 - DNA, 2322 bp, Shigella boydii
atgaaaaaattaaccataggcttaattggtaatccaaattctggcaagacaaccttatttaaccagctcactggcgcacgtcagcgtgtaggtaactgggctggcgttaccgtcgaacgtaaagaagggcaattctccaccaccgatcatcaggtcacgctggtggacctacccggcacctattctctgaccaccatctcatcgcagacctcgctcgatgagcaaatcgcctgtcactacattttgagtggcgacgccgacctgctgattaacgtggtggatgcgtctaaccttgagcgtaacctgtacctgacgctacaactgctggaactcggcattccctgcattgtggcactgaacatgctcgacattgccgagaagcaaaatattcgtattgaaattgatgctctgtcggcgcgtctgggctgtccggtgatcccgctggtttcaacccgtggtcgcggtattgaagcgctcaagctggcgattgatcgctataaagctaacgagaatgtggaactggtgcattacgcacagccgctactcaacgaagcagattcactggcaaaagtgatgccttccgacatcccgctgaaacaacgtcgctggctgggcctgcaaatgctggaaggcgatatctacagccgcgcctacgccggtgaagcgtcgcagcatctggatgccgccctcgcccgtctgcgtaatgagatggacgatccggcgctgcacattgccgatgcgcgttaccagtgcattgctgccatctgtgatgtggtaagcaacaccctgacggcagaacccagccgtttcaccactgcggtagataaaatcgtgctcaaccgtttcctcggtctgccgattttcctctttgtgatgtacctgatgttcctgctggctatcaacatcggcggggcgttacagccgctgtttgacgtcggctccgtggcgctatttgtgcatggtattcaatggattggctacacgctccacttcccggactggctgactatcttcctcgcccagggcctgggtggcggcattaacaccgtgctgccactggtgccgcagattggcatgatgtacctgttcctctccttccttgaggactccgggtatatggcgcgtgcggcgtttgtgatggaccgtctgatgcaggcgctgggcttgccggggaaatcctttgtgccgctgatcgtcggtttcggttgtaacgtaccgtcggtaatgggtgcacgtacgcttgatgcaccgcgtgaacgtctgatgaccatcatgatggcaccgtttatgtcctgcggcgcgcgtctggctatcttcgcagtattcgcggctgccttcttcgggcagaacggtgcgctggcggtcttctcgctgtatatgctgggtattgtgatggcggtgctgactggcctgatgctcaagtacaccatcatgcgcggtgaagcgacgccgtttgtcatggagttgccggtctatcatgtaccacacgttaaaagcctgattatccagacctggcagcgtctgaaaggcttcgttctgcgtgctggtaaagtgatcatcatcgtcagcattttcctgagcgctttcaacagcttctcgctgagcgggaaaatcgtcgataacatcaacgactcggcgctggcgtccgtcagccgggtgatcaccccggtcttcaagccaattggcgtgcatgaagataactggcaggcaacggttggcctgtttacaggtgccatggcgaaagaagtggtagtgggtacgctcaacaccctctacaccgcagaaaatattcaggacgaagagttcaatccggcagagtttaacctcggtgaagagctgttcagtgcgatagatgaaacctggcagagcctgaaagacaccttcagccttagcgtactgatgaaccccattgaagccagcaaaggcgacggcgaaatgggtaccggggcgatgggcgtgatggatcagaaattcggtagcgcagcagcagcttacagctacctgattttcgtcctgctgtatgtaccatgtatctcggtgatgggagccatcgcccgtgaatcaagccgtggctggatgggcttctccatcctgtgggggctgaatatcgcttactcgctggcaacattgttctatcaggtcgccagctacagtcagcacccaacttacagcctggtgtgcattctggcggttatcctgtttaacatcgtggttatcggtctgctgcgccgcgcgcgtagccgggtggatatcgaactgctggcaacccgcaagtcggtaagcagttgctgcgcagccagcaccaccggtgattgccattaa

SEQ ID NO: 459354 - DNA, 237 bp, Shigella boydii
atggcttcacttattcaggtgcgcgatttgctggcgttacggggccgtatggaagcggcccagataagccagacattgaacactccacagccaatgattaacgccatgctgcaacaactggaaagtatgggcaaagccgtgcggattcaggaagaacctgacggctgcctctctggcagttgtaaaagctgcccggaaggaaaagcctgtctgcgcgagtggtgggcgcttcgttaa

SEQ ID NO: 459355 - DNA, 879 bp, Shigella boydii
atgagcaaaaagcagagttccaccccacacgatgcgctgttcaaactctttttacgccaaccggacacggctcgtgattttcttgcgtttcatttacctgcacccattcacgcgctttgtgatatgaaaaccctcaagctggagtcgagcagctttattgatgacgatctgcgtgaaagctattccgatgtgctgtggtcggtgaaaacggaacaaggaccaggatacatctattgtctgattgaacatcaaagcacctcaaacaaactgatcgcatttcgcatgatgcgttacgctattgccgcaatgcaaaatcaccttgatgctggatacaaaacgttgccgatggtggtgccattgttgttttaccacggtattgaaagcccctatccctattcgctgtgttggctggattgtttcgccgatcccaaactggcaaggcagctttatgcctccgcatttccgctgattgatgtcaccgtcatgcctgatgatgaaatcatgcagcaccgacgtatggcgctgctggagttaattcaaaaacatattcgtcaacgcgacctgatggggctagtagagcaaatggcctgcttattaagtagtggatacgctaatgacagacaaatcaaagggctgtttaattacatactgcaaaccggcgacgcggtacgttttaacgattttatcgacggcgttgccgaacgttcaccgaaacacaaggagagtttaatgacaattgcggaaagattgcggcaggagggggaacaatccaaagccctgcatatagccaaaataatgcttgaatccggagtccctcttacagacatcatgcgctttaccggggtgtcagaagaagagttggctgcggcgagccagtaa

SEQ ID NO: 459356 - DNA, 771 bp, Shigella boydii
atgaataacatctggtggcagaccaaaggtcaggggaatgttcatcttgtgctgctgcacggatggggactgaatgccgaagtgtggcgttgcattgacgaggaacttagctcgcattttacgctgcaccttgttgatctgcccggcttcgggcgcagccagggatttggtgcgctgtcacttgctgatatggccgaagccgtgctgcaacaggcacctgataaagccatttggttaggctggagtctgggcgggctggtggcaagccagattgcgttaacccatcccgagcgtgttcagacgctggtcaccgtggcgtcgtcaccttgttttagtgctcgtgacgattggccggggataaaaccggacgtgctggcgggatttcagcagcaactcagtgatgattttcagcgtacagtggagcggttcctggcgttacaaaccatggggactgaaacggcgcgccaggatgcgcgggcgttgaagaaaaccgttctggcgttaccgatgccggaggttgacgtgcttaatggcgggctggaaatcctgaaaacggttgatctccgtcagccgctgcaaaacgtgcccatgccgtttttgcgattgtatggctatctcgatggtctggtgccgcgcaaagtggtgccgatgctggataaactctggcctcgcagcaaatcatatatcttcgccaaagcggcccatgcgccgtttatttcgcatccggtcgagttttgtcacctgctggtggcgttgaagcagagggtgtag

SEQ ID NO: 459357 - DNA, 684 bp, Shigella boydii
atgctaacagtaccgggattatgctggctatgccgaatgccgctggcgttaggtcattgggggatttgttcggtctgctcacgcgccgcccgtacagataaaacgttatgcccacaatgtggattacccgccacacactcacatcttccctgcggtcgcagcctgcaaaaaccaccgccctggcaaagactggtcacggttgccgactatgcgccgccgttaagtccgcttatccaccagcttaaattttcccggcgcagtgaaatcgccagcgccctgtcacgtctgttactattggaagtcttacacgctcgtcgcaccaccgggttgcaattgccggatcgcatcatcagcgttccgttatggcagcggcgtcactggcgtcggggatttaatcagagcgatttgctgtgtcagccgttatcacgctggttgcactgccgatgggatagcgaagccgtcacacgaacacgggccactgcgacccagcattttctcagtgcccggctacgcaagcgcaacctgaaaaatgcctttcgtcttgaattgcccgtgcaaggtcgccatatggtgattgtggatgatgtcgttaccaccggaagtaccgtcgcagagattgcgcagttgcttttacgcaatggtgcggcgactgtccaggtctggtgcctttgtcgaaccttgtag

SEQ ID NO: 459358 - DNA, 576 bp, Shigella boydii
atgatccgtatttccgatgctgcacaagcgcactttgccaaactgctggcaaaccaggaagaagggacacaaatccgcgtatttgtgattaaccctggcacgcctaacgctgaatgtggtgtttcttattgtccgccggatgccgtggaagccaccgacactgccctgaaatttgacctgctgaccgcgtatgttgatgagttaagcgctccttacctggaagatgcagagatcgattttgttaccgaccagttgggttctcagctaacactgaaagcgcctaacgccaaaatgcgtaaagtggcagacgatgcaccactgatggagcgcgtggagtatatgctgcagtcgcagatcaacccacagcttgctggtcacggtggccgcgtttcactgatggaaatcaccgaagacggttacgccattctgcaatttggcggcggctgtaacggttgttccatggtcgatgtgacgctgaaagaagggatcgagaagcagctgctaaacgaattcccggagctgaaaggtgtgcgcgatctcaccgaacaccagcgcggcgaacactcctactactaa

SEQ ID NO: 459359 - DNA, 1317 bp, Shigella boydii
atgccattagtcattgttgctatcggtgtaatcttgttgttgctcctgatgatccgtttcaaaatgaacggcttcatcgctctcgtcctcgtggcgcttgctgttggattaatgcaagggatgccgctggataaagttattggctccatcaaagccggtgtcggcgggacgctcggtagccttgccctgatcatgggttttggcgcgatgctgggcaaaatgctggcagactgcggtggcgcacaacgtatcgccaccaccctgattgccaaatttggtaaaaaacacatccagtgggcggtggtactgaccggttttaccgttggttttgccctgttctatgaagtgggctttgtgctgatgctgccgctggtgtttaccatcgcggcttctgcgaatattccactgctgtatgttggtgtaccaatggcagctgcactgtctgtgacccacggcttcctgccaccgcatccgggtccgactgcgattgccaccattttcaatgccgacatgggtaaaaccctgctgtacggtactattctggcaatcccgaccgtgattctcgccggtccggtttacgctcgcgtgttgaaaggtatcgataagccgatccctgaaggtctgtacagcgcgaaaaccttcagcgaagaagagatgccgagctttggcgtcagcgtctggacctctctggtgccggtagtgctgatggcgatgcgtgcgattgccgaaatgatcctgccgaaaggtcacgctttcctgccggtagcggagttcctcggtgacccggtaatggctacgctgattgccgtgctgattgcgatgttcacctttggtctgaaccgtggtcgttcaatggatcagattaacgacacgctggtttcttccatcaaaatcattgcgatgatgctgttgatcatcggtggtggcggtgcgttcaagcaggtgctggtagacagcggcgtggacaaatacattgcttccatgatgcacgaaaccaacatttctccgctgctgatggcctggtcgattgctgccgtactgcgtatcgcgctgggttccgcaaccgttgcggcaatcactgcgggtggtatcgcggcaccgctgattgcaacgacgggtgttagcccggagctgatggttattgcggtgggttccggtagtgtgattttctctcatgtgaacgatccgggcttctggctgttcaaagagtactttaacctgactatcggcgagaccatcaaatcctggtcgatgctggaaaccattatctcggtgtgcggtctggtaggctgtctgctgctgaatatggtgatttga

SEQ ID NO: 459360 - DNA, 2085 bp, Shigella boydii
atggaaagcaaacgtctggataatgccgcgctggcggcggggattagccccaattacatcaatgcccacggtaaaccgcagtcgattagcgccgaaaccaaacggcgtttgcttgacgcgatgcatcaacgtaccgccacgaaagtggcggtaacgccagtcccgaatgtcatggtttataccagcggcaaaaaaatgccgatggtggtggagggcagcggcgaatatagctggctgctgaccaccgaagaaggaacacagtacaaaggccatgtaacggggggcaaagcgttcaatctaccgacgaagctgccggaaggttatcacacactgacactcacccaggacgaccagcgcgcgcattgccgggtgattgtcgccccgaaacgctgttacgaaccgcaggcgttgctgaataaacaaaagctgtggggtgcctgcgttcagctttatacgctgcgatcggaaaaaaactggggtattggggattttggcgatctcaaagcgatgctggtggatgtggcaaaacgtggcgggtcgttcatcggcctgaacccgattcatgcgctctatccggcaaatccggagagtgccagcccatacagcccgtcttctcgccgttggctgaatgtgatttatatcgacgttaacgccgttgaagatttccatcttagcgaagaggctcaggcctggtggcagttgccgaccacgcaacagacgctgcaacaggcgcgcgatgccgactgggtcgattactccacggttaccgccctaaaaatgacagcattacgaatggcgtggaaaggtttcgcgcaacgtgatgatgagcagatgaccgcgtttcgccagtttgttgcagagcagggcgacagcctgttctggcaggcagcctttgatgcgctacatgcccagcaagtgaaagaggacgaaatgcgctggggctggcctgcatggccagagatgtatcagaacgtggattcaccagaagtgcgtcagttctgcgaagaacatcgtgatgacgtcgatttttatctctggttgcagtggctggcttacagccagtttgccgcctgctgggagataagccagggctatgaaatgccgattggcttgtatcgtgatctggcggttggcgtagcggaaggtggggcggaaacctggtgtgaccgtgaactatattgcctgaaagcgtcggttggcgcgccgccggatatcctcggcccgttggggcagaactggggattaccgccaatggacccgcatatcatcaccgcgcgtgcctatgaaccgtttatcgagctgttgcgtgccaatatgcaaaactgcggcgcattacgaattgaccatgtgatgtcgatgctgcgtttgtggtggataccgtatggcgagacggcagatcagggcgcgtatgttcactatccggtggataatctgctctcgattctggcactcgaaagtaaacgtcatcgctgtatggtgattggtgaagatctcggtaccgtaccggtggagattgtcggtaagctgcgcagcagcggtgtgtactcctacaaagtgctctatttcgaaaacgaccacgagaagacgttccgtgcaccgaaagcgtatccggagcagtcgatggcggttgcggcgacacatgacctgcctacgctgcgcggttactgggagagcggggatctaacgttgggcaaaaccctggggctgtatccggatgaagtggtactgcgcggtctgtatcaggatcgcgaactggcgaagcaagggctgctggatgcactgcataaatatggttgtctgccaaaacgtgccgggcataaggcatcgttgatgtcgatgacgccgacgcttaatcgtggtttgcagcgctacattgccgacagtaacagtgctctgttaggactacagccggaagactggctggatatggccgaaccggtgaatattcctggcaccagttaccagtataaaaactggcgacgcaagctttccgcaacgcttgagatgatgtttgccgatgatggcgtgaataagttgctgaaggatttggacagacggcgcagagctgcagcgaagaagcagtag

SEQ ID NO: 459361 - DNA, 2394 bp, Shigella boydii
atgtcacaacctatttttaacgataagcaatttcaggaagcgctttcacgtcagtggcagcgttatggcttaaattctgcggctgaaatgactcctcgccagtggtggctagcagtgagtgaagcactggccgaaatgctgcgtgctcagccattcgccaagccggtggcgaatcagcgacatgttaactacatctcaatggagtttttgattggtcgcctgacgggcaacaacctgttgaatctcggctggtatcaggatgtacaggattcgttgaaggcttatgacatcaatctgacggacctgctggaagaagagatcgacccggcgctgggtaacggtggtctgggacgtctggcggcgtgcttcctcgactcaatggcaactatcggtcagtctgcgacgggttacggtctgaactatcaatatggtttgttccgccagtcttttgtcgatggcaaacaggttgaagcgccggatgactggcatcgcagtaactacccgtggttccgccacaacgaagcactggatgtgcaggtagggattggcggtaaagtgacgaaagacggacgctgggagccggagtttaccattaccggtcaagcgtgggatctccccgttgtcggctatcgtaatggcgtggcgcagccgctgcgtctgtggcaggcgacgcacgcgcatccgtttgatctgactaaatttaacgacggtgatttcctgcgtgccgaacagcagggcatcaatgcggaaaaactgaccaaagttctctatccaaacgacaaccatactgccggtaaaaagctgcgcttgatgcagcagtacttccagtgtgcctgttcggtagcggatattttgcgtcgccatcatctggcggggcgtaaactgcacgaactggcggattatgaagttattcagctgaacgatacccacccaactatcgcgattccagaactgctgcgcgtgctgatcgatgagcaccagatgagctgggatgacgcctgggccattaccagcaaaactttcgcttacaccaaccataccctgatgccagaagcgctggaacgctgggatgtgaaactggtgaaaggcttactgccgcgccatatgcagattattaacgaaattaatactcgctttaaaacgctggtggagaaaacctggccgggcgatgaaaaagtgtgggccaaactggcggtggtgcacgataaacaagtgcatatggcgaacctgtgtgtggttggcggtttcgcggtgaacggtgttgcggcgctgcactctgatctggtggtgaaagatctgttcccggaatatcaccagctatggccgaacaaattccataacgtcaccaacggtattaccccacgtcgctggatcaaacagtgcaaccctgcactggcggctctgttggataaattactgcaaaaagagtgggctaacgatctcgatcagctgatcaatctggaaaaattcgctgatgatgcgaaattccgtcagcaatatcgcgagatcaagcaggcgaataaagtccgtctggcggagtttgtgaaagttcgtaccggtattgagatcaatccacaggcgattttcgatattcagattaaacgtctgcatgagtacaaacgccagcacctgaatctgctgcatattctggcgttgtacaaagaaattcgtgaaaacccgcaggctgatcgcgtaccgcgcgtcttcctcttcggcgcgaaagcggcaccgggctactacctggcgaagaatattatctttgcgatcaacaaagtggctgacgtgatcaacaacgatccactggttggcgataagttgaaggtggtgttcctgccggattattgtgtttcggcggcggaaaaactgatcccggcggcggatatctccgaacaaatttcgactgcaggtaaagaagcttccggtaccggcaatatgaaactggcgctcaatggtgcgcttactgtcggtacgctggatggtgcgaacgttgaaatcgccgagaaagtcggtgaagaaaatatctttatttttggtcataccgtggaacaagtgaaggcaattctggccaaaggctacgacccggtgaaatggcggaagaaagataaggtgctggacgcagtattgaaagagctggaaagcggtaaatacagcgacggcgataagcatgccttcgaccagatgctgcacagtatcggcaaacaaggcggcgatccgtatctggtgatggcggatttcgcagcctatgttgaggcacaaaagcaggtggatgtgctgtaccgcgaccaggaggcctggactcgcgtggcgatcctcaataccgcccgctgcggtatgtttagctcggatcgctctattcgcgattatcaggctcgtatctggcaggcaaaacgctaa

SEQ ID NO: 459362 - DNA, 1749 bp, Shigella boydii
atgctgattccgtcaaaactaagtcgtccggttcgactcgaccataccgtggttcgtgagcgcctgctggctaaactttccggcgcgaacaacttccggctggcgctgatcacgagtcctgcgggctacggaaagaccaccctcatttcccagtgggcggcaggcaaaaacgatatcggctggtactcgctggatgaaggtgataaccagcaagagcgtttcgccagctatctcattgccaccgtgcagcaggcaaccaacggtcactgtgcgatatgtgagacgatggcgcaaaaacggcaatatgccagcctgacgtcactcttcgcccagcttttcattgagctggcggaatggcatagcccactttatctggtcatcgatgactatcatctgatcactaatccagtgatccacgagtcaatgcgcttctttattcgccatcaaccagaaaatctcaccctggtggtgttgtcacgcaaccttccgcaactgggcattgccaatctgcgtgttcgtgaccaactgctggaaattggcagtcagcaactggcatttacccatcaggaagcgaagcagttttttgattgccgtctgtcatcgccgattgaagccgcagaaagcagtcggatttgcgatgacgtttccggttgggcgacggcactacagctaatcgccctctccgcccggcagaatacccactcagcccataagtcggcacgccgcctggcgggaatcaatgccagccatctttcggattatctggtcgatgaggttttggataacgtcgatctcgcaacgcgccattttctgttgaaaagcgccattttgcgctcaatgaacgatgcgctcatcacccgtgtgaccggcgaagaaaacgggcaaatgcgtctcgaagagattgagcgtcaggggctgtttttacagcggatggatgataccggcgagtggttctgctatcacccgctgtttggcaacttcctgcgccagcgctgccagtgggaactggcggcggagctgccggaaatccaccgtgccgccgcagaaagctggatggcccagggatttcccagcgaagcgattcatcatgcgctggcggcaggcgatgcgctgatgctgcgcgatattctgcttaatcacgcctggagtttgttcaaccatagcgaactgtcgctgctggaagagtcgcttaaggccctgccgtgggacagtttgctggaaaatccgcagttagtgttattgcaggcgtggctaatgcaaagccaacatcgctatggcgaagttaacaccctgctagcccgtgctgaacatgaaatcaaggacatcagagaaggcaccatgcacgcagaatttaacgctctgcgcgccctggtggcgattaacgatggtaatccggatgaagcggaacggctggcaaaactggcactggaagagctgccaccgggctggttctatagccgcattgtggcaacctcggtgctgggtgaagtgctgcactgcaaaggcgaattgacccgctcactggcgctaatgcagcaaaccgaacagatggcacgccagcacgacgtctggcactacgccttatggagtttaatccagcaaagtgaaattctgtttgcccaagggttcctgcaaaccgcgtgggaaacacaggaaaaagcgttccagctgatcaacgagcagcatctggaacagctgccgatgcatgagtttctggtgcgcatccgagcacaactgttatgggcctga

SEQ ID NO: 459363 - DNA, 1017 bp, Shigella boydii
atgaaaaggatgattgcgctggatggcgcacagggcgaaggtggcgggcagattctgcgcgcggcgctgagcctgtcgatgataaccggccagccatttaccatcaccagcattcgtgccgggcgggcgaaaccggggctgttgcgccagcatctgaccgcggtaaaagcggctgcggaaatttgtagggcaacggtggaaggcgcggagctggggtcgcagcgtctggtcttccggcctggcgccgtgcgcggcggcgagtaccgctttgctatcggtagtgccggaagctgtacgctggtgctgcaaacggtgctgcccgcgctgtggtttgccgatggaccttcgcgtgttgaagtgagcggaggcaccgataacccgtcggcgccgcctgcggattttatccgccgggtgctggagccgctgctggcgaaaataggaattcatcagcaaaccacgctgttacgtcacggtttttatcctgccggaggcggcgtggtggcaacggaagtctcgcccgtggcatcgtttaacaccttgcaacttggcgagcgcgggaacattgtgcagatgcgtggagaagttctattagctggtgtgccgcgccatgttgctgagcgtgaaatcgctacactggcggggagtttttccctgcatgaacagaatattcataacctgccgcgcgaccaggggccgggtaataccgtctcgctggaagtcgaaagtgaaaatatcactgaacgctttttcgtcgtcggtgaaaagcgcgtcagtgccgaggtggtagccgcgcagttagtgaaagaggtgaaacgctacctggcaagcccggcggcagtgggggaatatctcgccgaccagctggtgctaccgatggcgctggcgggcgcgggagaatttacggtcgcccatccttcatgccatctgctgaccaatatcgccgtggtggagcgtttcttgccggtgcggtttggtttgatagaaacagatggcgtaacgcgggtgagtattgaatga

SEQ ID NO: 459364 - DNA, 1227 bp, Shigella boydii
atgaattacgaattactgaccactgaaaatgccccggtaaaaatgtggaccaaaggcgtgccggtagaagccgatgcgcgtcagcaacttattaatacggcgaagatgccgtttattttcaaacatattgcggtaatgcctgatgtacacttgggtaaagattccaccattggtagcgtgatcccgaccaaaggggcgattattccggcggcggtgggcgtggatattggctgtggaatgaacgcgctgcgtaccgcgttaacggcggaagacctgcctgaaaacctggcagagctgcgtcaggcgattgaaacggccgtgccgcacgggcgtactaccgggcgttgtaaacgtgataaaggcgcatgggaaaacccgcctgttaacgtcgatgcgaaatgggctgagcttgaagccggttatcagtggttaacgcaaaaatatccccgtttcctgaataccaataactataaacacctgggaacgctgggaaccggtaaccactttattaaaatctgccttgatgagtcggaccaggtgtggattatgctgcactccggttcacgcggaattggtaacgccatcgggacttactttatcgatctggcacaaaaagagatgcaggaaacgcttgagacgttgccgtcgcgtgatctggcgtactttatggaaggtacggaatactttgatgattacctgaaagccgtggcctgggcgcagctttttgccagccttaaccgcgatgcgatgatggaaaacgtggtaacggcattgcagagcattacgcagaaaacggtcagacagccacaaacgctggcgatggaagagatcaactgtcaccacaactatgtgcaaaaagaacagcactttggtgaagagatctacgtgacgcgtaaaggcgcggtgtctgcgcgtgctggtcaatatggaattattcccggttcgatgggagcaaaaagctttatcgtccgtgggctgggaaatgaagagtcgttctgttcgtgcagccacggtgccgggcgggtaatgagccgaactaaagcgaaaaaactgttcagcgtggaagatcaaattcgtgccaccgcgcatgtggaatgccgtaaagatgccgaagtgatcgacgaaatcccgatggcgtataaagatattgatgcggtgatgacggcacaaagcgatctggtggaagttatctataccctgcgtcaggtggtgtgcgtaaaaggataa

SEQ ID NO: 459365 - DNA, 276 bp, Shigella boydii
gtggcttctgtttctatcagctgtccctcctgttcagctactgacggggtggtgcgtaacggcaaaagcactgccggacatcagcgctatctctgctctcactgccgtaaaacatggcaactgcagttcacttacaccgcctctcaacccggtacgcaccagaaaattattgatatggccatgaatggcgttggatgccgggcaactgcacgcattatgggcgttagcctcaacacgattttacgtcacttaaaaacctcaggccgcagtcggtaa

SEQ ID NO: 459366 - DNA, 747 bp, Shigella boydii
ttgacacagagcgatccgcgccgtcagttggtggatacattaacacgttgggatggcatcaatttgcttaatgatgatggtaaaacctggcagcagccaggctctgccatcctgaacgtttggctgaccagtatgttgaagcgtaccgtagtggctgccgtacctatgccatttgataagtggtacagcgccagtggctacgaaacaacccaggacggcccaactggttcgctgaatataagtgttggagcaaaaattttgtatgaggcggtgcagggagacaaatcaccaatcccacaggcggttgatctgtttgctgggaaaccacagcaggaggttgtgttggctgcgctggaagatacctgggagactctttccaaacgctatggcaataatgtgagtaactggaaaacacctgcaatggccttaacgttccgggcaaataatttctttggtgtaccgcaggccgcagcggaagaaacgcgtcatcaggcggagtatcaaaaccgtggaacagaaaacgatatgattgttttctcaccaacgacaagcgatcgtccggtgcttgcctgggatgtggtcgcacccggtcagagtgggtttattgctcccgatggaacagttgatcagcactatgaagatcagctgaaaatgtacgaaaattttggtcgtaagtcgctctggttaacgaagcaggatgtggaggcgcataaggagtcgcaggaagtgttgcacgttcagagataa

SEQ ID NO: 459367 - DNA, 957 bp, Shigella boydii
atgaacccgattgcagttaccctactcaccggttttttaggcgcgggcaaaaccaccctgctgcgccatattcttaacgaacaacacggctacaagattgccgtgattgaaaacgaattcggcgaagtctccgttgatgatcaactgattggcgaccgcgccacgcagatcaaaacgctgaccaacggctgcatctgctgttcgcgctccaacgagctggaagacgcactactcgacctgctggataatctcgacaagggcaatattcagttcgaccgtctggtcattgaatgcaccggcatggccgatcccggcccgattattcagaccttcttctcccatgagattttatgccagcgctacctgctggacggggtgattgcgctggtggatgcggtacatgccgatgagcagatgaaccagttcaccatcgcccagtcccaggttggctacgccgaccgtattctgctgacgaaaaccgacatcgcaggcgaagcagagaaactgcgtgaacgcctggcgcgcatcaacgcccgcgcaccggtctacaccgttacccacggcgatatcgacctgggccttctgttcaacaccaacggttttatgctggaagaaaacgtcgtcagcaccaaaccgcgtttccactttatcgcggacaaacaaaacgatatttcgtcgattgtggtggaactggattacccagtagatatcagcgaagtttcccgggtgatggaaaacctgctgctggaatcggcggataaactgctgcgttacaaagggatgctgtggattgacggcgaacctaaccgcctgctgttccagggcgtccagcgcctctacagcgccgactgggaccgcccgtggggcgatgaaaaaccgcatagcacgatggtgtttatcgggattcagttgccggaggatgagattcgggcggcgtttgcgggactcaaaaagtaa

SEQ ID NO: 459368 - DNA, 204 bp, Shigella boydii; identical to SEQ ID NO: 2032

SEQ ID NO: 459369 - DNA, 2151 bp, Shigella boydii
atggatacgaaaaaactattcaagcacataccctgggtgattctcggaatcatcggtgcattctgcctcgcggtagttgcattacgtcggggggagcacgtcagcgccctgtggatcgtggtcgcctctgtgtcggtgtatctggtggcgtatcgctactacagtctgtacatcgcccagaaggtgatgaaactcgaccccacgcgcgcgacgcctgcggttattaacaacgacggtctgaactacgttccgaccaaccgttacgtgttgtttggtcaccacttcgccgctatcgctggtgccggtccgctggttggtccggtgctcgccgcgcagatgggctacctgcctggcacgctgtggctgctggcgggggtagtactggccggtgcggttcaggactttatggtgctgtttatctcctctcgccgtaacggcgcatctctcggtgagatgatcaaagaagagatgggaccagtaccggggactatcgcgctgtttggctgtttcttaatcatgatcatcatcctcgccgttctggcgctgattgtggttaaagccctggccgaaagtccgtggggtgtcttcaccgtttgctcaaccgtaccgattgcgctgtttatgggtatctacatgcgctttatccgtccggggcgtgtaggtgaagtttctgttattggtatcgtgctgctggttgcctctatctatttcggtggcgtgattgctcacgatccgtactggggtccggcactgacctttaaagacaccaccattaccttcgcgctgattggctatgcgtttgtttccgcactgctgccggtgtggctgatcctcgcaccgcgcgactatctggcaaccttcctgaaaatcggcgttatcgtcggcctggcgctgggtatcgtggtactgaacccggaactgaaaatgcctgcaatgacccagtacattgacggtactggcccgctgtggaaaggcgctctgttcccgttcctgttcatcaccatcgcctgtggtgcggtatctggcttccacgcgctgatctcttccggtacgacgccgaaattgctggctaacgaaaccgacgcgcgtttcattggctacggcgcaatgctgatggaatccttcgtggcgattatggcgctggttgctgcgtccatcatcgaaccgggtctttacttcgcgatgaataccccgcctgctggccttggcatcaccatgcctaacctgcatgaaatgggtggcgagaacgcgccgatcatcatggcgcagctgaaagacgttaccgcacacgcggcggcgaccgtcagctcctggggcttcgtgatttcgccagagcagatcctgcaaaccgcgaaagacattggtgagccttctgtcctgaaccgtgcaggtggcgcgccgacgctggcggtaggtatcgctcacgtgttccacaaagtgctgccgatggctgacatgggcttctggtatcacttcggtattctgttcgaagccctgttcatcctgaccgcgctggatgcgggtactcgttctggccgctttatgctgcaagacctgctgggtaacttcatcccgttcctgaaaaaaaccgactctctggttgccggtatcatcggtactgcgggctgtgtgggtctgtggggctacctgctgtatcagggcgtggtcgatccgctgggcggcgttaagagcctgtggccgctgttcggtatttccaaccagatgctggcagccgtagcgctggtactgggcaccgttgtgctgattaagatgaagcgcacccaatacatctgggtaactgttgttccggctgtatggctgcttatctgcaccacctgggcgctgggtctgaaactgttcagcaccaacccgcagatggaaggcttcttctacatggcaagccagtacaaagagaagattgctaacggtactgacctgacggcgcagcagattgccaacatgaaccacatcgttgtgaacaactacaccaacgcaggcctgagtattctgttcctgattgtggtgtacagcatcatcttctacggtttcaaaacctggcttgcggtgcgtaacagcgacaaacgtactgacaaagaaactccgtacgttccaatcccggaaggcggcgtgaagatctcttcgcaccactaa

SEQ ID NO: 459370 - DNA, 513 bp, Shigella boydii
atgcaattagatgaacagcgcctgcgctttcgtgacgcgatggccagcctgtcggcagcggtaaatattatcaccaccgagggcgacgccggacaatgcgggattacggcaacggccgtctgctcggtcacggatacaccaccatcgctgatggtgtgcattaacgccaacagtgcgatgaacccggtttttcagggcaacggtaagttgtgcgtcaacgtcctcaaccatgagcaggaactgatggcacgccacttcgcgggcatgacaggcatggcgatggaagagcgttttagcctctcatgctggcaaaaaggtccgctggcgcagccggtgctgaaaggttcgctggccagtcttgaaggtgagatccgcgatgtgcaggcaattggcacacatctggtgtatctggtggagattaaaaacatcatcctcagtgcagaaggtcacggacttatctactttaaacgccgtttccatccagtgatgctggaaatggaagctgcgatttaa

SEQ ID NO: 459371 - DNA, 1563 bp, Shigella boydii
atgaaaccagaagatttccgcgccagtacccaacgtccgttcaccggggaagagtatctgaaaagcctgcaggatggtcgcgagatctatatctatggcgagcgagtgaaagacgtcactactcatccggcatttcgtaatgcggcagcgtctgttgcccaactgtacgacgcgctacacaaaccggagatgcaggactctctgtgctggaacaccgacaccggcagcggcggctatacccataaattcttccgcgtggcgaaaagtgccgacgacctgcgccagcaacgcgatgccatcgctgagtggtcacgcctgagctatggctggatgggccgtaccccagactacaaagctgctttcggttgcgcactgggcgcgaatccgggcttttacggtcagttcgagcagaacgcccgtaactggtacacccgtattcaggaaactggcctctactttaaccacgcgattgttaacccaccgatcgatcgtcatttgccgaccgataaagtaaaagacgtttacatcaagctggaaaaagagactgacgccgggattatcgtcagcggtgcgaaagtggttgccaccaactcggcgctgactcactacaacatgattggcttcggctcggcacaagtgatgggcgaaaacccggacttcgcactgatgttcgttgcgccaatggatgccgatggcgtaaaattaatctcccgcgcctcttatgagatggtcgcgggtgctaccggctcgccatacgactacccgctctccagccgcttcgatgagaacgatgcgattctggtgatggataacgtgctgatcccatgggaaaacgtactgatctaccgcgatttcgatcgctgccgtcgctggacaatggaaggcggttttgcccgtatgtatccgctgcaagcctgtgtgcgcctggcagtgaaattagacttcattacagcactgctgaaaaaatcactcgaatgtaccggcaccctggagttccgtggtgtacaggccgatctcggtgaagtggtggcgtggcgcaacaccttctgggcattgagtgactcgatgtgttctgaagcgacgccgtgggtcaacggggcttatttaccggatcatgccgcactgcaaacctatcgcgtactggcaccaatggcctacgcgaagatcaaaaacattatcgaacgcaacgttaccagtggcctgatctatctcccttccagtgcccgtgacctgaacaatccgcagatcgaccagtatctggcgaagtatgtgcgcggttcgaatggtatggatcacgtccagcacatcaagatcctcaaactgatgtgggacgccattggcagcgagtttggtggtcgccacgaactgtatgaaatcaactactccggtagccaggatgagattcgcctgcagtgtctgcgccaggcacaaagctccggcaatatggacaagatgatggcgatggttgatcgctgcctgtcggaatacgaccagaacggctggactgtgccgcacttgcacaacaacgacgatatcaacatgctggataagctgctgaaataa

SEQ ID NO: 459372 - DNA, 348 bp, Shigella boydii
gtggaacaactgcctggacgggaacacaccctgacgttactggcacaggcagtgttcaccctactgctgcgtaacgcaaaactcgacgaccatgccgccagcgggatgcgcggagaattaaaactgttccagcgttttaatatgctgattgaaagccattttcatcagcactggacagtaccggattacgctaacgaactgcatatcaccgaatcacgactcacggacatctgccgtcgctttgccaaccgtccgccaaaacggttgattttcgacaggcagctgcgagaagccaagcggctgctgctgttttctgataacgccgtgaacaatattgcctggcaataa

SEQ ID NO: 459373 - DNA, 315 bp, Shigella boydii
atgtgtgaccgtcagattgccaatattgatatcagcaaagagtacgatgaaagcctgggcacggacgatgtgcattatcagtcgttcgcccgcatggcggcattttttggccgccatatgctgccacatcgccacgaacagtactttcagatgcatttcctcaatagcggacagattgagctacagcttgacgatcatcgctactcggtggaagcgcccctgtttgtcctgacgccgccgtcagtacctcatgcgtttattacggagtctgacgccgacggtcatgtgttgacggtacgggaagatctgatctga

SEQ ID NO: 459374 - DNA, 1314 bp, Shigella boydii
atgagcgacacctcacctgccataccggagagtatcgatccggcgaatcagcataaagcgctgactgccggacaacaggcggttattaagaagctatttcgccgcctgatcgtctttctgttcgtgctgtttatcttctcgttccttgatcgcatcaacatcggctttgccggactcacgatgggacgcgacctcggtctgagcgccaccatgtttggcctcgctaccaccctgttctatgccgcttatgtcatcttcggcattcccagcaacattatgctgagtattgtcggtgcgcggcgctggatcgccaccatcatggtgctctggggcatcgcctctactgccaccatgtttgccactggccccaccagcttgtacgtactgcgtatactggttggcattaccgaagccggctttctgcctggtattctgctgtatttaaccttctggtttccggcctatttccgcgcccgtgccaacgccttgtttatggtagcaatgccggtaacgacagcgttgggctcgatcgtttccggctacattttgtcgctggattgcgtcatggcattaaaaggctggcagtggctgtttttgctggaaggcttcccgtcggtattactcggcgtcatggtgtggttctggcttgatgactcaccggacaaagctaagtggctgacgaaagaagacaaaaaatgcctgcaagagatgatggataacgatcgtctgacgctggttcagccagagggagccatcagccaccacgccatgcaacaacgcagtatgtggcgggagatcttcactccggtggtgatgatgtataccctggcgtatttctgcctgaccaacacacttagtgcgatcagcatctggacaccgcagatcctgcaaagttttaatcagggcagcagtaatatcaccatcggcctgctggccgccgtaccgcagatttgtaccattctcgggatggtctactggagccgtcactcagatcgccgccaggaacgaaggcatcacaccgcccttccttatttgttcgctgccgcaggttggttactggcttcggcaactgatcacaacatgatccagatgctggggatcattatggcttcgaccggatcattcagcgcaatggcgattttctggacaacaccggatcagtccatcagcctgcgggcacgagcgatcggtattgcggtgatcaacgccactggcaacattggttcagcgttaagtccgtttatgatcggctggttgaaagatttgaccggcagctttaacagtggattgtggtttgttgccgcctgctggtga

SEQ ID NO: 459375 - DNA, 789 bp, Shigella boydii
atggaaaacagctttaaagcggcgctgaaagcaggccgtccgcagatcggattatggctggggctgagtagcagctacagcgcagagttactggccggagcaggattcgactggttgttgatcgacggtgagcacgcgccgaataacgtgcaaaccgtgctcacccagctacaggcgattgcgccctaccccaaccagccggtagtacgtccgtcgtggaacgatccggtgcaaatcaaacaactgctggacgtcggcacacaaaccttgctggtgccgatggtacaaaacgctgacgaagcccgtgaagcggtacgcgccacccgttatccccccgccggtattcgcggtgtgggcagtgcgctggcccgcgcctcgcgctggaatcgtattcctgattacctgcaaaaagccaacgatcaaatgtgcgtgctggtgcagatcgaaacgcgtgaggcaatgaagaacttaccgcagattctggacgtggaaggcgtcgacggcgtgtttatcggcccggcggatctgagcgccgatatgggttatgccggtaatccgcagcacccggaagtacaggccgccattgagcaggcgatcgtgcagatccgtgaatcgggcaaagcgccggggatcctgatcgccaatgagcaactggcaaaacgctatctggaactgggcgcgctgtttgtcgccgtcggcgttgacaccaccctgctcgcccgcgccgctgaagcgctggcagcacggtttggtgcgcaggccaccgccgtgaagcccggcgtgtattaa

SEQ ID NO: 459376 - DNA, 804 bp, Shigella boydii
atgttcgataaacacacccacaccctgatcgcccagcgtctggatcaggcagaaaaacagcgcgaacagatccgcgcgatctcgctggattacccagagatcaccatcgaagacgcttacgcggtgcagcgcgaatgggttcgcctgaaaatcgccgaaggccgtacgctgaaaggccacaaaatcggtctgacctcaaaagcaatgcaggccagctcgcagatcagcgaaccagattacggtgccctgctggatgacatgttcttccacgatggcagcgatatcccgaccgatcgctttatcgtgccgcgcattgaagtggagctggctttcgtgctggcaaaaccgctgcgtgggccaaactgcacgctgttcgacgtctacaacgccacggactacgtgatcccggcgctggagctgatcgacgctcgctgccacaacatcgatccggaaacccagcgcccgcgcaaagtgttcgacaccatttctgataacgccgccaacgccggggtgatcctcggtggtcgtccgatcaaaccagacgaactggatctgcgttggatctccgccctgatgtatcgcaatggcgtgattgaagaaaccggcgtcgccgctggcgtgctgaatcatccggcaaacggcgtggcctggctggcgaacaaactcgcaccgtatgacgtacaactggaagccgggcaaatcattctcggtggttcgttcacccgcccggttccggcgcgtaagggcgacaccttccacgtcgattacggcaacatgggttccattagctgccgctttgtttaa

SEQ ID NO: 459377 - DNA, 381 bp, Shigella boydii; identical to SEQ ID NO: 26281

SEQ ID NO: 459378 - DNA, 852 bp, Shigella boydii
atgggtaagttagcgttagccgccaagatcacgcacgtaccgtcgatgtatctctctgaactgccagggaaaaaccacggttgccgccagggcgcgatcgacgggcataaagagatcagcaagcgttgccgggaaatgggcgtcgataccattatcgttttcgatacccactggctggtcaacagtgcttatcacatcaactgtgcagaccattttgaaggcgtctacaccagcaacgagctgccgcattttatccgcgatatgacctacaactacgagggcaacccggagttggggcagcttattgccgatgaagccttaaagctcggcgtgcgggcaaaagcgcacaacattcccagcctgaaactggaatacggcacgctggtgccgatgcgctacatgaatgaagacaagcacttcaaagtggtctccatttcggctttctgcacggttcacgattttgccgacagccgcaagctgggcgaagcgattctgaaagcgatcgaacagtacgacggcaccgtggcggtccttgccagcggttcgttatcgcaccgctttattgacgatcagcgtgcagaagaagggatgaacagctacacccgcgagttcgaccgccagatggacgagcgcgtggtgaagttgtggcgcgaaggccagttcaaagagttctgcaatatgctgccggagtacgccgactactgctacggcgaaggcaatatgcacgacacggtgatgctgctggggatgctcggctgggataaatacgacggcaaggtggagttcatcaccgagctattcccaagctctggcaccggtcaggttaacgctgttttcccgcttcccgcgtaa

SEQ ID NO: 459379 - DNA, 1467 bp, Shigella boydii
atgaaaaaagtaaatcattggatcaacggcaaaaatgttgcaggtaacgactacttccagaccaccaatccggcaacgggtgaagtgctggcggatgtggcctctggcggtgaagcggagatcaatcaggcggtagcggcagcgaaagaggcgttcccgaaatgggccaatctgccgatgaaagagcgtgcgcgcctgatgcgccgtctgggcgatctgatcgaccagaacgtgccagagatcgccgcgatggaaaccgcggacaccggcctgccgatccatcagaccaaaaatgtgttgatcccacgcgcttcccacaactttgaatttttcgcggaagtctgccagcagatgaacggcaagacctatccggttgacgacaagatgctcaactacacgctggtgcagccggtgggcgtttgtgcgctggtatcgccgtggaacgtaccgtttatgaccgccacatggaaggtcgcgccgtgtctggcgctgggcaataccgcggtactgaaaatgtcggaactctccccgctgaccgctgaccgcctgggtgagctggcgctggaagccggtattccggcaggcgtgctgaacgtggtacagggctacggcgcaaccgcaggggatgcgctggttcgtcatcatgacgtacgtgccgtgtcgttcaccggcggtacggccaccgggcgcaacatcatgaaaaacgccgggctgaaaaaatactccatggaactgggcggtaaatcgccggtgctgatttttgaagatgccgatattgaacgcgcgctggacgccgccctgttcaccatcttctcgatcaacggcgaacgctgcaccgccggttcacgcatctttattcagcaaagcatctacccggaattcgttaaacgctttgccgaacgcgccaaccgtctgcgcgtgggcgatccgaacgatccgaatacccaggttggcgcgcttatcagccagcagcactgggaaaaagtctccggctatatccgtctcggcattgaagaaggcgccaccctgctggcgggcggcccggataaaccgtctgacctgcctgcacacctgaaaggcggcaacttcctgcgcccaacggtgctggcagacgttgataaccgtatgcgagtcgcccaagaagagattttcgggccggtcgcctgcctgctgccgtttaaagacgaagctgaaggcttacgcctggcaaacgacgtggagtacggcctcgcgtcgtacatctggacacaggatgtcagcaaagtgttacgcctggcgcgtggcattgaagctggcatggtgttcgtcaacacccagaacgtgcgtgacctgcgccagccatttggcggcgtaaaagcctccggcaccgggcgtgaaggcggtgagtacagcttcgaagtgttcgcggaaatgaagaacgtctgcatttccatgggcgaccatccaattccgaaatggggagtctga

SEQ ID NO: 459380 - DNA, 1290 bp, Shigella boydii
atgaaaggcactatcttcgccgtagcgttgaaccatcgcagccaacttgatgcatggcaggaagcgttccagcaatccccctacaaagccccgcctaaaactgcggtctggtttattaaaccgcgcaatacggtgattggttgcggtgaaccgattccctttccacagggtgaaaaggtactgagcggtgcgactgttgcgctgattgtgggaaaaacggcgacgaaagtacgtgaagaagatgcggcagagtacatcgccggatatgcgcaggctaacgacgtcagcctgccggaagagagcttttaccgcccggcaatcaaagcaaaatgtcgtgatggattctgccccattggcgaaaccgtggctctcagcaatgtcgataatctgaccatctataccgagatcaacgggcgtcctgccgatcactggaataccgccgatttacaacgtaacgccgcgcagttgctgagcgccctgagcgaatttgccacgctgaatccaggcgacgccattctgctcggcacgccacaggcgcgcgtggaaatacagccaggcgagcgcgttcgtgttctcgcagaaggtttcccgccgctggaaaatccggtagtggacgaacgtgaagtgaccacgcgcaagagcttcccaacgcagccacacccgcacggcacgctgtttgccctcggcctgaactacgccgaccacgccagcgaactggaatttaagccaccggaagaaccgctggtgttcctgaaagcgccaaataccctcactggcgataaccagacctccgtgcgtccaaacaatattgaatacatgcactatgaagcggagctggtggtagttattggcaaacaggcgcgtaacgtcagcgaagccgatgccatggattatgtcgcgggctacaccgtgtgtaacgactacgccattcgtgactatctggaaaactactaccgccctaacctgcgggtaaaaagccgcgacggactgacgccgatgctttcaaccatcgtgccgaaagaggcgatcccggacccgcataatctgacccttcgcaccttcgtcaacggcgagttacgccagcaaggcaccaccgccgatctgatcttcagcgtgcccttcctgatcgcctacttaagtgaatttatgaccctgaatccgggcgacatgatcgccaccggcacacccaaaggcttatctgacgtggtgcctggcgatgaagtagtggtggaagtagaaggcgtgggccgcctggtgaaccgaattgtgagtgaggatacagcgaaatga

SEQ ID NO: 459381 - DNA, 447 bp, Shigella boydii
atgcacgactcactaaccattgcgttgctccaggcgcgagaagcggcgatgagttattttcgcccaatcgttaaacggcataatttgactgagcaacagtggcgcatcgtgcgtattctggcggaaagcccatcaatggattttcacgatctggcgtatcgcgcctgcattttgcgcccaagcctgaccgggattctcacgcggatggaacgcgacggtttagtgttgcgattaaagccgatcaatgatcagcggaagctctatatctcgctaaccaaagaggggcaggcgctgtataaccgcgctcagacacagattgaagaagcctatcggcagattgaagctcagtttactgccgagaaaatgcaacagttaacccatctgttagaggaatttattgctctgggcaattcccgacaagaagccatcccgggcgataatgaataa

SEQ ID NO: 459382 - DNA, 1656 bp, Shigella boydii
atgttaaaacgtatcaagatcgtgaccagcttactgctggttttggccgtttttggccttttacaactgacatcaggcggtctgttctttaatgccttaaagaatgacaaagaaaatttcactgttttacaaaccattcgccagcagcaatccacgctgaatggcagctgggtcgcgttgttgcagacgcgtaacaccctcaaccgcgcgggtatccgctacatgatggatcagaataatattggtagcggttcaaccgttgctgagctgatgcagagtgccagtatttcgctgaaacaggcggaaaaaaactgggcggattacgaagcgttgccgcgtgacccgcgtcagagcaccgccgcagcggcagagatcaaacgtaattacgatatttatcacaatgcgctggcggagctgatccaactgttaggtgcaggcaaaatcaacgagttctttgatcagccgacccagggatatcaggacggtttcgagaagcagtatgtggcttacatggagcaaaacgatcggctctatgatatcgccgtcagcgataacaatgcctcctacagccaggcgatgtggattctggtgggcgtgatgatcgtcgtactggcggtcatcttcgccgtctggttcggtattaaagcctcgctggtagcgccaatgaatcgcctgattgacagcattcgtcatattgcaggcggcgatctggtgaaaccgattgaggtggatggctctaatgagatggggcaactggcagagagtttgcgccatatgcagggagagctgatgcgtaccgtcggtgatgtgcgcaacggggccaatgccatctatagcggtgccagcgaaatcgccaccggcaataacgatctctcttcgcgcaccgagcaacaggccgcttcgctggaagagacggcagccagcatggagcaactgaccgcaacggtgaagcagaacgccgaaaatgcgcgccaggccagccatctggcgttaagtgcttctgaaacggcgcaacgcggcggcaaagtggtagataacgtggtgcagactatgcgcgatatctccaccagttcgcagaaaatcgccgatattatcagcgtaattgacggcattgccttccagaccaatattctggctttgaacgcggcggttgaggctgcgcgtgcgggtgagcaagggcgcggttttgcggtggtcgcgggagaagtgcgtaatctggcccagcgcagcgcccaggcggctcgtgaaattaaaagcctgattgaagactcggtggggaaagtggatgttggctctacgctggtcgaaagcgccggggaaacaatggcggagattgtcagcgccgtgacccgcgtgacggacattatgggcgaaattgcttctgcttctgatgagcagagccgtggtatcgatcaggttggcttagcggttgctgagatggaccgggtaactcaacagaacgccgcgctggtggaagagtctgccgctgccgccgccgcgctggaagagcaggccagtcgcctgaccgaagcagtggcagtgttccggattcagcaacagcagcgtgaaacatcggctgtggtaaaaaccgtgacgccagctgcgccgcgtaaaatggccgtggcagatagcgaggagaactgggaaacattttaa

SEQ ID NO: 459383 - DNA, 861 bp, Shigella boydii
atgggcttcttcaacgcagcttctaccattggcgttgccgtaagcccaccgattctggcggcgatgatgctggtgatgggctggcgcgggatgtttattaccattggtgtactggggatttttctcgccatcggctggtatatgctctatcgcaaccgcgagcacgtagaactgactgccgttgagcaagcttatctcaatgcaggtagcgtcaatgcccgccgagatccgctcagttttgccgaatggcgcagcctgttccgtaaccgtacaatgtggggaatgatgctcggattcagtggcatcaactacactgcgtggctgtatctggcctggcttcctggttacctgcaaacagcctataacctggatttaaaaagcacagggttgatggcggctatccctttcctgtttggggctgccgggatgctggtcaacggttacgttaccgactggctggtcaaagggggaatggctccgattaaaagccgtaagatctgcattattgccgggatgttctgttctgccgcctttacgctgatagtaccacaagcgacaacatccatgacggcggttctgctgattggcatggcactgttctgtattcactttgccggaacatcctgctggggcttgatccacgtcgcagttgcttctcgcatgactgcgtcggtgggcagtatccagaactttgccagcttcatctgcgcctcttttgcgccgatcattactggttttattgttgataccacccactcattccgtctggcactaatcatctgcggttgcgtcaccgcagcgggggcactggcgtacatcttcctggttcgtcagccgatcaacgacccacgtaaagattaa

SEQ ID NO: 459384 - DNA, 1770 bp, Shigella boydii
atgtctggaaatataggggcaaatccagccacttcaggccgtattattgacaacaaagtattccagagcggcgtatttaacgtaacactgaacaatagttcagaatggaataccgttaatagttcagtaattgatacattagctgtaaataatggctctcaggtaaatgttactgattcctctctggtatcagataccattagtttaaccaacggttcttcactgaatattggtgcaaatggcgtggttgctacagaccacctgactgttgatagctacagtaccgttaatttaaccgaatctaccggttggaataattattctaatctgtataccaatactatcactgtgactaacggtggtgtgctggatgtgaatgttgatcagttcgatactgaagctttccgtactgataaactggaactgaccagcggcaacattgctgaccataatggcaacgtaatttctggtgtgttcgacatcaacagcagcgattacgttctgaacgctgatctggtgaacgaccgtacgtgggatacttccaagtctaactacggttacggtattgttgctatgaactctgatggtcacctgactatcaatggtaacggcgacgtagacaacggtactgaactggataacagctctgttgataacgttgttgctgcaaccggtaactacaaagttcgtatcgacaacgcaactggcgctggcactatcgctgattacaaagataaagaacttattcgggtaaacgacgctaacaccaacgcgaccttctctgctgctaacaaagctgacctgggtgcatacacctatcaggctgaacagcgcggtaacaccgttgttctgcaacagatggagctgaccgactacgctaacatggcgctgagcatcccgtctgcgaacaccaatatctggaacctggaacaagacaccgttggtactcgtctgaccaactctcgtcatggcctggctgataacggcggcgcatgggtaagctacttcggtggtaacttcaacggcgacaacggcaccatcaactatgatcaggatgttaacggcatcatggtcggtgttgataccaaaattgacggtaacaacgctaagtggatcgtcggtgcggctgcaggcttcgctaaaggtgacatgaatgaccgttctggtcaggtggatcaagacagccagactgcctacatctactcttctgctcacttcgcgaacaacgtctttgttgatggtagcttgagctactctcacttcaacaacgacctgtctgcaaccatgagcaacggtacttacgttgacggtagcaccaactctgacgcgtggggcttcggtttgaaagccggttacgacttcaaactgggtgatgctggttacgtgactccttacggcagcgtttctggtctgttccagtctggtgatgactaccagctgagcaacgacatgaaagttgacggtcagtcttacgacagcatgcgttatgaactgggtgtagatgcaggttataccttcacctacagcgaagatcaggctctgactccgtacttcaaactggcttacgtctacgacgactcaaacaacgataacgatgtgaacggtgattccatcgataacggtactgaagggtctgcggtacgtgttggtctgggtactcagttcagcttcaccaagaacttcagcgcctataccgatgctaactacctcggtggtggtgacgtagatcaagactggtccgcgaacgtgggtgttaaatatacttggtaa

SEQ ID NO: 459385 - DNA, 624 bp, Shigella boydii
atgttatctgtagttaaacctcttcaggaatttggtaagctcgataaatgtttgtccagatacggtacgcgcttcgagtttaataatgaaaagcaagttatattttccagtgatgtcaatagcgaagatactttcgttattttagagggcgttatctctctgcgtagagaagaaaacgtacttatcggtattacccaggcttcttatattatggggctggctgatggtttaatgaaaaacgatataccatacaaattaatatcagaaggaaattgtacgggatatcatctaccagccaaacaaaccattacgcttattgaacaaaatcaactctggcgagacgctttttactggttagcttggcaaaatagaattctggaattacgcgacgtgcagctcattgggcataattcctacgaacaaatccgcgcaacattattatcaatgattgactggaatgaagaattgcgatcacgtattggtgtgatgaattatatccatcaacgtacacgcatatcgcgttctgtcgtcgcagaagttctcgctgctttgcgtaaaggcggctatatcgaaatgaataaaggcaaactggtcgctatcaaccgtttgccttcagagtattaa

SEQ ID NO: 459386 - DNA, 1158 bp, Shigella boydii
ttgaaacgtagtctacttttttctgccgtgctgtgtgcggcgtcattgacctccgtccatgcggcgcagccgatcactgaaccggagtttgcctctgatattgtcgatcgttatgccgatcatattttttacggcagcggtgccacggggatggcgctggttgttatcgacggtaaccagcgcgtctttcgcagttatggcgaaacgcgacctggtaataacgttcgcccgcagctggattcggtcgtgcgtattgcttccctcaccaagctaatgaccagtgaaatgctggtgaaattgctcgaccaggggaccgtgaagttaaacgatccgctaagtaaatatgctccgccaggcgcacgcgtgccaacctacaatgggacgcccattaccctagtgaatctggcaacccataccagcgccctgccccgtgaacagcccggtggcgcggcacatcgtccggtgtttgtctggccaacgcgcgagcaacgctggaaatacctttctacggcgaagctgaaagccgcgccaggcagtcaggcggcgtactctaaccttgcgttcgacctgctggcagatgcactggcgaatgcgtccggcaagccttatacccagttgtttgaagagcagattacccgtccattggggatgaaagacaccacctacaccccctcaccggatcagtgccgccgtttaatggttgctgagcgcggtgccagtccgtgcaataacacgctggcggcaattggcagcggcggcgtctattccacgcctggcgatatgatgcgctggatgcagcagtatttatcatctgatttttatcagcgcagtaaccaggcagatcgcatgcagacgttgatttatcagcgcgcgcagtttaccaaagtgattggcatggatgtccccggcaaagcggatgcgcttggtttaggctgggtatatatggccccgaaagagggtcgtccggggattattcagaagacaggcggtggtggcggtttcattacctatatggcgatgatcccgcagaagaatattggcgcgtttgtggtggtcactcgttcgccgttgacgcgctttaaaaatatgagcgatggcatcaatgatctggtgaccgagctaagcgggaataaaccgttggttatccctgcatcctga

SEQ ID NO: 459387 - DNA, 1221 bp, Shigella boydii
atgtttaagtcttttttcccaaagccgggagcgttttttctctcggcctttgtttgggcattgattgccgttatcttctggcaagccggtgggggagactgggtggcgcgtatcaccggcgcttccgggcagatcccgattagcgccgcgcgtttctggtcgttggatttcctgattttttacgcttactacattgtttgcgtaggacttttcgcatttttctggtttatctacagcccgcaccgttggcaatactggtcaatactcggtactgcactgatcatcttcgtcacctggtttttggtggaagtcggggtcgccgtcaacgcctggtatgcaccgttctatgatctgattcaaaccgcgctaagttcgccgcataaagtcactatcgaacaattttaccgcgaagtgggcgtctttctggggattgcgctgatcgcggtggtgatcagtgtactgaacaacttctttgtcagtcactatgtgttccgctggcgtacggcgatgaacgaatattacatggcgaactggcaacaactgcgtcatatcgaaggtgccgcacagcgtgtgcaggaagacaccatgcgttttgcttcaacgctggagaatatgggcgtcagttttatcaacgccatcatgacgttggtcgccttcctgccggtgctggtaacgctctccgcgcatgtgccggagctgccgattatcgggcacattccgtatggtctggtgattgccgctatcgtctggtcgctgatggggaccggattgctggcagtggtagggatcaaactgccggggctggagtttaaaaaccagcgagtagaggccgcctaccgtaaagagctggtttatggtgaagacgatgccacgcgcgcgacgccgcctacggtacgcgagctgtttagcgccgtacggaaaaactattttcgcctctattttcactatatgtatttcaacatcgcccgcattctctatttgcaggtcgataacgttttcggtttgttcttgctgtttccgtcaattgttgccggtacgattacgctcggcttgatgacgcagattaccaacgtttttggtcaggttcgcggtgctttccagtacctgattaactcatggaccacactggttgagttgatgtctatctacaaacgtctgcgcagctttgaacatgagctggatggtgacaaaattcaggaagtaacccataccttgagctaa

SEQ ID NO: 459388 - DNA, 1095 bp, Shigella boydii
atgtcgcgcgtcaatcatctatcttcgctgtcattgttggcggttctggttttagcggggtgtagtagtcaggctccgcaaccgttgaaaaagggcgaaaaagcgatagatgtagcgagcgtcgtgcggcagaagatgcctgcgagcgtgaaagaccgcgatgcctgggcgaaatatctcgccaccacctttgaaagtcaggggctggcaccgacgctggaaaacgtctgctcggtgctggcggtggcgcagcaggagtcaaattatcaggcagatccggccgttccgggcttaagcaagatcgcctggcaagagattgaccgtcgtgctgaacggatgcacattcctgcttttctggttcataccgcgctaaaaatcaaatcgccaaacggcaaaagttatagcgaacggttagattcggtgcgtacagaaaagcaattgagcgcgatttttgacgatctgatcagcatggtaccaatggggcagacgctgtttgtttcgcttaatccggtgcgcaccggtgggccgatgcaggtcagcattgcttttgccgaacagcataccaaagggtatccgtggaaaatggacggtacagttcgtcaggaagtcttcagtcgccgcggcgggttgtggtttggtacttaccatttactgaattatcccgccagctatagcgcaccgatataccgctttgctgattttaacgctggctggtacgccagccgtaatgccgcgtttcagaacgcggtcagtaaggccagcggcgtgaagctggcactggacggtgatttaattcgttacgacagtaaagaacccgggaaaaccgaactggcaacgcgcaaactggcgggaaaactggggatgagcgacagcgaaattcgccgtcagttagagaaaggtgacagcttctcttttgaggagacggcgctgtacaagaaagtttatcaacttgccgaagcgaaaacgggtaaatcactaccccgcgaaatgttgcctggcattcaactggaaagcccgaaaatcacccgcaacctgactacggcctggtttgcgaagcgcgtagacgaacggcgggcgcgttgtatgaaacagtga

SEQ ID NO: 459389 - DNA, 309 bp, Shigella boydii; identical to SEQ ID NO: 40979

SEQ ID NO: 459390 - DNA, 213 bp, Shigella boydii; identical to SEQ ID NO: 82

SEQ ID NO: 459391 - DNA, 1095 bp, Shigella boydii
atggaaaaactgcgggtaggaatcgtttttggtggtaaatcagcggaacatgaagtgtctctgcaatcggcaaaaaacattgtcgatgccattgataaaagtcgcttcgacgttgtgctgctgggcattgataaacaagggcaatggcacgtcagcgatgccagcaattatctgctaaatgcagacgatcctgcccatattgcgttgcgcccttcggcgactagccttgcgcaggtgccaagtaaacatgagcatcagcttatcgacgcgcaaaacggtcagccgttaccgacggtggatgtcattttcccgattgtccacggtacgctgggcgaagatggttccttgcagggaatgctgcgggtcgccaatttaccgtttgtaggttctgatgttctggcttcagcagcctgtatggataaagatgttaccaaacgtctgctgcgcgatgccgggctgaacattgcaccatttattaccctgacgcgcgccaatcgtcacaacattagttttgccgaagtggagtctaaactggggttaccactgtttgtaaaaccggctaatcagggctcttctgttggtgtcagcaaagtaaccagtgaagaacagtacgcaattgccgtcgatctggcgttcgaattcgatcataaagtgatcgttgagcaagggatcaaaggtcgtgagatcgaatgcgcagttctgggcaacgacaacccgcaagccagcacctgtggcgagatcgtactcaccagcgacttctatgcctacgacaccaagtacattgacgaagatggcgcgaaagtggtagttccggcagccattgcgccagaaatcaacgataagatccgggcgattgccgttcaggcttatcaaacgttgggatgcgcaggcatggcgcgtgtagacgtgtttttaaccccagagaacgaagtggtgatcaacgagatcaacacactgcctggcttcaccaacatcagtatgtatccgaagctgtggcaagccagcggtctgggttacaccgatctgatcacacgtttgattgagctggcgctggagcgtcacgctgcggataacgcattgaaaaccacaatgtaa

SEQ ID NO: 459392 - DNA, 261 bp, Shigella boydii
atgaaaaatctcattgctgagttgttattaaagcttgcccaaaaagaagaagagtcgaaagaactgtgcgcgcaggtagaagctttggagattatcgtcactgcaatgcttcgcaatatggcacaaaatgaccaacagcgcttgattgaacaggtggatggggctctttacgaggtaaagcctgatgccagcattcctgacgacgatacggagctgctgcgcaattatgtaaagaagttattgaagcatcctcgtcagtaa

SEQ ID NO: 459393 - DNA, 1416 bp, Shigella boydii
gtgaaacaaagcactattgcactggcactcttaccgttactgtttacccctgtgacaaaagcccggacaccagaaatgcctgttctggaaaaccgggctgctcagggcgatattactgcacccggcggtgctcgccgtttaacgggtgatcagactgccgctctgcgtgattctcttagcgataaacctgcaaaaaatattattttgctgattggcgatgggatgggggattcggaaattacagccgcacgtaattatgccgaaggtgcgggcggcttttttaaaggtatcgatgccttaccgcttaccgggcaatacactcactatgcgctgaataaaaaaaccggcaaaccggactacgtcaccgattcggctgcatcagcaaccgcctggtcaaccggtgtcaaaacctataacggcgcgctgggcgtcgatattcacgaaaaagatcacccaacgattctggaaatggcaaaagccgcaggtctggcgaccggtaacgtttctaccgcagagttgcaggatgccacgcccgctgcgctggtggcacatgtgacttcgcgcaaatactacggtccgagcgcgaccagtgaaaaatgtccgggtaacgctctggaaaaaggcggaaaaggatcgattaccgaacagctgcttaatgctcgtgccgacgttacgcttggcggtggcgcaaaaacctttgctgaaacggcaaccgccggtgaatggcagggaaaaacgctgcgtgaacaggcacaggcgcgtggttatcagttggtcagcgatgccgcctcgctaaatgcggtgacggaagcgaatcagcaaaaacctctgcttggactgtttgctgacggcaatatgccagtgcgctggctaggaccgaaagcaacgtaccacggcaatatcgataagcccgcagtcacctgtacgcctaatccgcaacgtaatgacagtgtaccaaccctggcgcagatgaccgacaaagccattgaattgttgagtaaaaatgagaaaggatttttcctgcaagttgaaggtgcgtcaatcgataaacaggatcacgctgcgaatccttgtgggcaaagtggcgagacggtcgatctcgatgaagccgtacaacgggcgctggaattcgctaaaaaggatggcaacacgctggtcatagtcaccgctgatcacgcccacgccagccagattgtcgcgccggataccaaagctccgggcctcacccaggcgctaaataccaaagatggcgcagtgatggtgatgagctacgggaactccgaagaggattcacaagaacataccggcagtcagttgcgtattgcggcgtatggcccgcatgccgccaatgtcgttggactgaccgaccagaccgatctcttctacaccatgaaagccgccctggggctgaaataa

SEQ ID NO: 459394 - DNA, 321 bp, Shigella boydii
atgaaaattacattactggttaccttgcttttcggtctggtttttttaaccacagtcggcgctgccgagagaacgttaaccccacaacaacagcgtatgacctcctgtaatcagcaggcgacggcgcaggcgttgaaaggggatgctcgtaagacctacatgagtgattgcctgaagaacagcaagtctgcgcctggtgaaaaaagtttgacgccacagcagcaaaagatgcgcgaatgtaataatcaagcaacgcaacaatctctgaaaggtgatgatcgtaataagtttatgagtgcctgcctcaagaaagccgcctga

SEQ ID NO: 459395 - DNA, 1101 bp, Shigella boydii
atgttcccaaaaataatgaatgatgaaaactttttcaaaaaagcggcggcgcatggggaggaacctcctttaactcctcaaaacgaacatcagcggtccgggctgcgcttcgcccgtcgcgtcagactaccccgtgcggttggcctggctggcatgttcttaccgattgcttcaacgctggtttcgcacccgccgccgggctggtggtggctggtgttggtctggccgcatttagcctggcagatagcgagcagggccgtcgatccgcttagccgggaaatttacaacttaaaaaccgatgcagtattagcgggaatgtgggtaggcgtaatgggcgtaaacgtgctgccttccaccgctatgttgatgattatgtgtctgaatttgatgggggcaggcggcccccgtctgtttgtcgcgggtctggtgttgatggtggtttcctgccttgtcaccctcgagcttacgggcattaccgtgtcgttcaatagtgcgccgctggaatggtggctctcccttcccattattgtcgtttatcctctgctgtttggctgggtcagctaccagacggcaaccaaactggcggaacataaacgcaggttgcaggtcatgagtacccgcgacggcatgacgggcgtgtataaccgacgtcattgggaaactatgttacgcaatgaatttgataactgtcggcggcataatcgcgatgcaacgttactgattatcgatatcgaccatttcaagagcatcaacgatacctggggtcatgatgtgggcgatgaagcgattgtggcgcttacccgacagttacaaattaccctgcgcggtagcgatgtgattggtcggtttggcggcgatgagtttgcagtaatcatgtccggtacgccagctgagagcgccattaccgccatgttacgggtgcgtgaagggctaaacacgttacgcttgccgaatacgccacaggtaactttacggattagtgtgggggttgcgccgctgaacccacaaatgagtcactatcgtgagtggttgaaatcggcagatttggcgctttacaaagcaaagaaagccggacgtaaccgcaccgaagtggcggcctga

SEQ ID NO: 459396 - DNA, 810 bp, Shigella boydii
atggaaaagaaaatcggttttattggctgcggcaatatgggaaaagccattctcggcggtctgattgccagcggtcaggtgcttccagggcaaatctgggtatacaccccctccccgaataaagtcgccgccctgcatgaccagttcggcatcaacgccgcagaatcggcgcaagaagtggcgcaaatcgccgacatcatttttgctgccgttaaacctggcatcatgattaaagtgcttagcgaaatcacctccagcctgaataaagactctctggtcgtttctattgctgcaagtgtcacgctcgaccagcttgcccgcgcgctgggccatgaccggaaaattatccgcgccatgccgaacactcccgcgctggttaatgccgggatgacctccgtaacgccaaacgcgctggtaaccccagaagataccgctgatgtgctgaatattttccgctgctttggcgaagcggaagtaattgctgagccgatgatccacccggtagtcggtgtgagcggttcttcgccagcctacgtatttatgtttatcgaagcgatggccgacgccgccgtgctgggcgggatgccacgcgcccaggcgtataaatttgccgctcaggcggtaatgggttccgcaaaaatggtgctggaaacgggagaacatccgggggcactgaaagatatggtctgctcaccgggaggcaccaccattgaagcggtacgcgtactggaagagaaaggcttccgtgccgcagtgatcgaagcgatgacgaagtgtatggaaaaatcagaaaaactcagcaaatcctga

SEQ ID NO: 459397 - DNA, 459 bp, Shigella boydii
atgacaatttgggtggatgccgacgcgtgtcccaatgtaattaaagagattttgtatcgcgcggcggaacgtatgcagatgccgctggtactggtagcaaaccagagtttacgcgtgccgccatcgcgatttattcgtacgctgcacgtcgcggcaggtttcgacgttgccgataacgaaattgtccggcagtgtgaagcgggcgatttggtgatcaccgcagatatacctttggctgctgaagccatcgagaaaggcgcagcggcgcttaatccgcgcggcgaacgttacacgccagcgaccattcgtgagcgcctgacgatgcgcgattttatggataccttacgtgccagtgggatccagaccggcggaccagatagcctttcacaacgtgaccgccaggcctttgccgcggagctggagaagtggtggctggaagtgcaacgtagtcgtggctaa

SEQ ID NO: 459398 - DNA, 525 bp, Shigella boydii
atgacacaacctctttttctgatcgggcctcggggctgtggtaaaacaacggtcggaatggcccttgccgattcgcttaaccgtcggtttgtcgataccgatcagtggttgcaatcacagctcaatatgacggtcgcggagatcgtcgaaagggaagagtgggcgggatttcgcgccagagaaacggcggcgctggaagcggtaactgcggcatccaccgttatcgctacaggcggcggcattattctgacggaatttaatcgtcacttcatgcaaaataacgggatcgtggtttatttgtgtgcgccagtatcagtcctggttaaccgactgcaagctgcaccggaagaagatttacggccaaccttaacgggaaaaccgctgagcgaagaagttcaggaagtgctggaagaacgcgatgcgctatatcgcgaagttgcgcatattatcatcgacgcaacaaacgaacccagccaggtgatttctgaaattcgtagcgccctggcacagacgatcaattgttga

SEQ ID NO: 459399 - DNA, 192 bp, Shigella boydii; identical to SEQ ID NO: 91

SEQ ID NO: 459400 - DNA, 678 bp, Shigella boydii
atgagtgcgtcgttggcgatcctgaccatcggcattgtacctatgcaggaggttttgccgcttctgacggaatacattgacgaagataatatttcccatcatagcctgctggggaagttaagtcgtgaagaagtgatggcggagtacgcgccagaagcaggcgaagacaccattctcacattattaaatgacaaccagctggcccatgtttcgcgtcgtaaagtggagcgagacctgcaaggtgtggttgaagtgctcgataatcagggttatgacgtcattttattaatgagtacagcaaacattagtagtatgactgcgcgtaatacgatctttcttgagccgtcgcgaatattgcctccactggtttcctctattgttgaagatcatcaggtgggggttatcgttccggttgaggagatgctgcccgttcaggcgcaaaaatggcaaattttgcagaaatcgccggtattttcattgggtaaccccattcatgattcagaacaaaaaatcattgatgccgggaaagaattactggcaaaaggggctgatgtcatcatgctggattgtttaggatttcaccaacgtcatcgcgatttactgcaaaaacagctcgatgttcctgtcttgctgtctaacgtattgattgcacggctggctgcggaattactggtgtaa

SEQ ID NO: 459401 - DNA, 285 bp, Shigella boydii
atgcttcaaagtaatgagtacttttccggcaaagtgaaatcaatcggcttttccagcagcagcactggtcgcgccagcgtgggtgttatggttgaaggcgaatacaccttcagcaccgctgagccggaagagatgacggtaatcagtggcgcgctgaatgtgttactgcctgatgcgaccgactggcaggtgtatgaagccggttcggtgtttaatgttcccggtcacagtgagtttcatctgcaagttgccgaacccacctcttatctgtgccgctatctgtaa

SEQ ID NO: 459402 - DNA, 978 bp, Shigella boydii
atgcaaggccgccgacaattcgttatcatgcccgctaaatttaacaacaaggccgtggaaattatcatgctgtggttcaaaaatttaatggtttaccgtcttagccgcgagatttcgctgcgtgcagaagagatggaaaaacagctagcctcgatggcatttaccccatgcggcagccaggacatggcgaagatgggctgggttcctccgatgggatcgcacagcgatgcgttaacgcacgttgccaatggtcaaattgttatctgcgcgcgcaaagaagaaaaaatcctcccgtctccggtgattaagcaggcgctggaagcgaaaatcgccaaactggaagcggaacaggcgcgtaagctgaagaaaaccgaaaaagattcgctgaaagacgaagtgctgcactctctgttgccgcgtgctttcagccgttttagccagacaatgatgtggatcgacacggttaacggtttgattatggtggactgcgccagtgccaaaaaagcggaagatacgctggcactgctgcgtaaaagcctggggtcgttacctgtggtaccattgagcatggaaaacccgattgaactgacgctgaccgaatgggttcgctccggtagcgcggcacagggcttccagctgcttgatgaagccgagctgaaatcgttgctggaagatggcggcgtgatccgcgcgaagaaacaagatctgaccagcgaagagatcaccaatcacatcgaagccggaaaagtggtgactaaactggcgctcgactggcagcagcgcattcagtttgtgatgtgcgacgatggttcgctcaagcgtctgaagttttgcgacgagctgcgcgatcaaaacgaagatatcgaccgtgaagatttcgcccagcgttttgatgccgatttcatcctgatgactggtgaactggcagcgttaattcaaaacctgattgaaggattaggtggcgaagcacaacgttaa

SEQ ID NO: 459403 - DNA, 786 bp, Shigella boydii
gtgcgtataggtatcgatttaggcggcaccaaaactgaagtgattgcactgggcgatgcaggggagcagttgtaccgccatcgtctgcccacgccgcgtgatgattaccggcagactattgaaacgatcgccacgttggttgatatggcggagcaggcgacggggcagcgcggaacggtaggtatgggcattcctggctcaatttcgccttacaccggtgtggtgaagaatgccaattcaacctggctcaacggtcagccattcgataaagacttaagcgcgaggttgcagcgggaagtgcggctggcaaatgacgctaactgtctggcggtttcagaagcagtagatggcgcggcagcgggagcgcagacggtatttgccgtgattatcggcacgggatgcggcgcgggcgtggcattcaatgggcgggcgcatatcagcggcaatggcacggcaggtgagtggggacacaatccgctaccgtggatggacgaagacgaactgcgttatcgcgaggaagtcccttgttattgcggtaaacaaggttgtattgaaacctttatttcgggcacgggattcgcgatggattatcgtcgtttgagcggacatgcgctgaaaggcagtgaaattatccgcctggttgaagaaagcgatccggtagcggaactggcattgcgtcgctacgagctgcggctggcaaaatcgctggcacatgtcgtgaatattctcgatccggatgtgattgtcctgggaggtgcccctattaagttgtcaagcatgttatga

SEQ ID NO: 459404 - DNA, 3039 bp, Shigella boydii
atggaggcattacaggtagacgaatggtactcccgcgtacgccgtgccgcaccgtggaaagatctgccaagacgtgtttttgacgccacgctggatatgctttccgggcgctatccctctggcgatttttctgcttttcgccccaaactggtctggaacagggagaccgggatattgaccgcccgacctggcgctcaattgttggcggttaccagcggcggcaccattccggatcgtggcatgtatagcgtgttattacccgaaggtgaagaaaaggccggttcgcggcgggtgggtgaactggatgaggagatggtatatgagtcgcgggtgaacgacattatcactctcgacgctacctcatggcggatccagcaaatcacccgcgatcaggtgattgtgactcctgctccgggtcgttctgcccggctccccttctggcgtggtgaaggtaacggacgtccggctgaattaggcgagatgatcggcgattttcttcatttactggcggatggcgcgttcttttccgggactattcccccgtggctggcagaagaaaatacgaacgccaatattcaggggttgattgacgagcaacgcaacgcgacgggcatcgttccggggagtcgccatctggtcctcgaacggtgccgtgatgaaattggcgactggcgtattattttgcactctccctatggaagacgggtgcatgaaccctgggcgctggcgattgccgggcgaatacatgccctatggggcgctgacgcgtctgtggtcgccagtgatgacggcattgttgcgcgcattcctgacactgatggtaaattgcccgacgccgcgatttttttgtttgaaccagaaaagttgctgcaaattgtccgcgaggcggtaggcagctcggcacttttcgccgcccgttttcgcgaatgcgccgcgcgggcattattaatgccggggcgcactccgggccatcgcaccccgctttggcaacaacggctgcgcgccagtcagttgctggaaatcgctcagggatatccagattttccggtcattctcgaaatcctacgcgaatgtctgcaagatgtttatgatcttcccgcactggaacgtttgatgcgtcgcctgaacggtggcgaaattcaaatatccgatgtaacgaccactacgccctcgcctttcgccacaagtttattgttcggctatgtcgcggaatttatgtaccagagcgacgccccgctggcagagcgccgggcatccgtactgtcgctggacagcgagttactgcgcaatctactcggacaggtcgatccgggggaattactcgacccgcaggtcattcgccaggtggaagaagagttgcaacgactggctcctggcagaagagcgaaaggtgaagaaggattgttcgacctgctgcgcgaactggggccaatgaccgttgaagacctggcgcaacggcatacaggcagcagtgaagaggttgcgtcgtatctggaaaatcttcttgcagtaaaacgaatcttcccagcgatgattagcggacaggagcgtcttgcctgtatggatgatgccgccaggctgcgtgatgccctcggcgtacgactaccagagtcattgccagagatttatttacatagagtcagttacccgcttcgcgacctctttctgcgctatctccgggctcatgctctggtcacggctgaacaactggctcatgagtttagtctcggtattgccattgtcgaagagcagcttcagcaactgcgtgaacagggtctggtgatgaatctgcaacaagacatctgggtgagcgatgaagtatttcgtcgtctgcgtttgcgctcgctgcaagccgccagagaagcgacgcgtcccgttgcagccacgacctatgcgcgattgctgctggaacgtcagggcgtattacccgccaccgatggtagcccggcgctctttgcctcaacatcgccaggcgtttatgagggcgtagatggcgtgatgcgggtgatcgaacagcttgccggagtcggtttacccgcctcactctgggaaagccagatcctgcctgcccgcgtacgcgactattcgtcagaaatgctcgatgaattactggcaaccggtgcggttatctggtcggggcaaaaaaaactgggtgaagatgacggcctggtggcactgcatctacaggaatatgctgcagaatcgttcactcccgccgaagcggatcaggcgaatcgttcggcgctgcaacaagcgatagtcgctgttctggctgacggaggagcctggtttgcacaacaaatcagccaacggatacgcgacaaaatcggcgaatcggttgatctctctgccctgcaagaggcgttatgggcgctggtctggcaaggcgtcatcaccagcgacatttgggcaccgttacgcgccctcacccgcagcagttccaacgcacgcacctcaactcgccgcagtcaccgggctcgtcgtggacgtcctgtctatgcgcaacccgtctcgccgctggtatcttacaacacaccaaatctggctggacgctggtcgttattgcaggtggagccactaaacgataccgaaaggatgctggcgctggcggaaaatatgctcgaccgctacggcatcatcagtcgtcaggcggtgatagccgaaaatatccctggcgggtttccatcgatgcaaacgctttgtcgaagtatggaagactccgggcgaattatgcgaggtcgttttgtagaaggtctgggtggcgcgcaattcgctgaacgtctgactattgaccgatggcgcgatctggcgacacaagccacgcaaacgcgccactatacaccagtggcgctctctgccaacgatccggctaatgtgtggggaaatcttctgccctggcctgcacatccggcaacgctggttccaacgcgtcgggcgggtgcgctggtggtcgtttctagcggcaaattgttactctatctggcgcaaggtggcaaaaaaatgctggtctggcaggaaaaagaggtaagcgtaaactga

SEQ ID NO: 459405 - DNA, 1278 bp, Shigella boydii
atggcagataatccagacccttcatcgctcctgccggacgtgttttcaccggcgacccgcgactggtttcttcgcgcctttaaacagccgaccgctgtccagtcgcaaacctggcatgtggcggcgcgaagcgaacatgcgctggtgattgcaccgaccggctccgggaaaacgctggcagcatttctctacgccctcgatcggctcttccgcgaaggcggcgaagatacccgcgaggcgcataagcgtaaaacctcacgcatcctctatatttcaccgataaaagctctgggcaccgacgttcagcgcaacttgcagctcccgttgaagggtattgccgatgaacggcggcggcgcggcgaaacggtaattattgatgaagtccacgcggtagcgggcagtaaacgtggtgcgcatctggcgttaaatctggagcggctcgatgcgctgctccacacctcagcacagcgaattggcctttctgccactgtgcgctcagccagcgatgtggcagcctttcttggtggcgatcgcccggttacggtagtcaacccgcccgcaatgcgccatccgcagatacgaattgtcgtaccggtcgccaatatggatgatgtctcatcggtcgccagcagcaccggcgaagacagccatgccggccgggaaggctccatctggccatatattgaaacgggtatccttgatgaagtgttgcgccatcgctcgaccattgtctttactaattcacgtgggctggcggaaaaactgacggcacgattaaatgagctttacgccgcacgcttacagcgttccccgtctatcgccgttgatgcggcccatttcgagtcgacctccggcgcaacctctaaccgtgtacaaagtagcgacgtttttattgcccgctcacaccacggctccgtctctaaagaacaacgagcaatcaccgagcaggcgctgaaatcgggtgagttacgctgcgtggtcgcaacctccagtctcgaactggggattgatatgggcgcagtggatctggtgattcaggtggcaacgccgctttctgttgccagtgggttacaacgcattggtcgcgccggacatcaggttggcggtgtatctaaagggctgtttttccctcgtacccggcgtgacttagtcgattccgcagtcattgtagagtgtatgttcgcaggcaggctggaaaacctgacaccccgcataatccactcgacgtccttgcgcagcaaaccgttgccgccgcggcgatggaggcattacaggtag

SEQ ID NO: 459406 - DNA, 648 bp, Shigella boydii
atgtccgataacgctcaacttaccggtctgtgcgaccgttttcgtggtttttatcctgttgtgatcgatgttgaaacagccggatttaacgccaaaaccgatgcgctgcttgagattgccgccatcaccctgaaaatggatgaacaaggctggctgatgccggacaccacattacatttccacgtcgaaccatttgtcggcgcaaatttgcaaccagaagccctcgccttcaacggcattgacccgaacgatcccgatcgcggcgcggtcagcgaatacgaggcgctgcacgaaatttttaaagttgtacgtaaaggtattaaagcgagcggctgtaaccgcgccattatggtggcgcacaatgccaattttgatcacagctttatgatggccgccgcagaacgcgcctcacttaaacgtaacccgttccaccctttcgccacttttgacactgctgcactggccgggctggcactcggacaaaccgtattgtcaaaggcttgccagaccgctggcatggacttcgacagcacccaggcgcactccgcgctgtacgacaccgaacgcactgctgtgctgttttgtgaaatcgtcaaccgctggaaacgtctgggaggctggccgctacctgccgccgaagaggtgtaa

SEQ ID NO: 459407 - DNA, 408 bp, Shigella boydii
atgcgtcttcttcataccatgctgcgcgttggcgatttgcaacgctccatcgatttttataccaaagtgctgggcatgaaactgctgcgtaccagcgaaaacccggaatacaaatactcactggcgtttgttggctacggcccggaaaccgaagaagcggtgattgaactgacctacaactggggcgtggataaatacgaactcggcactgcttatggtcacatcgcgcttagcgtagataacgccgctgaagcgtgcgaaaaaatccgtcaaaacgggggtaacgtgacccgtgaagcgggtccggtaaaaggcggtactacggttatcgcgtttatggaagatccggacggttacaaaattgagttaatcgaagagaaagacgccggtcgcggtctgggcaactaa

SEQ ID NO: 459408 - DNA, 1098 bp, Shigella boydii
atgtcatctgaaaaactgtattccccactgaaagtgggcgcgatcacggcggcaaaccgtatttttatggcaccgctgacgcgtctgcgcagtattgaaccgggtgacattcctaccccgttgatggcggaatactatcgccaacgtgccagtgccggtttgattattagtgaagccacgcaaatttctgcccaggcaaaaggatatgcaggtgcgcctggcatccatagtccggagcaaattgccgcatggaaaaaaatcaccgctggcgttcatgctgaaaatggtcatatggccgtgcagctgtggcacaccggacgcatttctcacgccagcctgcaacctggcggtcaggcaccggtagcgccttcagcacttagcgcgggaacacgtacttctctgcgcgatgaaaatagtcaggcgatccgtgttgaaacatccatgccgcgtgcgcttgaactagaagagattccaggtatcgtcaatgatttccgtcaggccattgctaacgcgcgtgaagccggttttgatctggtagagctcctctctgctcacggttatttgctgcatcagttcctttctccttcttcaaaccatcgtaccgatcagtacggcggcagcgtggaaaatcgcgcacgtctggtactggaagtggtcgatgccgggattgaagaatggggtgccgatcgcattggcattcgcatttcgccaatcggtactttccagaacacggataacggcccgaatgaagaagccgatacactgtatctgattgaacaactgggtaaacgcggcattgcttatctgcatatgtcagaaccagattggtcggggggtgaaccgtatactgatgcgttccgcgaaaaagtacgcgcccgtttccacggtccgattatctgcgcaggtgcatacacagtagaaaaagctgaaacgctgatcggcaaagggttaattgatgcggtggcatttggtcgtgactggattgcgaacccggatctggtcgcccgcttgcagcgcaaagctgagcttaacccacagcgtgccgaaagtttctacggtggcggcgcggaaggctataccgattacccgacgttgtaa

SEQ ID NO: 459409 - DNA, 600 bp, Shigella boydii
atgaacaaacacaccgaacatgatactcgcgaacatctcctggcgacgggcgagcaactttgcctgcaacgtggattcaccgggatggggctaagcgaattactaaaaaccgctgaagtgccgaaagggtccttctatcactactttcgctctaaagaagcgtttggcgttgccatgcttgagcgtcattacgccgcatatcaccagcgactgactgagttgctgcaatccggcgaaggtaactaccgcgaccgcatactggcttattaccagcaaacactgaaccagttttgccaacatggaaccatcagtggttgcctgacagtaaaactctctgccgaagtgtgcgatctgtcagaagatatgcgcagcgcgatggataaaggtgctcgcggcgtgatcgccctgctctctcaggcgctggaaaatggccgtgagaaccattgtttaaccttttgtggcgaaccgctacaacaggcacaagtgctttacgcactatggctgggtgcgaatctgcaggccaaaatttcgcgcagtttcgagccactggaaaacgcgctggcccatgtaaaaaacattattgcgacgcctgccgtttag

SEQ ID NO: 459410 - DNA, 240 bp, Shigella boydii
gtggcggagcaattagagttctttcccgtccagagcccgtgccggggaatttgccagtctgacgaacgcgggttttgtcgcggctgttttcgtagtcgggatgagcgttttaactggaataaaatgagcgatggagaaaaacaagaggtgctgcgcctttgtcggcagcgattaatgcgcaaattacgcgcaaataagccagcgtcatcagacgaaccggagcaaccatcactcttttga

SEQ ID NO: 459411 - DNA, 897 bp, Shigella boydii
atggttcagcgtattactattgcgccgcaaggcccggagttttcccgttttgtgatgggctactggcgattgatggactggaatatgtccgcccgccagctggtcagttttattgaagagcatctggatctcggcgtgaccaccgtggaccatgctgatatttatggtggctatcagtgcgaagcggcgtttggcgaggcactgaaactggcacctcacctgtgtgaacggatggaaatcgtcagtaaatgcggtatcgcgacgaccgcgcgtgaagaaaacgtcattggtcattacatcactgaccgcgatcacatcattaagagcgccgaacagtcgctaattaatctcgcgaccgatcatctggatctgctgttaatccaccgaccagacccgttaatggatgccgatgaagtggcggacgcgttcaaacatctgcatcagagcggcaaagtgcgtcattttggcgtatcgaactttacgcctgcgcaatttgccctgttgcaatcacgtctgccgtttacccttgccactaatcaggtggaaatatccccggtgcatcagccgttactgctggatggcacgctcgaccaactacaacaactgcgtgttcgtccgatggcgtggtcctgccttggtggtggtcgtctgtttaatgatgattatttccagccgctgcgtgatgaactggctgtggtggcagaggagttaaacgcgggctcgattgaacaggtggtttacgcctgggtattacgtttaccatcgcagccgctgccaattatcggttcaggtaaaattgagcgcgtacgggcagctgtcgaagcagaaacactgaaaatgacccgtcaacaatggtttcgtatccgtaaagcggcactggggtacgacgtaccgtaa

SEQ ID NO: 459412 - DNA, 522 bp, Shigella boydii
atgaaacgttttagtctggctattctggcgctggttgttgcaaccggcgcacaagctgccagtgaaaaagtcgagatgaacctcgtcacgtcgcaaggggtagggcagtcaattggtagcgtcaccattactgaaaccgataaaggtctggagttttcgcccgatctgaaagcattaccccccggtgaacatggcttccatattcatgccaaaggaagctgccagccagccaccaaagatggcaaagccagcgccgcggaatccgcaggcgggcatcttgatccacaaaataccggtaaacatgaagggccagaaggtgccgggcatttaggcgatctgcctgcactggtcgtcaataatgacggcaaagctaccgatgccgtcatcacgcctcgtctgaaatcactggatgaaatcaaagacaaagcgctgatggtccacgttggcggcgataatatgtccgatcaacctaaaccgctgggcggtggcggtgaacgctatgcctgtggtgtaattaagtaa

SEQ ID NO: 459413 - DNA, 2013 bp, Shigella boydii
atgaacgcatcgtcatggtccttgcgcaatttgccctggttcaaggccacgctggcgcaatggcgttatgcgttacgcaataccattgccatgtgtctggcgctgacggttgcctattatttgaatctggatgaaccctattgggcgatgacctcggctgcagtggttagctttcccaccgttggcggtgtcatcagcaaaagcctcggacgcatcgctggcagtttactgggagccattgcggcactgcttcttgccgggcatacgctcaatgagccgtggttttttctattgagcatgtcggcgtggcttggcttttgtacctgggcctgtgcgcacttcacgaataacgtcgcgtatgcatttcaactggcgggctacacggctgccatcatcgcctttccgatggttaatattactgaggccagccagctgtgggatatcgctcaggcgcgcgtttgcgaggtgatagtcggtattttgtgcggcggcatgatgatgatgatcctgcctagcagttccgatgctacagcccttttaaccgcattgaaaaacatgcacgcccaattactggaacatgccagtttactctggcagcctgaaacaaacgatgccattcgtgcagcacatgagggggggattgggcagatactgaccatgaatttgctgcgtatccaggctttctggagccactatcgttttcgccagcaaaacgcgcgccttaatgcgctactccaccagcaattacgtatgaccagtgtcatctccagcctgcgacgtatgttgctcaactggccctcaccgccaggtgccacgcgagaaattctcgaacaattgctgacggcgctcgccagttcgcaaacagatgcttacaccgtcgcacgtattatcgccccgctacgcccgaccaacgtcgccgactaccggcacgtcgccttctggcagcgactacgttatttttgccgcctttatctgcaaagtagtcaggaattacatcgtctgcaaagcggtgtagatgatcatgccagactcgcacggacatccgctctggctcgtcataccgacaacgccgaagctatgtggagcgggctgcgtacattttgtacgttgatgatgattggcgcatggagtattgcatcgcaatgggatgccggtgccaatgcattaacgctggcagcaattagctgcgtactctactccgccgtcgcagcaccgtttaagtcgttgtcactgctgatgcgcacgctggtgttactttcgctattcagctttgtggtcaaatttggcctgatggtccagattagcgatctgtggcaatttttactgtttctctttccactgctggcgacaatgcagcttcttaaattgcagatgcccaaatttgccgcactgtgggggcaactgattgtttttatgggttcgtttatcgctgtcactaatcccccggtgtatgattttgctgattttcttaacgataatctggcaaaaatcgttggcgttgcgctggcttggctagcgttcgccattctgcgtccaggatcggatgctcgtaaaagccgccgccatattcgcgcgctgcgccgggattttgtcgatcagctaagccgccatccaacactgagtgaaagcgaatttgaatcgctcacttatcatcacgtcagtcagttgagtaacagccaggatgcgctggctcgccgttggttattacgctggggtgtagtgctgctgaactgttctcatgttgtctggcaattgcgcgactgggaatcgagttccgatccgttatcgcgagtacgggataactgtatttcactgttgcggggagtgatgagtgagcgtggcgttcagcaaaaatcactggcggccacacttgaagaattacagcggatttgcgacagccttgcccgtcatcatcaacctgccgcccgtgagctggcggcaattgtctggcggctgtactgctcgctttcgcaacttgagcaagcaccaccgcaaggtacgcaggcctcttaa

SEQ ID NO: 459414 - DNA, 771 bp, Shigella boydii
atgcaatctccgtggacacgcgacgggaaaatacgcgcagaaaaggtttctatcaccccacaggtgtcgggacgtattgttgagctgaatataaaagacaaccaactggttaacgcgggggatcttctgctcacgatcgataaaacgccctttcagatcgccgagctgaacgcacaggctcagctggcgaaagcgcaatctgacctcgcaaaagccaataacgaagcgaatcgtcgtcgtcatctctcacaaaattttatttctgccgaagaactcgataccgctaacctcaatgttaaagcgatgcaggccagtgttaatgccgcacaggccacgctgaaacagacacaatggcaactggcgcaaacggaaattcgcgccccggtgagtggttgggtgactaacctcactacccgcatcggcgattacgctgacaccgggaaaccgctgtttgcccttgtcgacagccactcgttttacgtcattggttattttgaagaaaccaagttgcgccatatccgcgaaggtgcaccagcacaaattaccctctatagtgataacaaaacgttacggggtcacgtttccagtatcggtcgggcgatttatgatcaaagcgttgaaagtgactcaagccttattccggatgtgaaacctaacgtcccctgggttcgtctcgcccaacgcgttcccgtccgctttgcgctggataaagttccaggcgatgtcacgctggtgtcgggcaccacctgtagcattgccgtaggtcaataa

SEQ ID NO: 459415 - DNA, 174 bp, Shigella boydii
gtgaagtttatgctcaatgcaacaggattgcccttacaagatctggtgttcggtgcgtccgtctattttcctccgtttttcaaagccttcgcgtttggattcgtcatctggcttgtcgtacaccgcctgcttcgtggctggatctacgccggtgacatctggcatcccttgtaa

SEQ ID NO: 459416 - DNA, 435 bp, Shigella boydii
ttggaatcgccactaggttctgatctggcacggttggtgcgcatatggcgtgctctgatagaccatcgcctgaaaccgctggagttaacacaaacccattgggttacgttacacaatatccatcagttacctccagaccagtcgcaaattcaactggcaaaagcgattggcatcgagcagccatcactggtccgtactctggaccaactggaagaaaaagggttaatttcgcgtcaaacttgtgccagcgatcgtcgggctaaacgtattaaactgacggaaaaggcagagccactgatcagcgaaatggaagctgttattaacaaaacccgcgcggaaatattacatggcatctccgcagaggaactggagcaactgattacgctcatcgcaaaacttgagcataatatcattgagttacaggccaaagggtga

SEQ ID NO: 459417 - DNA, 468 bp, Shigella boydii
atgattaaacgcgtattggttgtttcaatggtaggtctgtctcttgtcggttgtgttaataacgacaccctgtcaggggatgtttataccgcttctgaagcgaaacaagtacaaaatgtcagctatggcaccatcgttaacgtacgtccggtacagattcagggcggtgatgattccaacgttatcggtgcaattggcggtgctgttcttggtggtttcctggggaatactgttggtggcggaaccgggcgttctctggctactgcagcaggcgctgttgcaggtggcgtagctggtcagggcgtacagagtgcaatgaacaaaacgcagggtgtcgagctggaaattcgtaaagacgatggtaataccatcatggtggtacagaaacaaggcaacactcgtttctctccgggccaacgtgtcgtactggccagcaatggcagtcaggtgaccgtttctccgcgctaa

SEQ ID NO: 459418 - DNA, 1110 bp, Shigella boydii
atgaaatcgggccgctttattggcgttatgtcaggcaccagccttgatggtgttgatgttgtgttggcgacaatagatgaacaccgggtcgcacagctggcaagcttgagctggccgatcccggtgtctctgaaacaggctgtactggatatttgccagggccagcagcttacactttcgcagtttggacagcttgatactcaactcgggcgactttttgctgatgcggtcaatgccttgcttaaggaacaaaacctgcaggcgagagatatagttgcgatcggctgtcacggtcaaaccgtctggcatgaaccgacgggcgtggcaccacacactttacagattggcgataacaatcaaattgtggcacgcaccggaattacggttgtcggtgattttcgccgtcgcgatattgccttgggaggacaaggcgcaccgctggtacctgcgttccatcatgccttgctggctcacccaaccgagcgacgaatggtgctcaatattggcggcatcgccaatctgtcactgctcattcctgggcagccggttggcggctacgataccggtcctggtaacatgctgatggatgcctggatctggcgtcaggccggtaaaccttacgataaagatgccgagtgggcacgggcgggtaaagttattctcccactgctgcaaaatatgctcagcgacccatatttctcgcaacctgcaccgaaaagcaccggacgcgaatactttaactacggctggctggagcgccatttacgccattttccgggtgttgatccccgtgatgttcaggccacactggcagaactcaccgccgtgaccatttctgaacaagttttgttgagcggtggctgcgaacgattgatggtatgtggtggaggtagtcgtaatccgctactcatggcgcgtctggcggcattactgccaggcacagaagtcaccaccaccgatgccgttggcattagtggcgatgacatggaagcattggctttcgcctggcttgcctggcggacgctggcgggattaccaggaaatctgccttccgtcactggcgcaagccaggagacggtactgggggctattttccctgctaacccgtga

SEQ ID NO: 459419 - DNA, 324 bp, Shigella boydii
atgaaaaaactgttactgatctgtttgccggtgcttctcaccggctgtagcgcgttcaatcaactggttgatcacatgcaaaccgctacgctggaataccagtgtgatgaaaaaccgttgacggtcaaactgaataatccgcgccaggaagtcagttttgtttacgataatcaactactgcatctcaaacagggcatttcagcgtctggtgcacgttacactgacggaatctatgttttctggtcgaaaggcgatgaagcgactgtctataaacgcgaccgcatcgtattgaataactgtcagttacaaaatccacagcgttga

SEQ ID NO: 459420 - DNA, 657 bp, Shigella boydii
atgtctgataacgacgaattgcagcaaatcgcgcatctgcgccgtgaatacaccaaaggcgggttacgccgtcgcgatcttcccgccgatccattaaccctttttgaacgttggctctctcaggcgtgtgaagccaaactggcagaccctaccgcgatggtggtcgctaccgtggatgaacatgctcagccttatcaacgcatcgttttactcaaacattacgacgaaaaaggcatggtgttttacaccaacctcggtagccgtaaagcacatcaaattgaaaataatccgcgcgttagcctgctgttcccgtggcatacccttgaacgccaggtgatggtgatcggtaaagcagaacgactttcgactctcgaagtgatgaaatattttcatagccgcccgcgtgatagccagattggtgcatgggtttcgaagcagtccagtcgcatttctgcccgcggtatccttgaaagtaaattcctggagctgaagcagaagtttcaacagggcgaagtgccattgccgagcttttggggcggttttcgcgtcagccttgaacagattgagttctggcagggcggtgagcatcgcctgcatgaccgctttttgtaccagcgagaaaatgatgcgtggaagattgatcgtcttgcaccctga

SEQ ID NO: 459421 - DNA, 1275 bp, Shigella boydii
atggcaagcagtaacttgattaaacaattgcaagagcgggggctggtagcccaggtgacggacgaggaagcgttagcagagcgactggcgcaaggcccgatcgcgctctattgcggcttcgatcctaccgctgacagcttgcatttggggcatcttgttccattgttatgcctgaaacgcttccagcaggcgggccacaagccggttgcgctggtaggcggcgcgacgggtctgattggcgacccgagcttcaaagctgccgagcgtaagctgaacaccgaagaaactgttcaggagtgggtggacaaaatccgtaagcaggttgccccgttcctcgatttcgactgtggagaaaactctgctatcgcggcgaacaactatgactggttcggcaatatgaatgtgctgaccttcctgcgcgatattggcaaacacttctccgttaaccagatgatcaacaaagaagcggttaagcagcgtctcaaccgtgaagatcaggggatttcgttcactgagttttcctacaacctgttgcagggttatgacttcgcctgtctgaacaaacagtacggtgtggtgctgcaaattggtggttctgaccagtggggtaacatcacttctggtatcgacctgacccgtcgtctgcatcagaatcaggtgtttggcctgaccgttccgctgatcactaaagcagatggcaccaaatttggtaaaactgaaggcggcgcagtctggttggatccgaagaaaactagcccgtacaaattctaccagttctggatcaacactgcggatgccgacgtttaccgcttcctgaagttcttcacctttatgagcattgaagagatcaacgccctggaagaagaagataaaaacagcggtaaagcaccgcgcgcccagtatgtactggcggagcaggtgactcgtctggttcacggtgaagaaggtttacaggcggcaaaacgtattaccgaatgcctgttcagcggttctttgagtgcgctgagtgaagcggacttcgaacagctggcgcaggacggcgtaccgatggttgagatggaaaagggcgcagacctgatgcaggcgctggtcgattctgaactgcaaccttcccgtggtcaggcgcgtaaaactatcgcctccaatgccatcaccattaacggtgaaaaacagtccgatcctgaatacttctttaaagaagaagatcgtctgtttggtcgttttaccttactgcgtcgcggcaaaaagaattactgtctgatttgctggaaataa

SEQ ID NO: 459422 - DNA, 861 bp, Shigella boydii
atgaaaaatattctcgctatccagtctcacgttgtttatggtcatgcgggtaacagtgcggcagagtttcctatgcgccgcctgggcgcgaacgtctggccgctgagcaccgttcaattttctaatcacacccagtacggcaaatggactggctgcgtgatgccgcccagccatttaaccgaaattgtgcaaggcattgccgccattgataaattacacacctgtgatgccgtgttaagtggctatctgggatcggcggagcagggtgaacatatcctcggtatcgtccgtcaggtgaaagccgcgaatccgcaggcgaaatatttttgcgatccggtaatgggtcatccggaaaaaggctgtatcgttgcaccgggtgtcgcagagtttcatgtgcggcacggtttgcctgccagcgatatcattgcgccgaatctggttgagctggaaatactctgtgagcatgcggtaaataacgtcgaagaagcggttctggcagcgcgcgaactcattgcgcaagggccacaaattgtgttggttaaacacctggcgcgagctggctacagccgtgaccgttttgaaatgctgctggtcaccgccgatgaagcctggcatatcagccgtccgctggtggattttggtatgcgccagccggtaggtgttggtgatgtgacgagcggtttactgctggtgaaactgcttcagggggcaacgctgcaggaggcgctggaacatgtgaccgctgcagtctacgaaatcatggtgaccaccaaagcaatgcaggaatatgagctgcaagtggtggctgctcaggatcgtattgccaaaccagaacattacttcagcgcaacaaagctctga

SEQ ID NO: 459423 - DNA, 606 bp, Shigella boydii
atgaaattgttctacaaaccgggtgcctgctctctcgcttcccatatcaccctgcgtgagagcggaaaggattttaccctcgtcagtgtggatttaatgaaaaaacgtctcgaaaacggtgacgattactttgccgttaaccctaaggggcaggtgcctgcattgctgctggatgacggtactttgctgacggaaggcgtagcgattatgcagtatcttgccgacagcgtccccgaccgccagttgctggcaccggtaaacagtatttcccgctataaaaccatcgaatggctgaattacatcgccaccgagctgcataaaggtttcacacctctgtttcgccctgatacaccggaagagtacaaaccgacagttcgcgcgcagctggagaagaagctgcaatatgtgaacgaggcactgaaggatgagcactggatctgcgggcaaagatttacaattgctgatgcctatctgtttacggttctgcgctgggcatacgcggtgaaactgaatctggaagggttagagcacattgcagcatttatgcaacgtatggctgaacgtccggaagtacaagacgcgctgtcagcggaaggcttaaagtaa

SEQ ID NO: 459424 - DNA, 1503 bp, Shigella boydii
gtgtccactgcaaaccaaaaaccaactgaaagcgtcagtttgaacgctttcaaacaaccgaaggcgttctatctcatcttctcgattgagttatgggaacgttttggttattacggcctacaaggaattatggctgtttacctggttaaacaactgggtatgtctgaagcggattcaatcacccttttctcttcctttagtgccctggtttatggtctggtcgctatcggcggctggttaggtgacaaagtactgggtactaaacgcgtaattatgctcggcgctattgtgctggcgattggttatgctctggttgcctggtctggtcacgacgccggtatcgtttatatgggtatggcggctattgcggtcggtaacggcctgtttaaagctaacccgtcttctctgctttctacatgctatgagaaaaacgacccgcgtctggacggtgcattcaccatgtactacatgtccgtcaacatcggctctttcttctctatgattgctacgccgtggctggccgcgaaatacggctggagtgttgcgtttgcgttgagcgttgtaggcctgctgatcactatcgttaacttcgccttctgccaacgctgggttaaacagtacggttcaaaaccagacttcgagcctatcaactaccgtaacctgctgctgaccattattggtgttgtggcactgatcgctatcgccacctggctgctgcacaatcaggaagttgcgcgtatggcgctgggcgttgttgccttcggtatcgtggttatcttcggtaaagaagccttcgcgatgaaaggtgctgcgcgtcgtaaaatgatcgttgccttcatcctgatgctcgaagccattatcttcttcgtgctgtacagccagatgccaacgtcactgaacttctttgcgattcgtaacgttgagcactccattctgggtctggccgtagaacctgagcagtatcaggcactgaacccgttctggatcatcatcggtagtccgattctggccgctatctataacaagatgggcgataccctgccgatgccaaccaagtttgcaatcggcatggtgatgtgttctggtgcgttcctgattctgccgctgggtgcgaaattcgcgtctgacgctggtatcgtgtctgtaagctggctggtcgcaagctatggcctgcagagcatcggggaactgatgatctctggtctgggtctggcaatggttgcacaactcgttccgcagcgtctgatgggcttcattatgggtagctggttcctgaccactgccggtgcaaacctgattggtggttatgttgcgggtatgatggctgtgccggataacgttaccgacccgctgatgtcactggaagtttatggtcgcgtattcttgcagattggtgtcgctactgccattattgcagtactgatgctgctgaccgcgcctaaactgcaccgtatgacgcaggatgacgctgcagacaaagcggcgaaagctgctgtagcgtaa

SEQ ID NO: 459425 - DNA, 201 bp, Shigella boydii
atgcaggttaattgtttttttaatagcgaaattttctattcattcgtgatcaagatcacgatgctgtcgcaatgtaaaaacattgcaataatcaggttaaaatcatttaaatttacacacgcaacaaatattgacctacaaaacattacactggctatttttcagaaactggactatctcactagcaaaaacgctaaatag

SEQ ID NO: 459426 - DNA, 636 bp, Shigella boydii
atgaacaaagcaaaacgcctggagatcctcactcgcctgcgtgagaacaatcctcatcccaccaccgagcttaatttcagttcgccttttgaattgctgattgccgtactgctttccgctcaggcgaccgatgtcagtgttaataaggcgacggcgaaactctacccggtggcgaatacgcctgcagcgatgcttgaactgggcgttgaaggggttaaaacctatatcaaaacgattgggctttataacagcaaagcagaaaatatcatcaaaacctgccgtatcttactggagcagcataatggcgaggttccggaagatcgtgctgcgcttgaagccctgcccggcgtaggtcgtaaaacagccaacgtcgtattaaacactgcattcggctggccgactattgctgtcgacacgcacattttccgcgtttgtaatcgtactcaatttgcgccggggaaaaacgttgaacaggtagaagaaaagctactgaaagtggttccggcagagtttaaagtcgactgccaccattggttgatcctgcacgggcgttatacctgcattgcccgcaagccccgctgtggctcttgtattattgaagatctttgtgaatacaaagagaaagttgacatctga

SEQ ID NO: 459427 - DNA, 696 bp, Shigella boydii
gtgagcgaaattaaagacgttattgttcaggggttgtggaaaaacaactctgcgctggtccagttgctcggcctttgtcctctgttggcggtcacgtccactgccactaatgctctgggtttaggacttgcgactacgctggtactgacgctgaccaacctgaccatttcgacgctgcgtcactggacgccagccgagatccgcattcccatttacgtgatgatcatcgcctcggtggtcagcgctgtacagatgctgatcaacgcctacgcctttggcctgtatcaatcattagggatttttattccgctgattgtcactaactgtatcgttgtgggccgcgctgaagccttcgccgccaaaaaaggtccggcgctttcggcactggacggcttttcaattggtatgggcgcaacctgcgccatgttcgtgctgggttcactacgcgaaattatcggcaatggcacattgtttgacggtgcagatgcgctgttaggtagctgggcaaaagtattacgcgtggagattttccacaccgactcccctttcctgctggcgatgctgccaccaggtgcatttattggcctgggactgatgctggcaggaaaatacctgattgatgaaagaatgaaaaagcgccgtactgaagcagctgccgaacgtgcattgccaaacggtgaaacagggaatgtctga

SEQ ID NO: 459428 - DNA, 621 bp, Shigella boydii
atgctgaaaactatccgaaaacacggcattacgttagcgctatttgcagcgggttcaacagggttaactgcggccatcaaccagatgaccaaaacgacgattgctgaacaggcaagtctgcaacaaaaggcattatttgatcaggtgctgccagccgaacgctataacaatgcgctggcacagagttgctatctggtaactgcgccagagttaggtaaaggtgagcatcgggtttacatcgccaaacaggatgacaaaccggtagccgccgttctggaagcaaccgcgccagatggctattccggtgcgattcagctgctggtgggagccgattttaacggcacggtacttggcacgcgcgtgacagagcaccacgaaacgccagggcttggcgataaaatcgaactgcgcctttctgactggatcacccattttgcgggtaaaaaaatcagtggtgcggatgatgcgcactgggcggtgaagaaagatggtggtgatttcgaccagttcaccggcgcgacgattactccccgcgcggtggttaatgcggtaaaacgcgccggattgtacgctcagacgttaccggcacaactttctcaacttcctgcctgtggagaataa

SEQ ID NO: 459429 - DNA, 1059 bp, Shigella boydii
atggtattcagaatagctagctccccttatacccataaccagcgccagacatcgcgcattatgctgttggtgttgctcgcagccgtgccaggaatcgcagcgcaactgtggttttttggttggggtactctcgttcagatcctgttggcatcggttagtactctgttagccgaagctctcgtactcaaactacgcaagcagtcggtagccgcaacgttgaaagataactcagcattgctgacaggcttattgctggcggtaagtattccccccctcgcgccatggtggatggtcgtgctgggtacggtgtttgcggtgatcatcgctaaacagttgtatggcggtctggggcaaaacccgtttaatccggcaatgattggttatgtggtcttactgatctccttcccggtgcagatgaccagctggttaccgccacatgaaattgcggtcaacatccctggttttatcgacgccatacaggttattttcagcgggcataccgccagtggtgctgatatgaacacactacacttaggtattgatggcattagtcaggcgacaccgctggatacatttaaaacctctgtccgtgccggtcattcggttgaacagattatgcaatatccgatctacagcggtattctggcgggcgctggttggcaatgggtaaatctcgcctggctggctggcggcctgtggttgctatggcagaaagcgattcgctggcatattcccctcagcttcttagtaacgctggcgttatgcgcaacgttgggctggttgttctcaccagaaacactggcagcaccgcaaattcatctgctgtctggtgcgaccatgctcggcgcattctttattttgactgacccggttaccgcttctacgaccaatcgtggtcgtcttattttcggcgcgcttgcgggcttattagtctggttgatccgcagtttcggcggctatcctgacggcgtggcttttgccgtcctgctggcgaacatcacggttcctctgatcgattactacacgcgtccgcgcgtctacggccatcgcaaagggtaa

SEQ ID NO: 459430 - DNA, 2127 bp, Shigella boydii
atgcttaagttattctctgcattcagaaaaaataaaatctgggatttcaacggcggcatccatccaccggagatgaaaacccagtccaacggtacacccctgcgccaggtaccactggcgcagcgttttgttattccactgaaacagcatattggcgctgaaggtgagttgtgcgttagcgtcggcgataaagtattgcgcggccagccgcttacccgtggtcgcagcaaaatgctgcctgttcacgcgcccacctcgggtaccgttacggctattgcgccccactctacggctcatccttcagctttagctgaattaagcgtgattattgatgccgatggtgaagactgctggatcccgcgcgacggctgggccgattatcgcactcgcagtcgcgaagagttaatcgagcgcatacatcagtttggtgttgccgggctgggcggtgcaggattcccgacaggcgttaaattgcagggtggcggagataagattgaaacgttgattatcaacgcggctgagtgcgagccgtacattaccgccgatgaccgtttgatgcaggattgcgcggctcagctcgtagagggtattcgcattcttgcgcatattctgcagccacgcgaaattcttatcggcattgaagataacaaaccgcaggcgatttccatgctgcgcgcggtgctggcggactctaacgatatttctctgcgggtgattccaaccaaatatccttctggcggtgctaaacaattaacctacattctgaccgggaagcaggttccacatggcgggcgttcatccgatatcggcgtattaatgcaaaacgtcggcactgcttatgcagtgaaacgtgccgttattgatggcgagccgattaccgagcgtgttgtaaccctgactggcgaagcaatcgctcgcccgggcaacgtctgggcacggctggggacgccagtgcgtcatttattgaatgatgcccgattctgcccctctgccgatcaaatggtgattatgggtggcccgctaatgggctttaccttgccatggctggatgtcccggtcgtaaagattaccaactgtctgttggctccctctgccaatgaacttggcgaaccacaggaagaacaaagctgcatccggtgtagcgcctgtgctgacgcctgccctgcggatcttttgccgcaacagttgtactggttcagcaaaggtcagcaacacgataaagctaccacgcataacattgctgattgcattgaatgtggggcttgcgcgtgggtttgcccgagcaatattcccctggtgcaatatttccgtcaggaaaaagctgaaattgcggctattcgtcaggaagaaaagcgcgccgcagaagccaaagcgcgtttcgaagcgcgccaggctcgtctggagcgcgaaaaagcggctcgccttgaacgacataagagcgcagccgttcaacctgcagccaaagataaagatgcgattgctgccgctctggcgcgggtgaaagagaaacaggcccaggctacacagcctattgtgattaaagcgggcgaacgcccggataacagtgcaattattgcagcacgggaagcccgtaaagcgcaagccagagcgaaacaggcagaactgcagcaaactaacgacgcagcaaccgttgctgatccacgtaaaactgccgttgaagcagctatcgcccgcgccaaagcgcgcaagctggaacagcaacaggctaatgcggaaccagaagaacaggtcgatccgcgcaaagccgccatcgaagccgctattgcccgagccaaagcgcgcaaactggaacagcaacaggctaatgcggagccagaagaacaggttgatccgcgcaaagcggccgtcgaagcggctattgcacgcgccaaagcacgcaagctggaacagcaacaggctaatgcggtacctgaagaacaggttgatccgcgcaaagccgccgtcgaagccgctattgcccgtgccaaagcgcgcaagctggaacagcaacagactaacgcagaaccagaagaacaggttgatccgcgcaaagcggcagttgccgcggctattgcccgcgctcaggccaaaaaagccgcccagcaaaaggttgtaaacgaggactaa

SEQ ID NO: 459431 - DNA, 579 bp, Shigella boydii
atgaatgctatctggattgccgttgccgccgtgagcctgctgggcctggcgtttggcgccattctgggttatgcctcccgccgttttgcggtggaagacgatccggtcgttgagaaaattgacaaaatcttaccgcagagccagtgtgctcagtgcggttatcccggctgtcgcccctacgcggaagccatcagctgtaacggtgaaaaaatcaaccgttgcgccccaggtggcgaagctgtgatgctaaaaattgccgagttgcttaatgtcgagccgcagccgctggatggcgaagcgcaagagctaacgcctgcgcggatggtggcggttattgatgaaaataactgtattggctgcactaaatgtattcaggcttgtccggtagacgccatcgttggcgctacccgtgccatgcatacggtaatgagtgatctctgtacgggctgcaatttatgtgttgatccgtgcccgacgcactgcatctcgttgcaaccggtcgcagaaacacctgactcctggaaatgggatctgaacaccattcccgtgcgtatcattcccgtggaacaccatgcttaa

SEQ ID NO: 459432 - DNA, 582 bp, Shigella boydii
atgactgactacctgttactgtttgtcggaactgtactggtcaataactttgtactggtcaagtttctcggtctctgtccgtttatgggggtttccaaaaaactggaaaccgcgatgggcatggggctggcaacaacgtttgtgatgacgctggcgtctatttgcgcctggcttatcgatacgtggattttgatcccacttaatctgatttacctgcgcaccctggcatttattctggtgattgctgtggtcgtgcagttcaccgagatggtggtgcgcaaaaccagcccggtgctttaccgtctgctggggatttttttgccgcttatcaccaccaactgtgcagtgctcggcgtggcgttgctgaatatcaatctcgggcacaatttcttgcagtcggcgctgtacggtttttccgccgctgtcggtttctcgctggtgatggtgctcttcgccgccatccgcgaacgccttgctgtggctgatgtcccggcaccttttcgcggtaatgccattgcgttaattaccgcaggtcttatgtctctggcctttatgggctttagtggtttggtgaagttgtaa

SEQ ID NO: 459433 - DNA, 441 bp, Shigella boydii
atgaccaccacaacgccacaacgtattggaggctggttgcttggcccgttggcctggcttttagtcgctctgttgagtacgacgctggcgttgttgctgtataccgctgcgttatcttctccgcaaacatttcaaacgctcggcggacaagcactgacgacacaaatcttatggggcgtttcttttattaccgctatcgccatgtggtattacacactgtggttgaccatcgctttctttaaacgtcggcgttgtgttcctaaacactatattatctggctgcttatttccgtattgctggcagtaaaagcattcgctttttcacccgtggaagatggcatagccgttcgccagttgctgtttactttgttggcaaccgcattgatcgtctcctatttcaaacgctcgtcgcgggtaaaagcgacatttgtgaatccgtaa

SEQ ID NO: 459434 - DNA, 216 bp, Shigella boydii; identical to SEQ ID NO: 261393

SEQ ID NO: 459435 - DNA, 1041 bp, Shigella boydii
atgagcgacaacatccgtgttgggttgattgggtatggttatgcgagcaaaaccttccatgcgcccctgattgcgggcacgcccgggctggaactggcggtaatctccagcagtgatgaaacaaaagtaaaagccgactggccaacggttacggttgtctctgagccgaagcatctgtttaacgatcccaacatagacctgattgtcattcctacacccaacgatacccatttcccgttagccaaagcggcgcttgaggcgggtaaacatgtggtcgttgataaaccctttaccgtgacactgtcacaagcgcgagagctggatgcgctggcaaaaagcctggggcgtgtgctgtctgtattccataaccgtcgttgggatagcgatttcttgaagctaaaaggtttgctcgcggaaggcgtgctgggtgaagttgcttactttgagtctcattttgaccgcttccgtccgcaggtgcgcgatcgttggcgtgaacagggcggcccaggcagcggtatctggtacgatttagcaccgcatcttcttgatcaggccattacgctatttggtttaccggtcagcatgacggtagatttggcacagttacggcccggagcgcagtcgaccgattatttccacgccatcttgtcctatccacagcggcgagtcattttacacggtaccatgctggcagccgctgagtcagcacggtatatcgtgcatggatcccgaggcagttatgtgaaatatggcctcgatccacaggaagaacgtctgaaaaatggcgagcgtctgccgcaggaagactggggctacgatatgcgtgatggcgtacttacccgcgtggaaggtgaggaacgtgtcgaagaaacgctgttgacggtacctgggaattatccggcttactatgcggctattcgtgatgcgttaaatggcgatggtgaaaatccggttccggcaagccaggcaatccaggtaatggagttgattgagctgggcatcgaatccgccaaacatcgcgcggctttgtgccttgcatga

SEQ ID NO: 459436 - DNA, 1002 bp, Shigella boydii
atgattgataccaccctgccattaactgatatccatcgccaccttgatggcaacattcgtccccagaccattcttgaacttggccgccagtataatatctcgcttcctgcacaatccctggaaacactgattccccacgttcaggtcattgccaacgaacccgatctggtgagctttctgaccaaacttgactggggcgttaaagttctcgcctctcttgatgcctgccgccgcgtggcatttgaaaacattgaagatgcagcccgtaacggcctgcactatgtcgagctgcgtttttcaccaggctacatggcaatggcacataagctgcctgtagcgggtgttgtcgaagcggtgatcgatggcgtacgtgaaggttgccgcacttttggtgtgcaggcgaagcttatcggcattatgagccgaaccttcggcgaagccgcctgtcagcaagagctggaggcctttttagcccaccgtgaccagattaccgcacttgatttagccggtgatgaacttggtttcccgggaagtctgttcctttctcacttcaaccttgcgcgtgatgcgggctggcatattaccgtccatgcaggcgaagctgccgggccggaaagcatctggcaggcgattcgtgaactgggtgcggagcgtattggacatggcgtaaaagccattgaagatcgggcgctgatggattttctcgccgagcaacaaattggtattgaatcctgtctgacctccaatattcagaccagcaccgtagcagagctggctgcacatccgctgaaaacgttccttgagcatggcattcgtgccggcattaacactgacgatcccggcgtacagggagtggatatcattcacgaatataccgttgccgcgccagctgctgggttatcccgcgagcaaatccgccaggcacagattaatggtctggaaatggctttcctcagcgctgaggaaaaacgcgcactgcgagaaaaagtcgccgcgaagtaa

SEQ ID NO: 459437 - DNA, 1173 bp, Shigella boydii
atgttcgatttttcaaaggtcgtggatcgtcatggcacatggtgtacacagtgggattatgtcgctgaccgtttcggcactgctgacctgttaccgttcacgatttcagacatggattttgccactgccccctgcattatagaggcgctgaatcagcgcctgatgcacggcgtatttggctacagccgctggaaaaacgatgagtttctcgcggctattgcccactggttttccacccagcattacaccgccatcgattctcagacggtggtgtatggcccttctgtcatctatatggtttcagaactgattcgtcagtggtctgaaacaggtgaaggcgtggtgatccacacacccgcctatgacgcattttacaaggccattgaaggtaaccagcgcacagtaatgcccgttgctttagagaagcaggctgatggttggttttgcgatatgggcaagttggaagccgtgttggcgaaaccagaatgtaaaattatgctcctgtgtagcccacagaatcctaccgggaaagtgtggacgtgcgatgagctggagatcatggctgacctgtgcgagcgtcatggtgtgcgggttatttccgatgaaatccatatggatatggtttggggcgagcagccgcatattccctggagtaatgtggctcgcggagactgggcgttgctaacgtcgggctcgaaaagtttcaatattcccgccctgaccggtgcttacgggattatagaaaatagcagtagccgcgatgcctatttatcggcactgaaaggccgtgatgggctttcttccccttcggtactggcgttaactgcccatatcgccgcctatcagcaaggcgcgccgtggctggatgccttacgcatctatctgaaagataacctgacgtatatcgcagataaaatgaacgccgcgtttcctgaactcaactggcagatcccacaatccacttatctggcatggcttgatttacgtccgttgaatattgacgacaacgcgttgcaaaaagcacttatcgaacaagaaaaagtcgcgatcatgccggggtatacctacggtgaagaaggtcgtggttttgtccgtctcaatgccggctgcccacgttcgaaactggaaaaaggtgtggctggattaattaacgccatccgcgctgttcgttaa

SEQ ID NO: 459438 - DNA, 1593 bp, Shigella boydii
atgacggcgaaaacagcaccgaaagtcacgctgtgggagttcttccagcagttaggcaaaaccttcatgttacccgtggcattattgtcgttctgcggcattatgctcggcattggtagttctcttagcagccatgatgtcataaccctgatcccggtcctgggcaaccccgtgttgcaggctatctttacctggatgagtaagattggctcgtttgcttttagtttcctgcctgtcatgttctgtatcgccatcccgctgggcctggcacgcgaaaataaaggcgtagcggcattcgctggcttcgtcggttatgcggtaatgaacctcgcggtaaacttctggttgaccaataaaggcattctgccaaccacggatgccgcggttctgaaagccaataacatccagagcattcttgggatccagtcgatcgataccgggatcctcggtgcggtgatcgccggtattatcgtctggatgctgcatgagcgtttccataatatccgcctgccggatgcgctggcattcttcggcggtacgcgcttcgtaccaattatctcctcgctggtgatgggccttgtcggcctggtgattccattagtctggccgattttcgccatgggtattagcggcttgggccatatgataaacagcgcgggtgatttcggaccgatgctgtttggtaccggtgaacgtctgctgttgccgtttggtctgcatcacattctggtggcattaattcgctttaccgacgcaggcggcacgcaggaagtctgcggtcaaaccgtcagcggcgcactgaccatcttccaagcgcaattgagttgcccgaccactcacggtttttctgaaagcgccacgcgtttcctttcgcaaggtaaaatgcctgcgtttctcggcggtctgccagctgcagcgttagctatgtatcactgcgcgcgcccggaaaatcgccataaaattaaaggtctgctgatttctggcctgatcgcctgcgtcgttggcggcactaccgaaccgctggaattcctgttcctgttcgtagcgccagttctgtatgtcatccacgcgctgttaaccggcctcggcttcaccgtcatgtctgtgctcggcgtcaccatcggtaataccgacggcaatatcatcgacttcgtggtgttcggtattttgcatggtctgtcaaccaagtggtacatggtgccagtggtggcggcaatctggtttgtcgtttactacgccatcttccgtttcgctatcacccgcttcaatctcaaaaccccggggcgcgatagcgaagttgccagctcaatcgaaaaagccgttgccgctgcgccgggtaaatcaggttacaacgttcctgcaatcctcgaagcattaggcggtgccgacaatattgtcagcctcgataactgcattacccgtctgcgtttgtctgtgaaagatatgtcgcttgttaatgtgcaggcactgaaggacaatcgggcaattggcgtagtacaacttaatcaacataacctgcaggttgttatcgggccacaagttcagtcagtaaaagatgaaatggccggtctgatgcatactgtccaggcataa

SEQ ID NO: 459439 - DNA, 1029 bp, Shigella boydii
atggctaccgccaaaaaaataaccattcatgatgttgcgctggctgcgggcgtgtcggtaagtaccgtttcgctggtgcttagtggcaaagggcgaatctctaccgccacaggagaacgcgttaacgccgccattgaagagctgggatttgtgcgcaatcgccaggcgtcggcgctgcgcggcgggcaaagcggcgtcattggtttgatcgtccgtgatttatctgcgccgttttacgccgaattgacggccggattgacggaagctctggaagcgcagggacggatggtttttttgcttcacggcggtaaagacggcgagcagctggcacagcggttttcactgttactgaatcagggggtcgatggtgtggtaattgccggggctgcaggaagcagcgatgacctgcgacggatggcagaagaaaaagctatcccggtgattttcgcttcccgtgccagttatcttgatgatgttgatacggttcgcccggacaacatgcaggctgcacagttgttgacggagcatctcattcgcaatgggcatcagcggatcgcctggctgggagggcaaagttcctcattaacccgggcagaacgggtgggaggctattgtgcaactctactaaaatttggcctgccgtttcacagcgattgggtgctggagtgcacatccagccagaagcaagctgcggaagctatcacggcgcttttacgtcataacccgaccatcagtgctgtggtttgctataacgaaactattgcgatgggggcatggtttggtttgctgaaagcagggcggcaaagcggggaaagcggagtcgatcgttactttgagcaacaagtttcgctggcggcatttaccgatgcgacaccaaccacacttgatgatatacccgttacctgggccagcacgcctgcgcgggaacttggtaccacacttgcggatcgcatgatgcaaaaaatcacccatgaagagacgcattcacgcaatcttattattcccgcccggctcattgcagcgaaataa

SEQ ID NO: 459440 - DNA, 207 bp, Shigella boydii; identical to SEQ ID NO: 24440

SEQ ID NO: 459441 - DNA, 819 bp, Shigella boydii
atgaccacacgcgtgattgctctcgacttagacggcaccttattgaccccgaaaaagaccctgcttccttcatcgatagaagccctggcccgcgctcgcgaagcaggctatcaattaatcatcatcacaggtcgccatcacgtcgctattcatcctttttatcaggcgctggcgctggatacacctgctatttgctgtaatggcacctatttgtatgattatcatgcaaaaaccgtgctggaagcggacccaatgcccgttaataaagccctgcaactcattgagatgctgaatgaacaccacattcacggtctgatgtatgtggatgatgcaatggtctatgagcacccgaccgggcatgtcattcgcacgtctaactgggcgcaaaccctgccgccggaacagcgtccgactttcacacaagtcgcttctctggctgaaacggcgcaacaagttaacgccgtatggaagttcgccctgacgcacgatgacatgccgcaattgcagcattttggtaagcatgtcgaacatgaactgggactggagtgtgaatggtcctggcacgatcaggttgatattgcacgcggcggcaacagcaaaggtaaacgtttgacgaaatgggttgaggcgcaaggctggtcgatggaaaacgtcgtggcgttcggcgataactttaatgatatcagtatgctggaggccgctggtacaggcgtggcgatgggcaacgccgatgacgcggtaaaagcgcgcgccaacattgtgattggtgataacaccaccgacagcattgcccagttcatttatagccacctgatttaa

SEQ ID NO: 459442 - DNA, 1059 bp, Shigella boydii
atgctggaactgaatttttcccagacgttgggcaaccattgcctgactattaatgaaacgctgcccgccaatggcatcactgctatttttggcgtctccggtgccggaaaaacttcgctgattaacgccatcagtggactgacgcgcccgcaaaaagggaggattgtcctcaatggtcgggtactaaatgatgccgaaaaaggtatctgcctgacgccagaaaagcgtcgcgttggctatgtttttcaggatgcgcggctgtttccgcattacaaagtgcgtggcaatctgcgctacggcatggcgaaaagcatggtcgatcagttcgataagctggtggcgcttttaggcattgaaccgttgcttgaccgtttaccaggcagcctgtccggaggcgaaaaacagcgcgtagcgattgggcgggctttgctgacggcaccagaattgctgttgctggatgaaccgctggcgtcactggatattccgcgtaaacgcgaactgttgccttatctgcaacgtctgacgcgggaaatcaacatcccgatgttgtatgtcagccattcgctggatgagatcctccatctggcagacagagtgatggtactggaaaacggtcaggtgaaagcctttggcgcactggaagaagtctggggtagtagcgtgatgaatccgtggctgccgaaagagcaacaaagtagcattctgaaagtgacggtgcttgagcatcatccgcattacgcgatgaccgcgctggcgctgggcgatcagcatttgtgggtcaataagctggacgaaccgctgcaagctgcgctacgtatccgcattcaggcttccgatgtttctctggttttacaaccgccgcagcaaaccagcattcgtaacgtattgcgggcaaaagttgttaatagttatgacgacaacggtcaggtggaagtggagctggaagtcggcggtaaaacgctgtgggcgcgtatcagcccgtgggccagggatgaactggcgatcaaaccaggcctgtggctgtacgcgcaaattaaaagtgtgtcgataaccgcctga

SEQ ID NO: 459443 - DNA, 690 bp, Shigella boydii
atgatactgacagatccagaatggcaggcagttttattaagcctgaaagtttcttccctggctgtgctgtttagcctgccgtttgggatcttttttgcctggttactagtgcgttgcacgtttccgggcaaagctctgctcgacagcgtactgcatctaccgctggtgttaccgcccgtggtcgtcggttacttattattagtttcgatgggacggcgcggatttatcggtgaacgtctgtatgactggtttggtattaccttcgcctttagctggcgcggcgcggttctcgctgccgccgtcatgtcgtttccgctgatggtgcgggcaattcgtctggcgctggaaggggttgatgtcaaactcgaacaggccgcaagaacactaggtgccgggcgctggcgcgttttctttactatcacgttaccgctgaccttaccgggaattattgttggtacggtactggcttttgctcgttctctcggtgagtttggtgcaaccatcacctttgtgtcgaacattcctggcgaaacgcgaaccattccctctgccatgtataccctgatccagacccccggcggggaaagtggcgcggcgagactgtgcattatttctattgcgctggcgatgatctccctgttgatttcagaatggctggccagaatcagccgtgaacgggcggggcgctaa

SEQ ID NO: 459444 - DNA, 774 bp, Shigella boydii
atggctcgtaaatggttgaacttgtttgccggggcggcactctctttcgctgttgctggcaatacactggcagatgaagggaaaatcacggtgttcgccgccgcatcactgactaacgcaatgcaggacattgctacgcagtataaaaaagaaaaaggcgtggatgtggtttcttctttcgcttcgtcatctactctggcccgtcagattgaagcgggagcgcctgcggatctgtttatctctgccgatcagaaatggatggattatgcggttgataaaaaagcgatcgatacggcttcgcggcagacactgctcggcaatagcctggtcgttgtagcaccgaaagccagcgagcagaaagatttcatcatcgacagcacaactaactggacttcgctgctgaatggcggtcgcctcgcggttggcgatccggaacatgtccctgctggcatttatgcaaaagaagcactgcaaaaactgggcgcatgggatacgctctccccgaaattggctccggcggaagatgttcgtggcgcgctggcgttggtcgaacgcaatgaagcgccgttgggcattgtttacggttctgacgcagttgtcagcaaaggggtaaaagtggttgccaccttcccggaagattcacataaaaaagtggaatatccggttgctgttgtggaagggcataacaatgcgacagtgaaagcattttatgattatctgaagggaccgcaggcagcggaaatctttaaacgttacggatttacaaccaagtaa

SEQ ID NO: 459445 - DNA, 150 bp, Shigella boydii; identical to SEQ ID NO: 261810

SEQ ID NO: 459446 - DNA, 789 bp, Shigella boydii
atgcaggccgaaatccttctcacccttaagctccaacaaaaattattcgccgacccgcgccggatttcgctactaaaacacattgcgctttccggttccattagccagggagcgaaagatgccggtatcagctataaaagcgcctgggatgccattaacgagatgaatcagttaagcgagcatattctggttgagcgcgcaacaggcggtaaaggtggcggcggcgcagtactgacccgctatggtcagcgactgattcagctctatgacttactggcgcaaatccagcaaaaagcctttgatgtgttaagtgacgatgacgccctgccgctgaacagcctgctggccgcgatctcacgtttttcactgcaaaccagcgcccgtaaccagtggttcggtaccatcaccgcccgcgatcatgatgacgttcaacagcatgttgatgtcttactggctgacggaaaaacacgcctgaaagtcgcaattaccgcacaaagcggcgcacgtctggggctggatgaaggcaaagaagtgttgatattgctaaaagcgccgtgggtaggcattactcaggacgaagcggtcgcacaaaacgccaacaaccaattaccgggtattattagtcatattgagcgcggcgcagagcagtgcgaagtattaatggcgctacccgacgggcaaacactgtgcgccacagtgccggtaaatgaagcgacttctcttcagcaagggcagaatgtcacggcctactttaatgccgacagcgtgattatcgccacgctgtgctaa

SEQ ID NO: 459447 - DNA, 1473 bp, Shigella boydii
atgtcatcgttgcaaattttgcaaggcacgtttcgtcttagcgacacaaaaacgctgcaattgcctcagctaacgttaaacgcgggtgatagttgggcgtttgtcggttcgaatggaagcgggaaatcggccctggcccgcgcgctggcgggggaacttccgcttttgaaaggtgaacggcaaagccagttttcccacatcactcgtctctccttcgagcaattgcaaaaactcgtcagcgacgaatggcagcggaataacaccgatatgctcggccctggcgaagatgacaccggacgcactacggctgagatcattcaggatgaagtaaaggatgcaccgcgttgcatgcaactggcgcagcagttcggtattaccgccctcctcgaccgacgctttaaatacctttccactggcgagacgcgaaaaaccctgctgtgtcaggcgctgatgtcggagcctgacttgttgattcttgatgagccgttcgatggcctggatgttgcctcacgtcagcagctggctgagcgactcgcctcgttacatcagtccggtattactctggtactggtgctcaatcgcttcgatgagatcccggagtttgtccagtttgctggcgtgctggcggattgcacgttagcggaaactggcgctaaagaggaactgctccaacaagcactcgtcgcgcaactggcacatagtgaacagcttgaaggtgtgcaactgccggagccggatgaaccttcagcacgtcacgccttacccgccaacgaaccgcgcattgtgctgaacaatggcgtggtttcttataacgatcgccccattcttaataaccttagctggcaggtgaatccaggtgaacactggcaaattgtcgggccaaatggtgcaggaaaatcgacgttattaagcctggttactggcgatcatccgcaaggttacagcaacgatttgacgcttttcggacgacgtcgcggcagcggcgaaaccatctgggatatcaaaaagcatatcggttacgtcagcagtagtttgcatctggattaccgggtcagcactaccgtgcgtaatgtgattctttctggctattttgattcgattggcatttatcaggccgtttcggatcgccagcaaaaactggtgcagcagtggctggatattctcggcattgataaacgtacggctgacgctccgttccatagtctttcctggggacagcagcatctggcgctgatcgtccgcgcactggtgaaacatccgacgttgcttattctcgatgaaccactacaggggcttgatccgctcaatcgccagcttatccgccgttttgttgatgtgctgattagcgaaggtgaaacgcaattgttgtttgtttcgcaccacgctgaagatgcgcctgcctgtattacccatcgccttgagttcgtgccggacggtggactctatcgctatgtgctgacaaaaatatattga

SEQ ID NO: 459448 - DNA, 1017 bp, Shigella boydii
atgagagttctggttaccggtggtagcggttacattggaagtcatacctgcgtgcaattactgcaaaacggtcatgatgtcatcattcttgataacctctgtaacagtaagcgcagcgtactgcctgttatcgagcgtttaggcggcaaacatccaacgtttgttgaaggcgatattcgtaacgaagcgttgatgaccgagatcctgcacgatcacgctatcgacaccgtgatccacttcgccgggctgaaagccgttggcgaatcggtacaaaaaccgctggaatattacgacaacaatgtcaacggtactctgcgcctgattagcgccatgcgcgccgctaacgtcaaaaactttatttttagctcctccgccaccgtttatggcgatcagcccaaaattccatacgttgaaagcttcccgaccggcacaccgcaaagcccttacggcaaaagcaagctgatggtggaacagatcctcaccgatctgcaaaaagcccagccggactggagcattgccctgctgcgctacttcaacccggttggcgcgcatccgtcgggcgatatgggcgaagatccgcaaggcattccgaataacctgatgccatacatcgcccaggttgctgtaggccgtcgcgactcgctggcgatttttggtaacgattatccgaccgaagatggtactggcgtacgcgattacatccacgtaatggatctggcggacggtcacgtcgtggcgatggaaaaactggcgaacaagccaggcgtacacatctacaacctcggcgctggcataggcagcagcgtgctggacgtggttaatgccttcagcaaagcctgcggcaaaccggttaactatcattttgcaccgcgtcgcgagggcgaccttccggcctactgggcggacgccagcaaagccgaccgtgaactgaactggcgcgtaacgcgcacactcgatgaaatggcgcaggacacctggcactggcagtcacgccatccacagggatatcccgattaa

SEQ ID NO: 459449 - DNA, 1047 bp, Shigella boydii
atgacgcaatttaatcccgttgatcatccacatcgccgctacaacccgctcaccgggcaatggattctggtttcaccgcaccgcgctaagcgcccctggcagggggcgcaggaaacgccagccaaacaggtgttacctgcgcacgatccagattgcttcctctgcgcaggtaatgtgcgggtgacaggcgataaaaaccacgattacaccgggacttacgttttcactaatgactttgcggccttgatgtctgacacgccagatgcgccagaaagcaacgatcctttgatgcgttgccagagcgcgcgcggtaccagccgggtgatctgcttttcaccggatcacagtaaaacgttgccagaactgagcgttgcggcattgacggaaatcgtcaaaacctggcaggagcaaaccgcagagctgggaaaaacgtacccgtgggtgcaggtctttgaaaacaaaggtgcggcgatgggctgctctaacccgcatccgcacggacagatttgggcaaatagcttcctgcctaacgaagctgagcgcgaagaccgcctgcaaaaagaatattttgccgaacagaaatcaccaatgctggtggattatgttcagcgcgagctggcagacggtagccgtaccgttgtcgaaaccgaacactggttagccgttgtgccttactgggctgcctggccgttcgaaacgctactgctgcccaaagcccacgttttgcggatcaccgatttgaccgacgcccagcgcagcgatttggcgctggcgttgaaaaagctgaccagtcgttatgacaacctcttccagtgctccttcccctactctatgggctggcacggcgcaccatttaatggcgaagagaatcaacactggcagctgcacgcgcacttttatccgcctctgctgcgctccgccaccgtacgtaaatttatggttggttatgaaatgctggcagagacccagcgagacctgaccgcagaacaggcagcagagcgtttgcgcgcagtcagcgatatccattttcgcgaatccggagtgtaa

SEQ ID NO: 459450 - DNA, 1149 bp, Shigella boydii
atgagtctgaaagaaaaaacacaatctctgtttgccaacgcatttggctaccctgccactcacaccattcaggcgcctggccgcgtgaatttgattggtgaacacacggactacaacgacggtttcgttctgccctgcgcgattgattatcaaaccgtgatcagctgtgcaccacgcgatgaccgtaaagttcgcgtgatggcagccgattatgaaaatcagctcgacgagttttccctcaatgcgcccattgtcgcgcatgaaaactatcaatgggcgaactacgttcgtggcgtggtgaaacatctgcaactgcgtaacaacagcttcggcggtgtggacatggtgatcagcggcaatgtgccgcagggtgccgggttaagttcttccgcttcactggaagtcgcggtcggaaccgtattgcagcagctttatcatctgccgctggacggcgcacaaatcgcgcttaacggtcaggaagcagaaaaccagtttgttggctgtaactgcgggatcatggatcagctaatttccgcactcggcaagaaagatcattccttgctgattgactgtcgttcactggggaccaaagcagtttccatgccgaaaggtgtggctgtcgtcatcatcaacagtaacttcaaacgtaccctggttggcagcgaatacaacacccgtcgtgaacagtgcgaaaccggtgcgcgtttcttccagcagccagccctgcgcgatgtcaccattgaagagttcaatgctgttgcacatgagctggacccaatcgtggcgaaacgcgtgcggcatatcctgactgaaaacgcccgcaccgttgaagctgccagcgcgctggagcagggcgacctgaaacgtatgggcgagttgatggcggagtctcatgcctctatgcgcgatgatttcgaaatcaccgtgccgcaaattgacactctggtagaaatcgtcaaagctgtgattggcgacaaaggtggcgtacgcatgaccggcggcggatttggcggctgtatcgtcgcgttgatcccggaagagctggtgcctgccgtacagcaagctgtcgctgaacaatatgaagcaaaaataggtattaaagagactttttacgtttgtaaaccatcacaaggagcaggacagtgctga

SEQ ID NO: 459451 - DNA, 1041 bp, Shigella boydii
gtgctgaacgaaactcccgcactggcacccgatggtcagccgtaccgactgttaactttgcgtaacaacgcagggatggtagtcacgctgatggactggggtgcgactttactttcagcccgtattccgctttccgatggcagcgtccgcgaggcgctgctcggctgtgccagcccggaatgctatcaggatcaggccgcgtttctgggggcctctattggtcgttatgccaaccgcatcgccaatagccgttatacctttgacggtgaaaccgtgaccctttcgccaagtcagggcgttaaccagctgcacggcggcccggaagggttcgacaaacgtcgctggcagattgtgaaccagaacgatcgtcaggtgctgtttgccctgagttcagatgatggcgatcagggcttcccgggtaatctcggcgcaacggtgcaatatcgtctgaccgacgataaccgtatctccattacttatcgcgccacagttgataaaccttgcccggtgaatatgactaatcacgtctatttcaatcttgacggcgagcagtctgacgtgcgcaatcacaagttgcagattctggcggacgaatatctgccggttgatgaaggcggcattccgcacgacggcctgaaatctgtcgccggaacgtcttttgatttccgcagcgccaaaatcatcgccagtgagtttcttgccgacgacgatcagcgcaaagtgaaaggttacgatcacgcattcttgttacaggccaaaggcgatggcaagaaagtggcggcgcatgtctggtcagcagatgaaaaattgcagctgaaggtctacaccaccgctccggctctgcaattctactccggcaacttcctcggcggcacaccgtcgcggggaacagaaccttacgccgactggcaagggctggcgttggaaagcgagtttctgccggacagcccgaaccaccctgaatggccgcaaccggactgcttcctgcgtcctggcgaagagtattccagcctgacggaatatcagtttattgctgagtaa

SEQ ID NO: 459452 - DNA, 753 bp, Shigella boydii
atggctgtaactaagctggttctggttcgtcatggcgaaagtcagtggaacaaagaaaaccgtttcaccggttggtacgacgtggatctgtctgagaaaggcgtaagcgaagcaaaagcagcaggtaagctgctgaaagaggaaggttacagctttgactttgcttacacttctgtgctgaaacgcgctatccataccctgtggaatgtgctggacgaactggatcaggcatggctgcccgttgagaaatcctggaaactgaacgaacgtcactacggtgcgttgcagggtctgaacaaagcggaaactgctgaaaagtatggcgacgagcaggtgaaacagtggcgtcgtggttttgcagtgactccgccggaactgactaaagatgatgagcgttatccgggtcacgatccgcgttacgcgaaactgagcgagaaagaactgccgctgacggaaagcctggcgctgaccattgaccgcgtgatcccttactggaatgaaactattctaccgcgtatgaagagcggtgagcgcgtaatcatcgccgcacacggtaactccctgcgtgcgctggtgaaatatcttgataacatgagcgaagaagagattcttgagctgaatatcccgactggcgtgccgctggtgtatgagttcgacgagaatttcaaaccgctgaaacgctattatctgggtaatgctgacgagatcgcagcgaaagcagcggcggttgcaaaccagggtaaagcgaagtaa

SEQ ID NO: 459453 - DNA, 1053 bp, Shigella boydii
atgaattatcagaacgacgatttacgcatcaaagaaatcaaagagttacttcctcctgtcgcattgctggaaaaattccccgctactgaaaatgccgcgaatacggttgcccatgcccgaaaagcgatccataagatcctgaaaggtaatgatgatcgcctgttggtggtgattggcccgtgctcaattcatgatcctgtcgcggctaaagagtatgccactcgcttgctggcgctgcgtgaagagctgaaagatgagctggaaatcgtaatgcgcgtctattttgaaaagccgcgtaccacggtgggctggaaagggctgattaacgatccgcatatggataacagcttccagatcaacgacggtcttcgtatagcccgtaaattgctgcttgatattaacgacagcggtctgccagcggcgggtgagtttctcgatatgatcaccccacaatatctcgctgacctgatgagctggggcgcaattggcgcacgtaccaccgaatcgcaggtgcaccgcgaactggcatcagggctttcttgtccagtcggcttcaaaaatggcaccgacggtacgattaaagtggctatcgatgccattaatgccgccggtgcgccgcactgcttcctgtccgtaacgaaatgggggcattcggcgattgtgaataccagcggtaacggcgattgccatatcattctgcgcggcggtaaagagcctaactacagcgcgaagcacgttgctgaagtgaaagaagggctgaacaaagcaggcctgccagcacaggtgatgatcgatttcagccatgctaactcgtccaaacaattcaaaaagcagatggatgtttgtgctgacgtttgccagcagattgccggtggcgaaaaggccattattggcgtgatggtggaaagccatctggtggaaggcaatcagagcctcgagagcggggagccgctggcctacggtaagagcatcaccgatgcctgcatcggctgggaagataccgatgctctgttacgtcaactggcgaatgcagtaaaagcgcgtcgcgggtaa

SEQ ID NO: 459454 - DNA, 381 bp, Shigella boydii
atgaaaatgacaaaactggccacattatttctgactgccactctaagccttgccagcggtgccgcactggctgccgatagcggagcgcaaactaataacggccaggcaaacgccgcaactgatgcgggccaggtagcccctgacgcccgtgaaaatgtcgcgccaaataacgtcgacaataacggggtaaataccggttctggcggcacaatgctgcattcggatggttcttcaatgaacaatgacggaatgaccaaagatgaagagcacaagaacaccatgtgcaaagatggtcgatgtccggatatcaataaaaaggtacaaaccggtgatggcatcaataatgatgtcgataccaaaaccgacggtaccacgcagtaa

SEQ ID NO: 459455 - DNA, 942 bp, Shigella boydii
atggcgcactcacactcacacacgtcctcacacctgccagaagataataatgctcgtcgcttgttgtatgctttcggcgtgactgccgggtttatgctggtagaagtcgttggtggttttctttctggttctctggcattgctggccgatgcgggtcatatgttgaccgatactgccgccctgcttttcgccctactcgccgtgcaattttcacgtcgtcctcccaccattcgccacactttcggttggctaagactgaccacgctcgcggcgtttgtgaatgccatcgccctcgtggtaattaccattttgattgtctgggaggcgatagaacgcttccgcacgccgcgtccggtcgagggcggcatgatgatggcaattgccgtggctgggttgctggcaaatatactttctttctggttacttcatcacggcagcgaagagaaaaacctcaacgtacgagcagcggcattgcatgtgctcggggacctgttgggttcggttggggctattattgccgcgttgattattatctggaccggctggacacctgctgaccccattctctcgatagtggtgtcgcttctggttctgcgtagcgcgtggcgactgttgaaagatagcgtgaatgaattacttgaaggtgcaccggtatcgctggatatcgctgaactgaagcgtcgtatgtgccgggaaatcccggaagtccgcaatgtgcaccatgtacatgtatggatggtaggtgagaagccggtgatgacgctgcatgtgcaggtgatcccgccacacgatcacgatgccttgttggatcagatccaacactacctgatggctcactatcagattgagcacgccaccattcagatggaatatcaaccttgtcatgggccagactgccacctgaatgaaggggtgtctggccattcacatcatcaccattaa

SEQ ID NO: 459456 - DNA, 720 bp, Shigella boydii
atggatttttttagtgtgcagaatatcctggtacatataccaataggagcaggcggttatgatctctcatggatcgaagcggtaggcacgatcgccgggttgctgtgtattggccttgccagtctggagaagatcagcaactacttctttggcctgatcaacgtcaccttgtttggcattattttctttcagattcagctgtatgccagcctgctattacaggtgtttttctttgccgcgaatatttacggttggtatgcgtggtcgcgacaaaccagtcagaacgaggcggagttgaaaattcgctggttaccattgccgaaggcgctcagctggttggcggtttgcgttgtttcgattggtctgatgacggtatttatcaatccggtgtttgcatttttgacccgcgtggcagtcatgatcatgcaagcattaggattacaggttgtgatgcctgaactgcaaccggacgctttcccgttctgggattcatgcatgatggtgttatctatcgtggcaatgcttctgatgacgcgtaagtatgtggaaaactggctgttgtgggtgattattaacgtgattagcgtcgttatttttgcacttcagggcgtttacgccatgtctctggagtacatcatcctgacctttattgcgctcaacggcagtcggatgtggatcaacagcgcacgtgaaagaggctcatgcgcgctgtcccattaa

SEQ ID NO: 459457 - DNA, 1044 bp, Shigella boydii
atgagcgtaatgtttgatccagacacggcgatttatcctttccccccgaagccgacgccgttaagcattgatgaaaaagcgtattaccgcgagaagataaaacgtctgctaaaagaacgtaatgcggtgatggttgcccactactataccgatcccgaaattcaacaactggcagaagaaaccggtggctgtatttctgattctctggaaatggcgcgcttcggtgcaaagcatcccgcttctactttgttagtcgctggggtgagatttatgggagaaaccgccaaaattctcagtccggaaaaaacaattctgatgccgacacttcaggctgaatgttcactggatctcggctgccctgttgaagaatttaacgcattttgcgatgcccatcccgatcgtactgtcgtcgtctacgccaacacttctgctgcggtaaaagtgcgcgcagattgggtggtaacttcaagcattgccgtcgaacttattgatcatcttgatagtttgggtgaaaaaatcatctgggcacccgacaaacatctggggcgttacgtgcaaaaacagacgggtggagacattctatgctggcagggtgcctgtattgtgcatgatgaatttaagactcaggcgttaacccgcttgcaagaagaatacccggatgctgccatactggtgcatccagaatcaccacaagctattgtcgatatggcggatgcggtcggttccaccagtcaactgatcgctgctgcgaaaacattgccacatcagaggcttattgtggcaaccgatcggggtattttctacaaaatgcagcaggcggtgccagataaagagttactggaagcaccaaccgcaggtgagggtgcaacctgccgcagctgcgcgcattgtccgtggatggccatgaatggccttcaggccatcgcagaggcattagaacaggaaggaagcaatcacgaggttcatgttgatgaaaggctgcgagagagggcgctggtgccgctcaatcgtatgctggattttgcggctacactacgtggataa

SEQ ID NO: 459458 - DNA, 2598 bp, Shigella boydii
atgggtaaagctcttgtcatcgttgagtccccggcaaaagccaaaacgatcaacaagtatctgggtagtgactacgtggtgaaatccagcgtcggtcacatccgcgatttgccgaccagtggctcagctgccaaaaagagtgccgactctacctccaccaagacggctaaaaagcctaaaaaggatgaacgtggcgctctcgtcaaccgtatgggggttgacccgtggcacaattgggaggcgcactatgaagtgttgcctggtaaagagaaggtcgtctctgaactgaaacaactggctgaaaaagccgaccacatctatctcgcaaccgaccttgaccgcgaaggggaagccattgcatggcacctgcgggaagtgattgggggtgatgatgcgcgctatagccgagtggtgtttaacgaaattactaaaaacgcgatccgccaggcatttaacaaaccgggtgagctgaatattgatcgtgttaatgcccagcaggcgcgtcgctttatggaccgcgtggtggggtatatggtttcgccgctgctatggaaaaagatcgctcgtggtctgtctgccggtcgtgtgcagtcggtggcggttcgcctggtggtcgagcgtgagcgtgaaattaaagcgttcgtgccggaagagttctgggaagtcgatgccagcacgaccacgccatctggtgaagcgttggcgttacaggtgactcatcagaacgacaaaccgttccgtccggtcaacaaagaacaaactcaggctgcggtaagtctgctggaaaaagcgcgctacagcgtgctggaacgtgaagacaaaccgacaaccactaaacctggcgctccttttattacctctacgctgcaacaagctgccagcacccgtcttggatttggcgtgaaaaaaaccatgatgatggcgcagcgtttgtatgaagcaggctatatcacttacatgcgtaccgactccactaacctgagtcaggacgcggtaaatatggttcgcggttatatcagcgataattttggtaagaaatatctgccggaaagtccgaatcagtacgccagcaaagaaaactcacaggaagcgcacgaagcgattcgtccttctgacgtcaatgtgatggcggaatcgctgaaggatatggaagcagatgcgcagaaactgtaccagttaatctggcgtcagttcgtagcctgccagatgaccccagcgaaatatgactccacgacgctgaccgttggtgcgggcgatttccgcctgaaagcacgcggtcgtattttgcgttttgatggctggacaaaagtgatgcctgcgttgcgtaaaggcgatgaagatcgcatcttaccagcagttaataaaggcgatgctctgacgctcgttgaacttacaccagcccagcactttaccaagccgccagcccgtttcagtgaagcatcgctggttaaagagctggaaaaacgcggtatcggtcgtccgtctacctatgcgtcgatcatttcgaccattcaggatcgtggctacgtgcgagtagaaaatcgtcgtttctatgcggaaaaaatgggcgaaatcgtcaccgatcgccttgaagaaaatttccgcgagttaatgaactacgacttcaccgcacagatggaaaacagcctcgaccaggtggcaaatcacgaagcagagtggaaagctgtactggatcacttcttctcggatttcacccagcagttagataaagctgaaaaagatccggaagagggtggtatgcgcccgaaccagatggttctgaccagcattgactgcccgacttgtggtcgcaaaatggggattcgcacagcgagcaccggggtattccttggctgttctggttatgcgctgccgccgaaagagcgttgcaaaaccaccattaacctggtgccggaaaacgaagtgctgaacgtactggaaggcgaagacgctgaaaccaacgcgctgcgcgcaaaacgtcgttgcccgaaatgcggcacggcgatggacagctatctcatcgatccgaaacgtaagttgcatgtctgtggtaataacccaacctgcgacggttacgagatcgaagagggcgaattccgcattaaaggttatgacggcccgatcgttgagtgtgaaaaatgtggctctgaaatgcacctgaaaatggggcgtttcggtaaatacatggcctgcaccaacgaagagtgtaaaaacacacgtaagattttacgtaacggcgaagtggcaccaccgaaagaagatccggtgccattacctgagctgccgtgcgaaaaatcagatgcttatttcgtgctgcgtgacggcgctgcgggtgttttcctggctgccaacactttcccgaaatcgcgtgaaacgcgtgcgccactggtggaagagctttatcgcttccgcgaccgtctgccggaaaaactgcgttatctggccgatgcgccacagcaggatccggaaggtaataagaccatggttcgctttagccgtaaaaccaaacagcaatatgtctcttcggaaaaagacggaaaggcgactggctggtcagcattttatgttgatggcaaatgggttgaaggaaaaaaataa

SEQ ID NO: 459459 - DNA, 252 bp, Shigella boydii
atgaacaaagagacacaacccatcgaccgcgaaacgctgttgaaagaggccaacaaaatcattcgtgagcatgaggatacgctcgcagggattgaagccaccggcgtcacgcagcgtaatggcgtgctggtatttaccggcgactactttttagatgaacaaggattgccaacagccaaaagcaccgcggtgtttaatatgttcaaacacctggcccatgtgctttcagaaaaatatcatctggttgattaa

SEQ ID NO: 459460 - DNA, 1050 bp, Shigella boydii
gtggaattgttgtctgaatatggtttgtttttggcgaaaatcgttaccgttgtgctagcgattgcggcgattgccgccattattgtcaatgttgctcaacgtaataaacgccagcgtggcgagttacgggtcaacaatctcagcgaacagtataaggagatgaaagaagaactggccgcggcgctgatgggctcacatcagcaaaaacagtggcacaaagcgcagaagaaaaagcacaagcaagaagcgaaagcagcaaaagcgaaagccaaactgggcgaggtggcaactgacagtaaacctcgcgtctgggtgctggattttaaaggcagcatggacgcccatgaagtgaactcgctacgtgaagagataacggcggtactcgcagcattcaaaccgcaggatcaggttgtgctccgtctggaaagccctggtggcatggtgcatggttacgggttggcggcttcgcagctgcagcgtctgcgtgataaaaacattcctttaactgttacggtagacaaagtcgctgccagcggcggttacatgatggcctgtgtggcggacaaaattgtttccgcaccgtttgctattgtgggttccattggggtggtggcgcaaatgcccaactttaaccgcttcctgaaaagcaaatatattgatatcgaactgcacactgccgggcagtataagcgtactctgacgttgctgggtgaaaataccgaagaagggcgggagaaattccgcgaagagttgaacgaaacgcatcagttgtttaaagattttgtgaagcgtatgcgtccgtctctggatattgaacaggtggcaacaggtgaacactggtacggacaacaggcggtagagaaaggcctggttgatgaaatcaacaccagtgatgaagttattcttagcctgatggaaggccgtgaagtggttaatgtacgctatatgcagcgtaaacgactcattgaccgattcaccggcagcgcggcagagagcgccgatcgattgttgctacgctggtggcagcggggtcaaaagccattgatgtaa

SEQ ID NO: 459461 - DNA, 759 bp, Shigella boydii
atgcattaccagccaaaacaagatttactcaatgatcgcattatcctggtgacgggagccagcgatgggattggtcgtgaagccgcgatgacgtatgcacgctatggtgcgacagtgattctgttgggccgtaatgaagaaaaattacgtcaggtagccagccacataaacgaagaaactgggcgtcagccacagtggtttattctcgatttgctgacctgcacgtccgaaaattgccaacaactggcacagcgcattgtcgttaattatccgcgtctggatggtgttttgcataatgccggattgctcggcgatatttgcccaatgagcgaacaaaatccgcaggtctggcaggacgtcatgcaggtcaacgttaatgccacctttatgctcacccaggcactgcttcctttattactcaaatcggactccggttcactggtctttacttcatcaagcgttggacgtcagggacgagctaactggggtgcatatgcagcgtcgaaatttgccaccgaagggatgatgcaggtactggccgatgaatatcagcagcgcctgcgcgtcaactgcattaacccaggcggtacgcgcaccgcaatgcgcgcaagcgccttcccgaccgaagatccacagaaacttaaaacacccgctgatatcatgccgctctacctctggctgatgggcgatgacagccgccgtaaaaccggcatgacctttgacgcccaaccgggccgtaaaccaggaatttcccaatga

SEQ ID NO: 459462 - DNA, 540 bp, Shigella boydii
atgctcgtgtggcccaggccccaggatgaacgcggtattatcatcgtctttaccggtaatggaaaaggcaaaaccaccgcggcatttggtacggcaacacgcgcagttggtcacggaaaaaaagtgggcgtcgtgcagtttattaaaggcacctggcctaatggcgaacgcaatctgctggaaccacatggcgttgagtttcaggtgatggcaacgggctttacctgggatacacaaaaccgcgagtctgataccgccgcctgccgcgaagtctggcaacatgcaaagcggatgcttgctgattcctcactggatatggttttgcttgatgaactgacgtatatggtggcgtatgactatttgccactggaagaagtggtgcaggcgttaaatgaacgtccacatcaacagacggtgattatcacgggtcgaggctgtcatcgggatattcttgaactagcggatacggtaagtgagctgcgccccatcaaacatgcgtttgatgccggtgttaaggcgcaaatagggattgattattaa

SEQ ID NO: 459463 - DNA, 873 bp, Shigella boydii
atgagcgaaaaattacagaaagtgctggcccgcgctggccacggctcccgccgtgaaatcgaatctattattgaagccggtcgtgtgagtgttgatggcaaaattgctaaactcggcgatcgcgttgaagttacccctgggctgaaaattcgtatcgatggtcatctgatttcggtacgtgagtccgctgaacaaatttgtcgcgttctggcctattacaaaccggaaggtgagttgtgtacccgtaacgatccggaagggcgtccgacggtgtttgaccgtctgccaaagctgcgtggcgcacgctggattgccgtaggtcgtctggacgttaacacctgtggtctgctgctgttcaccaccgatggtgaactggcaaaccgtttaatgcatccaagccgtgaagttgaacgtgaatacgccgtgcgtgtatttggtcaggttgacgacgcgaaactgcgtgatttgagtcgtggcgtgcaactggaagatggtccggcagcttttaaaatcatcaagttcagcggcggcgaagggatcaaccagtggtacaacgtgactctgaccgaaggccgtaaccgtgaagttcgtcgtctgtgggaagcggttggtgtgcaggtgagccgcctgatccgtgttcgttacggtgatatcccactgccaaaaggtctgccacgcggtggctggacggagctggacctcgcccagactaactatctgcgcgaactggtggagcttccgccagaaaccagctctaaagtcgctgtagaaaaagaccgtcgtcgcatgaaggctaatcagattcgtcgtgcggtgaaacgtcacagtcaggtgagcggcggtcgtcgttctggcgggcgtaataacggttaa

SEQ ID NO: 459464 - DNA, 1896 bp, Shigella boydii
atggcagggaagtttcgctgcattttgctgttgatagcagggctgtttgtatcatctctaagttatgcagaaaacccggagatcccttcttatgaagaagggatctcgctctttgatgttgaagccactctgcaaccggatggggtgctcgacatcaaagaaaatattcattttcaggcgcgaaatcagcagattaagcacggattttatcgtgatttaccacgactctggatgcagcctgatggggacgctgcactgctgaactatcatattgttggcgtcactcgtgatggtattcctgaaccctggcatcttgactggcatatcgggttaatgagtattgtcgtgggcgataaacaacgtttcttgcctcaaggcgactatcattatcaaattcattatcaggttaaaaatgctttcctgcgtgagggagattcagatctgttaatctggaacgtgactggtaaccactggccgtttgaaatctataagacccgattttcactcaagttccctgatatcgcgggtaatccatttagcgaaatcgatctctttactggagaagagggcgacacatatcgaaatggccgcatccttgaggacggaagaattgaatcccgcgatccgttttatcgagaagatttcacggtactctaccgctggcctcacgcgttacttagcaatgccccggctccacaaacgacgaatattttcagccatcttcttttaccctccacgtcatcgttgttaatttggtttccgtgtctattcctggtttgtggatggttatatctctggaagcgcaggccgcaatttacgccggtagatgtgattgaaaccgatgtcattccgccagattacacgcccggcatgttacgtctcgatgcgaagctggtttacgacgataaaggtttctgtgccgatatcgtaaatctgatcgtgaagggaaaaattcatctggaagatcagtatgataagaaccagcaaatcctgatttgtgttaatgaaggcgcgaccagaaataatgaggtattactgcccgcagagcagttattactggaagcgttatttcgtaaaggcgataaggtcgttcttacggggagacgcaacagagtcttacgcagggcatttttacggatgcagaaattttatctgccgcgtaaaaagtctttgttttaccggcctgatacgtttttgcaatggggtggactggcaatattggcgatcattctctacggtaacctgagtcccgtaggttgggcaggaatgagtctggtaggcgatatgtttattatgatctgctggattattccttttttattttgttcccttgagcttttgtttgcccgcgatgatgacaagccttgcgttaatcgtgcaatcatcactttgtttttaccactgatttgttcaggcgtggccttctattctctctatatcaatgtcggagatgtattcttttactggtatatgccagcgggttattttagcgctgtttgcctgaccggttatctcactggcatggggtatatttttctgccaaagtttacccaaactgggcagcaacgttatgcccgcggtgaagctatcgttaactatcttgcgcgtaaagaggcagcaacacacagtggacgtcggcggaaaggggaaacacggaaactggattacgcgttgctaggttgggctatatcggcaaatttggggagggaatgggcgttacgcattgccccttcgctttcttcggcgattcgcgctccagagattgcccgtaacggcgttttattctcattacagacgcacctaagttgcggggccaataccagtttgttggggcgaagttattccggtggtggtgctggcggcggcgcgggtggcggaggcggtggtggctggtaa

SEQ ID NO: 459465 - DNA, 621 bp, Shigella boydii
atgagccagtttttttatattcatcctgataacccgcagcaacgtctgatcaaccaggcggtggagatcgtgcgtaaaggcggggtgattgtttatccaactgattccggctatgcgctcggctgtaaaattgaagataaaaacgcgatggagcgtatttgtcgtattcgccagctgccggacggtcacaactttaccctgatgtgtcgcgatctttctgaactttcgacctattcattcgtggataacgttgcgtttcgtttaatgaaaaacaacacgccgggcaactataccttcatcctgaaggggacgaaggaggtgccacgccgtctgttgcaggaaaaacgcaaaaccatcggtatgcgtgtgccttctaacccgattgcgcaggcgttgcttgaagcactgggcgaaccgatgctttccacttcgctaatgctgccaggcagcgaatttaccgaatccgatccagaagaaattaaagaccgtctggaaaaacaggtggatttgattatccacggcggctatctcggacagaaaccgacaacggtcattgatcttaccgatgatacgccggtcgtggtgcgtgaaggcgtgggtgatgtgaagcctttcttataa

SEQ ID NO: 459466 - DNA, 882 bp, Shigella boydii
ttgagcgacacgaattacgcagtgatttacgacctgcacagccataccacagcttccgatggctgcctgacgccagaagcattggtgcaccgtgcagtcgagatgcgcgtcggcaccctggcgatcaccgaccatgacaccacagctgcaatcgcgccagcaagagaggaaatttcacgttcgggactggcgctgaatcttattcccggcgtggaaatttccacggtctgggaaaatcatgaaattcatattgtcgggctgaatattgatattactcatccgctaatgtgtgagttcctcgcgcagcagacagaacggcgcaatcagcgggcgcagcaaattgccgaaagacttgaaaaagcgcaaatacctggggcgctggaaggcgcacaacgactggcgcagggcggcgcagtgacgcgcggtcattttgcgcgtttccttgttgagtgcggcaaagccagttcaatggcagatgtctttaaaaagtatctggcgcgcgggaaaaccggatacgtttcgccacagtggtgtacaatagaacaagctattgatgtcattcatcattctggcggtaaggcggtgctagctcatcctgggcggtacaatcttagtgctaaatggctgaaaagattggttgcgcattttgccgaacaccacggcgacgcgatggaagtcgcgcagtgccagcaatcgcccaatgaacgcacccagttgacgacacttgcgcgtcagcatcatttatgggcatcacaaggatctgattttcatcagccatgcccgtggatcgaactgggtcgtaaactctggctgcccgcaggcgttgaaggcgtctggcagctatgggaacagccgcagaacaccacagagagggaattatga

SEQ ID NO: 459467 - DNA, 1563 bp, Shigella boydii
atgcaaacacaaaaaccgactctcgaactgctaacctgcgaaggcgcttatcgcgacaacccgactgcgctttttcaccagttgtgtggggatcgtccggcaacgctgctgctggaatccgcagatatcgacagcaaagatgatttaaaaagcctgctactggtagacagtgcgctgcgcattacagcattaggtgacactgtcacaattcaggcactttccggcaacggcgaagccctgctgacactactggataacgccctgcctgcgggtgtggaaaatgaacaatcaccaaactgccgtgtgctgcgcttcccccctgtcagtccactgctggatgaagacgctcgcttatgctccctttcggtttttgacgctttccgtttattgcagaatctgttgaatgtaccgaaggaagaacgagaagcaatgttcttcggcggcctgttctcttatgaccttgtggcgggatttgaagatttaccgcaactgtcagcggaaaataactgccctgatttctgtttttatctcgctgaaacgctgatggtgattgaccatcagaaaaaaaacacccgcattcaggccagcctgtttgctccgaatgaagaagaaaaacaacgtctcactgctcgcctgaacgatcttcgccagcagctgaccgaagccgcgccgccgctgccggtggtttccgtgccgcatatgcgttgtgaatgtaaccagagcgatgaagagttcggtggcgtggtgcgtttgttgcaaaaagcgattcgcaccggagaaattttccaggtggtgccgtctcgccgtttctctctgccctgcccgtcaccgctggcggcctattacgtgctgaaaaagagtaatcccagcccgtacatgttttttatgcaggataatgatttcaccctgtttggcgcgtcgccggaaagttcgctcaagtatgacgccaccagccgccagattgagatctacccgattgccggaacacgcccgcgcggtcgtcgcgccgatggttcactggacagagacctcgacagccgcatcgaactggaaatgcgtaccgatcataaagagctttctgaacatctgatgctggtggatctcgcccgtaatgatctggcacgcatttgcacccccggcagccgctacgtcgccgatcttaccaaagttgaccgttactcttacgtgatgcacctggtctcccgcgtggtcggtgagctgcgccacgatctcgacgccctgcacgcttaccgcgcctgtatgaatatggggacgttaagcggtgcgccgaaagtacgcgccatgcagttaattgccgaggcggaaggtcgtcgccgcggcagctacggcggcgcggtaggttatttcaccgcgcatggcgatctcgacacctgcattgtgatccgctcagcgctggtggaaaacggtatcgccaccgtgcaagccggtgctggcatagtccttgattctgttccgcagtcggaagccgacgaaacccgtaataaagcccgcgctgtactgcgcgctattgccaccgcgcatcatgcacaggaaactttctga

SEQ ID NO: 459468 - DNA, 1596 bp, Shigella boydii
atggctgacattctgctgctcgataatatcgactcttttacgtacaacctggcagatcagttgcgcagcaatgggcataatgtggtgatttaccgcaaccatattccggcgcagaccttaattgaacgcctggcgacgatgagcaatccggtgctgatgctttctcctggccccggtgtgccgagcgaagccggttgtatgccggaactcctcacccgcttgcgtggcaagctgcccattattggcatttgcctcggacatcaggcgattgtcgaagcttacgggggctatgtcggtcaggcgggcgaaattctccacggtaaagcctccagcattgaacacgacggtcaggcgatgtttgccggattaacaaacccgctaccagtggcgcgttatcactcgctggttggcagtaacattccggccggtttaaccatcaacgcccattttaatggcatggtgatggcagtacgtcacgatgcggatcgcgtttgtggattccagttccatccggaatccattcttactacccagggcgctcgcctgctggaacaaacgctggcctgggcgcagcggaaactagagccaaccaacacgctgcaaccgattctggaaaaactgtatcaggcgcagacgcttagccagcaagaaagccaccagctgttttcagcagtggtacgtggcgaactgaaaccggaacaactggcggcggcgctggtgagcatgaaaattcgcggcgagcacccgaacgagatcgccggagcagcaaccgcgttactggaaaacgccgcgccgttcccgcgcccggattatctgtttgccgatatcgtcggcaccggtggtgacggcagtaacagcatcaatatttccaccgccagtgcgtttgtcgccgcggcctgtgggctgaaagtggcgaaacacggcaaccgtagcgtctccagtaaatctggttcgtccgatctgctggcggcgttcggtattaatcttgatatgaatgccgataaatcgcgccaagcgctggatgagttaggcgtatgtttcctctttgcgccgaaatatcacaccggatttcgccatgcgatgccggttcgccagcaactgaaaacccgcactctgttcaacgtgctgggaccattgattaacccggcgcatccgccgctggcgttaattggtgtttatagtccggaactggtgctgccgattgccgaaaccttgcgcgtgctggggtatcaacgcgcggcggtagtgcacagcggcggtatggatgaagtttcattacacgcgccgacaatcgttgccgaactgcatgacggtgaaattaagagctatcagctaactgcagaagattttggcctgacaccctaccaccaggagcaactggcaggcggaacaccggaagaaaaccgtgacattttaacacgcttgttacaaggtaaaggcgacgccgctcacgaagcagccgtcgcggcgaatgtcgccatgttaatgcgcctgcatggccatgaagatctgcaagccaatgcgcaaaccgttcttgaggtactgcgcagtggttccgcttacgacagagttaccgcactggcggcacgagggtaa

SEQ ID NO: 459469 - DNA, 1194 bp, Shigella boydii
atgacaacattacttaacccctattttggtgagtttggcggcatgtacgtgccacaaatcctgatgcctgctctgcgccagctggaagaagcttttgtcagcgcgcaaaaagatcctgaatttcaggctcagttcaacgacctgctgaaaaactatgccgggcgtccaaccgcgctgaccaaatgccagaacattacggctgggacgaacaccacgctgtatctgaagcgcgaagatttgctgcacggcggcgcgcataaaactaaccaggtgctcggtcaggctttactggcgaagcggatgggtaaaaccgaaatcatcgccgaaaccggtgccggtcagcatggcgtggcgtcggcccttgccagcgccctgctcggcctgaaatgccgtatttatatgggtgccaaagacgttgaacgccagtcgcctaacgtttttcgtatgcgcttaatgggtgcggaagtgatcccggtacatagcggttccgcgacgctgaaagatgcctgtaacgaggcgctgcgcgactggtccggcagttatgaaaccgcgcactatatgctgggcaccgcagctggcccacatccttatccgaccattgtgtgtgagtttcagcggatgattggcgaagaaacgaaagcgcagattctggaaagagaaggtcgcctgccggatgccgttatcgcctgtgttggcggcggttcgaatgccatcggcatgtttgcagatttcatcaacgaaaccaacgtcggcctgattggtgtggagccgggtggtcacggtatcgaaactggcgagcacggcgcaccgctaaaacatggtcgcgtgggcatttatttcggtatgaaagcgccgatgatgcaaaccgaagacgggcagattgaagaatcttactccatctccgccggactggatttcccgtctgtcggcccacaacacgcgtatcttaacagcactggacgcgctgattacgtgtctattaccgatgatgaagcccttgaagccttcaaaacgctgtgcctgcacgaagggattatcccggcgctggagtcttcccacgccctggcccatgcgctgaaaatgatgcgcgaaaccccggaaaaagagcagctactggtggttaacctttccggtcgcggcgataaagacatcttcaccgttcacgatattttgaaagcacgaggggaaatctga

SEQ ID NO: 459470 - DNA, 807 bp, Shigella boydii
atggaacgctacgaatctctgtttgcccagttgaaggagcgcaaagaaggcgcattcgttcctttcgtcacgctcggggatccgggcattgagcagtcattgaaaattatcgatacgctaattgaagccggtgctgacgcgctggagttaggtatccccttctccgacccactggcggatggcccgaccattcaaaacgccactctgcgcgcctttgcggcaggtgtgactccggcacaatgttttgaaatgctggcactgattcgccagaaacacccgaccattcccattggcctgttgatgtatgccaatctggtgtttaacaaaggcattgatgagttttatgcccagtgcgagaaagtcggcgtcgattcggtgctggttgccgatgtgccagttgaagagtccgcgcccttccgccaggccgcgttgcgccataatgtcgcacctatcttcatctgcccgccaaatgccgatgacgacctgctgcgccagatagcctcttacggtcgtggttacacctatttgctgtcacgagcgggcgtgaccggcgcagaaaaccgcgccgcgttacccctcaatcatctggttgcgaagctgaaagagtacaacgctgcacctccattgcaggggtttggtatttccgccccggatcaggtaaaagcagcgattgatgcaggagctgcgggcgcgatttctggttcggccattgttaaaatcatcgagcaacatattaatgagccagagaaaatgctggcggcactgaaagtttttgtacaaccgatgaaagcggcgacgagcagttaa

SEQ ID NO: 459471 - DNA, 1590 bp, Shigella boydii
atgcaacaacgtcgtccagtccgccgcgctctgctcagtgtttctgacaaagccggtatcgtcgaattcgcccaggcactttccgcacgcggtgtggagctgctgtctacagggggcactgcccgtctgttagcagaaaaaggtctgccggtaaccgaagtttccgattacaccggtttcccggagatgatggatggacgcgtgaagaccctgcatccgaaagtacatggtggcattctgggccgtcgcggccaggacgatgccattatggaagaacatcagatccagcctatcgatatggtggttgttaacctgtatccgttcgcccagactgttgctcgtgaaggctgctcgctggaagatgcggttgagaacatcgatatcggcggcccgaccatggtgcgctccgccgctaagaaccataaagatgtcgcaatcgtggtgaagagcagcgactacgacgccattattaaagagatggatgacaacgaaggatcgctgacgcttgcaacccgtttcgacctcgccatcaaagccttcgaacacactgccgcctacgacagcatgattgccaactacttcggcagcatggttccggcgtaccacggtgaaagcaaagaagccgccggtcgcttcccacgcacgctgaacctgaacttcattaagaagcaggatatgcgttacggcgagaacagccaccagcaggctgccttctatatagaagagaatgtgaaagaagcctccgttgctaccgcaacccaggttcagggtaaagccctctcttataacaacatcgccgataccgatgcggcgctggagtgcgtgaaagagttcgccgagccggcatgtgtgattgtgaagcacgccaacccttgcggtgtagctatcggcaattccattcttgatgcttacgatcgcgcgtacaaaaccgacccaacctccgcattcggcggcatcattgcctttaaccgcgagctagatgcggaaaccgcacaggccatcatttctcgtcagtttgtcgaagtgattattgcgccttccgccagcgaagaagccctgaaaatcaccgccgccaagcagaacgtacgcgttctgacctgcggtcagtggggcgagcgtgttccgggtcttgatttcaaacgcgtgaacggcggtctgctggttcaggatcgtgacctggggatggtcggtgcggaagaactgcgcgtcgtcacccaacgtcagccgaccgaacaggaactgcgcgatgcgctgttctgctggaaagtggcgaagttcgtgaaatccaatgctatcgtctatgccaaaaacaatatgaccatcggtattggcgcgggccagatgagccgcgtgtactccgcgaaaatcgccggtattaaagctgccgatgaaggcctggaagtgaaaggttcctcgatggcttctgacgcgttcttcccgttccgcgacggtattgatgccgccgccgctgcgggcgtgacctgcgtaatccagcctggcggttccatccgtgatgacgaagtgattgccgccgccgacgagcacggtattgcgatgctcttcaccgacatgcgccacttccgccattaa

SEQ ID NO: 459472 - DNA, 1290 bp, Shigella boydii
atgaaagtattagtgattggtaacggcgggcgcgagcacgcgctggcctggaaagcggcccagtcgccgctggttgagactgtttttgttgctccgggtaatgcaggcactgcgctggaacccgcgctgcaaaacgttgctattggcgtgaccgatatcccggcgctgttggatttcgcacaaaacgaaaagattgatctgaccatcgtcggcccggaagcgccgctggtgaaaggcgtggtcgataccttccgcgccgccgggctgaaaatcttcggcccaaccgcaggtgcggcccaactggaaggctcaaaagcgtttaccaaagatttcctggcccgccataagatccctacggcggaataccagaacttcaccgaggtagaacctgcgctggcgtatctgcgtgagaaaggcgcgccaatcgtcattaaagcggacggtctggctgccgggaaaggcgttatcgtggcgatgacgctggaagaagcggaagcggctgttcacgatatgctggcgggcaacgcttttggcgacgcgggtcatcgcatcgttatcgaagagttcctcgacggcgaagaagcgagctttatcgtgatggtggacggcgagcatgtgctgccgatggctaccagccaggatcacaaacgcgtaggcgataaagataccggaccaaacaccggcgggatgggcgcttactcccccgcgccggtagtaaccgatgacgttcatcagcgcaccatggaacgtattatctggccaaccgtgaaaggcatggcggcggaaggcaacacctacaccggttttctctacgcgggcctgatgatcgacaaacagggcaatccgaaggttattgaatttaactgccgctttggcgatccggaaacccagccgattatgctgcgcatgaagtccgatctggttgagctctgcctagcggcctgtgaaagcaaactggacgagaaaacgtccgagtgggatgaacgcgcttctctcggcgtggtgatggctgcgggtggatatccgggtgattaccgcaccggtgacgtgatccacggcctgccgctggaagaagtggcaggcggcaaagtgttccacgcgggcacaaaactggcggatgacgagcaggtagtgaccaacggcgggcgcgtactgtgcgtcaccgcgctgggtcataccgtggcagaagcgcagaaacgcgcctatgccttaatgaccgatatccactgggacgactgcttctgccggaaagatatcggctggcgtgctatcgaacgcgagcagaactaa

SEQ ID NO: 459473 - DNA, 1326 bp, Shigella boydii
atgacgcacgataatatcgatattctggtggtggatgatgacattagccactgcactattttgcaggctttactgcgcggctggggctataacgtcgcgctggcgaacagcgggcgacaggcgctggagcaggtgcgggaacaggtttttgatcttgtgctttgcgatgtgcgaatggcggagatggacggcatcgccacgctgaaagagatcaaagcgttaaacccggcaattccggtgctgattatgactgcgtactccagcgtcgagacggcggtagaggcactgaaaactggggcgctggattatctcatcaagccgctggatttcgataacctacaggcgacgctggaaaaggcgctcgcgcatacgcacagtattgatgctgaaacacctgcggtgactgccagccagttcggtatggtcggtaaaagcccggcgatgcaacacctgctcagtgaaatcgccctcgtcgcgccatcggaagccactgtgctgatccacggcgattccggcaccggtaaagagctggtcgccagggcgattcacgccagtagcgcacgtagcgaaaaaccgctggtaacgctcaactgtgcggcactcaacgaatccttgctggaatctgaattgttcggtcacgaaaaaggggcgtttactggagccgataaacgccgggaagggcgctttgttgaggcggacggcggcacgctgtttctcgatgaaattggcgatatctcgccgatgatgcaggtgcgtctgctgcgtgcgattcaggagcgcgaagttcagcgtgtcggtagcaaccagactatctcggttgatgtccggctgattgcggcgacccatcgcgatcttgccgcagaggtgaatgccgggcgttttcgccaggatctctactatcgcctgaatgtggtggcgattgaagtaccatcgctgcggcaacggcgggaagatatccctctgctggctggccattttctgcagcgctttgccgagcgtaatcgcaaggcggtaaaaggttttactccccaggcgatggatctgttgattcattacgactggccgggaaatattcgtgagctggaaaacgcggtggaacgggcagtggtgctgctgaccggggaatatatttccgaacgcgagctgccgctggcgattgccagtacgccgatcccgctggggcaaagtcaggatattcagccgctggtggaagtggaaaaagaggtgattctggcggcactggagaaaacgggcggcaacaaaactgaagccgcccgtcagttagggatcacgcgtaaaacgttattggcaaaactgtcgcgttag

SEQ ID NO: 459474 - DNA, 1377 bp, Shigella boydii
atgcgttttatgcaacgttctaaagactccttagctaaatggttaagcgcgatcctccccgtggtcattgttgggctggtagggttgtttgcggtgacggtgattcgcgattatgggcgcgagactgccgccgccagacaaacgctgctggaaaaaggcagtgtacttattcgcgctcttgaatccggctcgcgcgtcggcatggggatgcgcatgcatcatgcgcagcagcaggccttactggaagaaatggccgggcagcctggagtacgttggtttgcggtcacggatgaacaaggaacaatcgtgatgcatagcaactccggcatggtgggaaaacagatttattccccgcaggaaatgcagcagttacatccgggagatgaagaagcgtggcggcggatcgatagcgcagacggtgagcctgttctggaaatttatcgccagtttcaaccgatgtttggtgctggaatgcaccggatgcgccatatgcagcagtatgccgcgacaccacaagcaattttcatcgctttcgacgccagtaatattgtgagtgccgaagatcgtgagcagagaaacaccctgattatcctcttcgccctggcgacggtcttgctggcaagcgtattgtcattcttctggtatcgccgctatctgcgctcgcgccagcttctacaagatgaaatgaagcgcaaagagaagctggtggcactggggcatctggcggcaggcgttgcccacgaaatccgtaatccactttcctcaattaaagggctggcgaaatactttgccgaacgcgcgccagcagggggagaagcgcatcaactggcgcaggtgatggcgaaagaagccgaccgtttaaaccgcgtggtaagcgagttgctggaactggttaagccaacgcatctggctttgcaggcggtggatctcaacacgctgattaaccactcattacagctggtaagccaggatgcaaacagccgggagatccagttacgctttaccgccaacgacacattaccggaaattcaggccgatccggacaggctgactcaggtcctgttgaatctctatctcaatgctattcaggcgattgttcagcatggcgtgattagcgtgacggtcagcgaaagcggcgcgggcgtgaaaatcagcgttaccgacagcggtaagggaattgcggcagatcagcttgaagccatcttcactccgtacttcaccaccaaagccgaaggcaccggattggggctggcggtcgtgcataatattgttgaacaacacggtggtacaattcaggtcgcaagccaggagggaaaaggctcaacgttcaccctctggcttccggtcaatattacgcgtaaggacccacaaggatga

SEQ ID NO: 459475 - DNA, 129 bp, Shigella boydii
atgactcgctacccgcagcaggcgagtcatttttactcgtttatcatgccagattacccgtcatatcagcgtttcatcgttggcacggaagatgcaatacccgaagtaagacaaccactggaggattaa

SEQ ID NO: 459476 - DNA, 426 bp, Shigella boydii
atgaaacggaacacgaaaattgccctggtaatgatggcgctttcagcaatggcgatgggatcgacatctgcatttgctcacggcggacacggtatgtggcagcaaaatgccgcgcctttgaccagcgaacaacagacagcgtggcagaaaatccataatgacttttacgctcaaagcagcgcactgcaacagcaactggtgacgaagcgttatgaatacaatgccctgttagccgcgaacccaccggatagcagcaaaattaacgcggtcgccaaagagatggagaatttgcgtcagtcgttagatgagttacgggtgaaacgagatatcgcgatggctgaagcgggtattccgcgcggagccggaatgggcatgggctacggcggctgcggtggtggcggtcatatgggtatgggccactggtaa

SEQ ID NO: 459477 - DNA, 636 bp, Shigella boydii
atgctggctggcgctctgcttctcactgcctgtagtcataactcttcacttcctccctttaccgccagtggatttgctgaagaccagggcgcggtacgcatctggcgaaaagacagcggcgataatgtgcatctgcttgccgtgtttagcccgtggcgcagtggcgataccacgacgcgagagtatcgctggcagggcgataacctcacgctcatcaatatcaatgtttacagcaaaccgccggtgaatattcgcgcgcgttttgacgatcgcggtgatctgagctttatgcaacgtgaatccgatggggaaaagcagcagctttctaacgaccaaatcgatttataccgttatcgtgctgatcagatccgccagattagcgatgccttacgtcaggggagagtcgtgctgcgccaggggcgctggcatgcgatggaacagaccgtgaccacctgcgaagggcaaaccattaaacctgatttagattcgcaggcgatagcgcatatcgagcgccgccagagccgctcttctgttgatgtcagcgtggcatggctggaagcgcccgaaggttcgcaattactgttagtggcaaactctgatttctgtcgctggcaacccaacgagaaaacgttctga

SEQ ID NO: 459478 - DNA, 273 bp, Shigella boydii; identical to SEQ ID NO: 4387

SEQ ID NO: 459479 - DNA, 591 bp, Shigella boydii
atgttacaaaacccaattcatctgcgtctggagcgcctggaaagctggcagcatgtcactttcatggcttgcttatgcgaacgcatgtaccccaattacgccatgttctgccagcaaaccggttttggtgatgggcaaatttaccgtcgtattctcgatctcatctgggaaacgctgaccgttaaagacgcaaaagtaaatttcgacagccaactggagaaatttgaagaagcgattccttcagccgacgatttcgatctgtacggcgtttatccggcaatcgatgcctgcgtggcgttaagtgaactggtccattcgcgtttgagtggtgaaacgctcgaacacgcggtgaaagtgagtaagacctccatcacgaccgttgcgatgctggaaatgactcaggttggtcgcgaaatgagcgatgaagagcttaaagaaaacccagctgtagagcaagaatgggacattcagtgggaaatattccgacttttagctgagtgcgaagaacgcgatatcgagctgataaaaggccttagggcagacctgcgtgaggcgggtgagagcaatattggtataatttttcagcaataa

SEQ ID NO: 459480 - DNA, 672 bp, Shigella boydii
atggatctcgcgtcattacgcgctcaacaaatcgaactggcttcttctgtgatccgcgaggatcgactcgataaagatccaccggatctgatcgccggagccgatgtcgggtttgagcagggcggagaagtgacgcgagcggcgatggtgctgctgaaatatccctcgcttgagctggtggagtataaagttgcccgcatcgccaccaccatgccttacattccaggttttctttccttccgcgaatatcctgcgctgctggcagcgtgggagatgctgtcgcaaaagccggatttagtgtttgtcgatggtcatgggatctcgcatcctcgccgtcttggcgtcgccagccattttggtttgatggtggatgtgccaacgatcggcgtggcgaaaaaacggctctgcggtaaattcgaaccgctctccagcgaaccgggcgcgctggccccactgatggataaaggcgagcagctggcctgggtctggcgcagcaaagcgcgctgtaacccgttgtttatcgctaccggccatcgggtcagcgtggacagcgcgctggcgtgggtacaacgctgcatgaaaggctatcgtctgccggagccaacgcgctgggcggacgcggtggcctcggaacgtccggcgttcgtgcgctatacagcaaatcagccctaa

SEQ ID NO: 459481 - DNA, 1065 bp, Shigella boydii
atgaccgaacttaaaaacgatcgttatctgcgggcgctgctgcgccagcccgttgatgtcactccagtatggatgatgcgccaggcgggtcgctatctaccggaatataaagccacgcgcgcccaggcgggcgattttatgtcgctgtgcaaaaacgccgagctggcgtgcgaagtgactttgcaaccgctgcgtcgctacccgctggatgcggcgatcctcttttccgatatcctcaccgtgccggacgcgatggggttagggctctattttgaagccggagaaggtccgcgttttacctcgccagtcacctgcaaagccgacgtcgataagctgccaattccggacccggaagatgagctgggttacgtgatgaacgcggtgcgtaccattcgtcgcgaactgaaaggcgaagtgccgctgattggtttttccggcagcccgtggacgctggcaacctacatggtggaaggcggcagcagcaaagccttcaccgtgatcaaaaaaatgatgtatgccgatccgcaggcgctgcacgctctactcgataaactggcgaaaagcgtcactttgtatctgaatgcgcagattaaagccggtgctcaggcagtgatgattttcgacacctggggcggtgtgcttaccgggcgcgattatcaacagttctcgctctattacatgcataaaattgttgatggtttactgcgtgaaaacgacggtcgccgcgtaccggtcacgctgtttaccaaaggcggcggacagtggctggaagcgatggcagaaaccggttgcgatgcgttgggcctcgactggacaacggatatcgccgatgcgcgccgccgtgtgggcaataaagtcgcgttgcagggtaatatggatccgtcgatgctgtacgcgccgcctgcccgcattgaagaagaagtagcgactatacttgcaggtttcggtcacggcgaaggtcatgtctttaaccttggtcacggcattcatcaggatgtgccgccagaacatgctggcgtgttcgtggaggcagtgcatcgactgtctgaacaatatcaccgctaa

SEQ ID NO: 459482 - DNA, 774 bp, Shigella boydii
atggatcgtataattgaaaaattagatcacggctggtgggtcgtcagccatgaacaaaaattatggttgccgaagggagaattgccatatggcgaagcggcaaatttcgatcttgtgggtcagcgcgcactacaaatcggcgaatggcagggggaacctgtttggttagtacaacagcagcggcgtcacgatatggggtcggtacgtcaggtcattgatctcgatgttgtgctgtttcaactggccggacgaggcgtacaactggcggagttttaccgatcgcataaatactgtggttactgcgggcatgaaatgtatccgagcaaaaccgaatgggcgatgctgtgcagccattgccgtgagcgttactacccgcaaatcgccccctgcattattgttgccatccgtcgcgatgattcgatcctcctcgcccagcatacccgccatcgtaacggtgtccatacagtacttgccggattcgtcgaagtgggcgaaaccctcgagcaggcagtcgcgcgggaagtgatggaagagagcggaattaaagttaaaaacttgcgttacgtgacttctcagccgtggccgtttcctcagtctttaatgaccgcgtttatggcggaatatgacagcggcgacatcgtgatcgacccgaaagaattgctcgaggcgaactggtatcgctatgacgatttgccgttactcccgccgcccggcaccgtagcgcgccgtctgatagaagatactgtggcgatgtgtcgggcagagtatgagtga

SEQ ID NO: 459483 - DNA, 477 bp, Shigella boydii
atgcttaaccagctcgataacctgacggagcgcgtcagaggaagtaacaaactggttgatcgctggctacatgtacgtaagcatctgctcgtggcttactacaatctggttggcattaagcctggcaaagaatcgtacatgaggctaaacgaaaaagcccttgatgatttttgtcagagcctggtcgattacttgtctgccggacatttcagtatttatgagcgcattcttcataagctggaaggcaacgggcaactcgcgcgcgccgcgaagatttggccgcaactcgaagccaatacccaacagattatggattactacgattccagcctggaaaccgccatcgatcatgataattaccttgagtttcaacaggttttatctgacatcggcgaggcgctggaagcgcgctttgtgctggaagataagctgattctgctggtgcttgacgccgcccgcgtcaaacatcctgcttga

SEQ ID NO: 459484 - DNA, 1896 bp, Shigella boydii
atgtctgcaataaaactgacccgccgcgaacaacgcgcccgggcccaacattttatcgacaccctggaaggcaccgcctttcccaactcaaaacgcatttacctcactggcacacactctggcgttcgcgtgccgatgcgtgagatccagcttagcccgacgctaatcggcggcagcaaagaacagccgcagtttgaagaaaacgaagcgattccggtctacgacacctccggcccatatggcgatccgcagatcgccattaacgtgcagcaagggctggcaaaactacgccagccgtggatcgatgcgcgcggcgataccgaagaacttaccgtgcgcagttccgattacactaaagcgcggctggcagatgatggcctcgacgaactgcgttttagcggcgtactaacaccaaaacgcgccaaagcaggacgccgtgtcacccaactgcactacgcccgccagggcatcatcacaccggaaatggaattcatcgccatccgcgagaatatgggccgcgagcgcatacgtagcgaagttttacgccaccagcatccgggaatgagctttggcgcacgtctgccggaaaatatcactgcggaatttgtccgtgatgaagttgctgccggacgtgcgattatcccggccaacattaatcatccggaatcggagccgatgattattggccgtaacttcctggtaaaagttaacgccaatatcggcaactcggcggtcacctcttccatcgaagaagaagtggaaaagctggtatggtccatgcgctggggagcggatacggtgatggatctctccaccggtcgctatattcacgaaacccgcgagtggattttgcgtaacagtccggtgccgatcggtacagtgccgatctaccaggcgctggagaaggttaacgggatcgccgaagatcttacctgggaagcgttccgcgacacgctgctggaacaggccgagcaaggtgtggattacttcactatccatgcgggcgtactgttgcgctatgtgccgatgaccgcgaaacgcctgaccggtatcgtctctcgcggcggttcgattatggcgaaatggtgcctctcccatcatcaggaaaatttcctctatcaacacttccgcgaaatttgtgaaatctgtgccgcttatgacgtttcgctgtcgctgggcgacggtctgcgccccggttctattcaggacgccaacgatgaagcgcagtttgccgagctgcatacgctgggcgaactgaccaaaattgcctgggaatatgacgtgcaggtgatgattgaaggcccaggccacgtgccgatgcagatgatccgccgcaatatgaccgaggagttagagcactgccacgaagcgccgttttacactctggggccgctaactaccgatattgcgccgggctatgaccacttcacgtcggggattggtgcgtcgatgattggctggtttggctgcgcgatgctctgttacgtaacgccaaaagagcatctgggtctgcctaataaagaagatgttaagcaggggcttatcacctataagattgccgcccacgccgctgacctggcgaaagggcatccgggcgcgcaaattcgcgataacgccatgtcgaaagcccgcttcgaatttcgctgggaagaccagtttaatctggccctcgacccgtttaccgcccgcgcttatcacgatgaaaccctgccgcaagagtcaggtaaagtcgcccatttttgctccatgtgtgggccgaaattctgctcgatgaaaatcagccaggaagtgcgtgattacgccgccacgcaaactattgaaatgggaatggcggatatgtcggagaacttccgtgccagaggcggagaaatctacctgcgtaaggaggaagcgtga

SEQ ID NO: 459485 - DNA, 636 bp, Shigella boydii
atgtatcagcctgattttcctcctgtaccttttcgtttaggactgtacccagtggtggacagcgtacagtggatcgaacgtctgttggatgcaggcgtacgtactctccagctacgcatcaaagatcggcgcgatgaagaggtggaagccgatgtcgtggcggcaattgcgctgggccgccgctataacgcgcgattgtttatcaacgattactggcggctcgcgatcaagcatcaggcgtatggcgtccatttggggcaggaagatttgcaagccaccgatctcaatgccatccgcgcggcaggcctgcggctgggtgtttcgacacatgacgatatggaaatcgacgtcgcgctggcagcacgcccctcttatatcgcgctgggacatgtgttcccgacgcaaaccaaacagatgccttctgcaccgcaggggctggaacagctggcacggcatgttgagcgactggcggattatcccaccgtggcgattggcggtatcagtctggcacgcgcgcctgcggtgatagcaacgggtgtcggcagtatcgccgtcgtcagcgccattactcaagccgcagactggcgtttggcaacggcacagttgctggaaattgcaggagttggcgatgaatga

SEQ ID NO: 459486 - DNA, 207 bp, Shigella boydii
atgaatgaccgtgattttatgcgttatagccgccaaatcctgctcgacgatatcgctcttgacgggcagcaaaaactgctcgacagccaggtgctgattatcggtcttggcgggctgggtacacctgctgcgctatacctggcgggcgctggcgtcgggacgctggtactggcagatgacgacgatgtgcatttaagcaatctgtaa

SEQ ID NO: 459487 - DNA, 477 bp, Shigella boydii
ttgaatcccgacattcaactgacagcattacaacaacggttaacgggtgaggcgttaaaagatgcggttgcacgggccgatgtggtgctcgactgtaccgacaatatggcgactcgccaggagattaatgccgcctgcgtggtactcaacacgccgcttatcaccgccagcgcggtcggatttggcggtcagttgatggtactgacgccgccctgggagcaggggtgttaccgctgcctgtggccagataaccaggagccagaacgcaactgccgcacggcgggcgtggttggcccggtggtcggggttatgggcactttgcaggcactggaagccattaagttattaagcggtatagagacacctgcgggagaactccgactgttcgacggtaaatcgagccagtggcgcagcctggcgttgcgccgcgccagtggttgcccggtatgcggaggaagcaatgcagatcctgtttaa

SEQ ID NO: 459488 - DNA, 201 bp, Shigella boydii
atgcagatcctgtttaacgatcaaccgatgcagtgcgccgccgggcaaactgttcacgaactactggagcaactcgaccaacgacaagcgggcgcggctctggcgattaatcagcaaatcgtcccgcgtgagcagtggacgcaacatatcgtgcaggatggcgaccagatcctgctttttcaggttattgcagggggttga

SEQ ID NO: 459489 - DNA, 771 bp, Shigella boydii
atgttacgtattgcggacaaaacgtttgattcacatctgtttaccggcacagggaaattcgcttcttcacaactgatggtggaggcgatccgcgcttccggcagccagctggtgacactggcgatgaaacgtgtcgacttgcgccagcacaacgacgctatcctcgaaccgcttatcgcggcgggtgtgaccctgctgccaaatacttccggggcgaaaacagcggaagaagccattttcgccgcccatctggcacgtgaagcgttaggcacaaactggttaaaattagagattcaccctgacgcccgctggctgttgcccgatcccatcgaaactctgaaagccgccgaaatgctggtacaacagggatttgtcgtgctgccttactgcggggccgatccggtattgtgtaaacgtctggaagaagtcggctgtgcagcggtgatgccgctcggcgcgccgattggctcgaatcagggactggaaacccgtgccatgctggagattattatccagcaggccacagttccggtggttgtcgatgctggcatcggcgttcccagccatgccgcgcaggccctggaaatgggggccgacgcggtgttagtgaatacggcgattgccgtagcggacgatcccgtcaacatggcgaaggcatttcgtctggcggtagaagcaggcctgctggcacgtcagtccggaccgggcagccgcagtcattttgctcatgccaccagcccgctgactggatttctggaggcatcggcatga

SEQ ID NO: 459490 - DNA, 1134 bp, Shigella boydii
atgaaaaccttcagcgatcgctggcgacaactggactgggatgacatccgcctgcgtatcaacggcaaaacggctgttgacgtagagcgggcgctaaatgcctcgcaattcacccgcgacgatatgatggcgctgttatcgccagccgccagtggctatctggaacaactggcccaacgggcgcagcgtctgacccgtcagcgatttggcaacgcagttagtttctacgtcccgctttatctttccaatctttgcgctaacgactgcacgtactgcggattttccatgagtaatcgcatcaagcgcaaaacgctggatgaagcggatattgccagggaaagcgccgctatacgggagatgggctttgaacatctgctattagtcactggtgaacatcaggcgaaagtggggatggattactttcgtcgtcatctccccgccctgcgtgaacagttctcttcactacaaatggaagtgcaaccgctggcgaagacggaatacgccgagttaaagcagcttggtctggatggcgtgatggtttatcaggagacatatcacgaggcgacttatgcccgccatcatctgaaaggcaaaaaacaggacttcttctggcggctggaaacgccggatcggctggggcgtgcggggattgataagataggcctcggcgcgctaattggcctttccgacaactggcgcgttgactgctatatggttgccgaacatttgctatggctgcaacagcattactggcaaagccgttactctgtctcttttccgcgcctgcgcccgtgtactggcggcattgagcctgcgtcgattatggatgaacgccagttagtgcaaaccatctgcgccttccgactgcttgcaccggagattgaactgtcactctccacgcgggaatcaccgtggtttcgcgatcgcgttattccgctggcgatcaataacgtcagcgccttctcgaaaacgcagccaggtggctatgccgataatcaccccgagttggaacagttctcaccgcacgacgatcgcagaccggaagcggttgctgccgcgttaaccgctcagggtttgcagccggtatggaaagactgggacagctatctgggacgggcctcgcaaagactatga

SEQ ID NO: 459491 - DNA, 1140 bp, Shigella boydii
atgtcagagcccctcgatctcaatcagttagcgcaaaaaattaaacagtgggggctggaactgggctttcagcaggtaggtattaccgataccgatctcagcgagtccgagcccaaactgcaagcatggctggacaaacaataccacggcgaaatggactggatggcacgtcacggtatgctgcgcgctcgccctcatgagttattgcccggtacgctgcgcgtgatcagcgtgcggatgaattaccttcctgctaacgccgcatttgccagcacgctgaaaaaccccaaactcggctatgttagccgttatgcgctgggccgtgactatcacaaacttctgcgcaaccgactcaaaaagctgggcgagatgattcagcaacattgtgtttcgctgaattttagaccgtttgtcgattctgcgcctattctcgagcgcccgttagctgaaaaagctgggctcggctggacaggtaagcactcacttatcctcaatcgcgaggccggttcgttcttctttttaggcgaattgctggtcgatattccgctgcccgtggatcaaccagtcgaggaaggatgcggtaaatgcgtggcctgtatgacgatttgcccgaccggtgccatcgtcgagccatataccgtcgatgctcgccgctgtatctcttatctcaccatcgaacttgaaggggcgatcccggaagagttgcgaccgttaatgggaaaccgtatttacggttgcgatgactgccagcttatctgcccgtggaatcgctattcacaactcaccacagaagaggatttcagcccgcgtaagccgctacacgcaccggaactcattgagttattcgcctggagcgaagagaagtttttaaaagtcacggaaggatcggcgattcgtcgtattggtcacctgcgttggctgcgtaatatcgccgtagcattaggcaatgccccttgggatgaaacgattttgacagcgctggaaagtcgtaaaggtgagcacccacttctcgatgagcacatagcgtgggcgattgcgcagcaaatagagagacgaaatgcgtgcatagtcgaagtgcaattgccgaaaaaacagcgtctggttcgggtgattgaaaaagggttaccgcgtgacgcctga

SEQ ID NO: 459492 - DNA, 1533 bp, Shigella boydii
atgaagaaaaaccccgtaagtataccacacaccgtctggtacgccgacgatatccgccgcggagaacgcgaggcggcagatgtgctggggctcacactctatgagctgatgcttcgcgctggcgaggccgcattccaggtgtgtcgttcggcgtatcctgacgcccgccactggctggtgctgtgcggtcatggtaataacggcggcgatggctacgtggtcgcgcgactggccaaagcggtcggcattgaggtcacgttgtttgcccaggagagcgacaaaccgttgccggaagaggccgcgctggcacgcgaagcatggttaaacgcgggtggcgagatccatgcttcgaatattgtctggcccgaatcggtagatctgattgttgatgcgctgctcggtaccggtttgcggcaagcgccccgcgaatccattagccagttaatcgaccacgctaattcccatcctgcgccgattgtggcggttgatatcccttccggcctgctggctgaaactggcgctacgccaggcgcggtgatcaacgccgatcacaccatcacttttattgcgctgaaaccaggcttgctcactggaaaagcgcgggatgttaccggacaactgcattttgactcactggggctggatagttggctggcaggtcaggagacgaaaattcagcggttttcagcagaacaactttctcactggctaaaaccgcgtcgcccgacttcgcataaaggcgatcacgggcggctggtaattatcggtggcgatcacggcacggcgggggctattcgtatgacgggggaagcggcgctgcgtgctggtgctggtttagtccgagtactgacccgcagtgaaaacattgcgccgctgctgactgcacgaccggaattgatggtgcatgaactgacgatggactctcttaccgaaagcctggaatgggccgatgtggtggtgattggtcccggtctgggccagcaagagtgggggaaaaaagcactgcaaaaagttgagaattttcgcaaaccgatgttgtgggatgccgatgcattgaacctgctggcaatcaatcccgataagcgtcacaatcgcgtgatcacgccgcatcctggcgaggccgcacggttgttaggctgttccgtcgctgaaattgaaagtgaccgcttacattgcgccaaacgtctggtacaacgttatggcggcgtagcggtgctgaaaggtgccggaaccgtggtcgccgcccatcctgacgctttaggcattattgatgccggaaatgcaggcatggcgagctgcggcatgggcgatgtgctctctggtattattggcgcattgcttgggcaaaaactgtcgccgtatgatgccgcctgtgcgggctgtgtcgcgcacggtgcggcagctgacgtactggcggcgcgttttggaacgcgcgggatgctggcaaccgatctcttttccacgctacagcgtattgttaacccggaagtgactgataaaaaccatgatgaatcgagtaattccgctccctga

SEQ ID NO: 459493 - DNA, 462 bp, Shigella boydii
atgatgaatcgagtaattccgctccctgatgagcaggcaacattagacctgggcgagcgggtagcgaaagcctgcgatggcgcaaccgtaatctatctgtatggcgatttaggcgcaggtaagaccacctttagccggggctttttacaagctctgggtcatcagggtaatgtcaaaagccccacttatacgctggtcgaaccctatacgctcgacaatttaatggtttatcactttgatttgtaccgccttgccgatcccgaggagctggagtttatggggatccgcgattattttgccaacgatgccatctgcctggtggagtggccacaacaaggtacaggtgttcttcctgacccggatgtcgaaatacacattgattatcaggcacaaggccgtgaggcgcgcgtgagtgcggtttcctctgcgggtgaattgttgctggcgcgtttagccggttaa

SEQ ID NO: 459494 - DNA, 1338 bp, Shigella boydii
atgatgtatcgcatcagaaattggttggtagcgacgctgctgctgctgtgcacgccggtgggtgccgcgacgctctctgatattcaggtttctaacggtaatcaacaggcgcggataacgttgagttttattggcgatcctgattatgcgtttagccatcaaagcaaacgcaccgtggcgctcgatatcaaacaaacgggcgtgattcagggactgccgttgttgttcagcggcaataatctggtgaaggcgattcgctctggaacgcctaaagatgcacaaacgctacggctggtggtcgatcttaccgaaaatggtaaaaccgaagcggtgaagcggcagaatggcagcaattacactgtcgtctttacgattaacgccgatgtgccgccaccgcctcctccgccgcccgtggttgcgaaacgcgttgaaacgcctgcggttgtcgcaccgcgcgtcagcgaaccggcgcgcaatccgtttaaaacggaaagtaaccgcactacgggtgttatcagcagtaatacggtaacgcgtccggcagcgcgcgcgacggctaacactggcgataaaattatcatcgctattgatgccggacacggcggtcaggaccctggcgctatcggccccggtggtacgcgggagaaaaatgtcaccatcgccatcgcgcgtaaattgcgtactttgctcaatgacgatccgatgtttaaaggcgttttaacccgtgacggggattactttatttcggtgatggggcgcagcgatgtggcacgtaagcaaaacgctaatttcctcgtgtctattcacgctgatgccgcaccgaaccgcagtgcgactggcgcttccgtatgggtgctctctaaccgtcgcgccaacagcgaaatggccagctggctggagcagcacgagaaacattcggagctgctgggtggggcgggcgatgtgctggcgaacagtcagtctgatccctatttaagccaggcggtgctggatttacagttcggtcattcccagcgggtagggtatgatgtagcgaccagtatgatcagtcagttgcaacgcattggcgaaatacataaacgccgaccagaacacgcgagtctcggcgttctgcgttcgccggatatcccgtcagtactggtcgaaaccggttttatcagcaacaacagcgaagaacgtttgctggcgagcgacgattaccaacaacagctggcagaagccatttacaaaggcctgcgcaattatttccttgcgcatccgatgcaatctgcgccgcagggtgcaacggcacaaacggccagtacggtgacgacgccagatcgcacgctgccaaactaa

SEQ ID NO: 459495 - DNA, 1848 bp, Shigella boydii
atgccaattcaggtcttaccgccacaactggcgaaccagattgccgcaggtgaggtggtcgagcgacctgcgtcggtagtcaaagaactggtggaaaacagcctcgatgcaggtgcgacgcgtatcgatattgatatcgaacgcggtggggcgaaacttatccgcattcgtgataacggctgcggtatcaaaaaagatgagctggcgctggcgctggctcgtcatgccaccagtaaaatcgcctctctggacgatctcgaagccattatcagcctgggctttcgcggtgaggcgctggcgagtatcagttcggtttcccgcctgacgctcacttcacgcaccgcagaacagcaggaagcctggcaggcctatgccgaagggcgcgatatgaacgtgacggtaaaaccggcggcgcatcctgtggggacgacgctggaggtgctggatctgttctacaacaccccggcgcggcgcaaattcctgcgcaccgagaaaaccgaatttaaccacattgatgagatcatccgccgcattgcgctggcgcgtttcgacgtcacgatcaacctgtcgcataacggtaaaattgtgcgtcagtaccgcgcagtgccggaaggcgggcaaaaagaacggcgcttaggcgcgatttgcggcactgcttttcttgaacaagcgctggcgattgaatggcaacacggcgatctcacgctacgcggctgggtggccgatccaaatcacaccacgcccgcactggcagaaattcagtattgctacgtgaacggtcgcatgatgcgcgatcgcctgatcaatcacgcgatccgccaggcctgcgaagacaaactgggggccgatcagcaaccggcatttgtgctgtatctggagatcgatccgcatcaggtggacgtcaacgtgcaccccgccaaacacgaagtgcgtttccatcagtcgcgtctggtgcatgattttatctatcagggcgtgctgagcgtgctacaacagcaactggaaacgccgctaccgctggacgatgaaccccaacctgcaccgcgttccattccggaaaaccgcgtggcggcggggcgcaatcactttgcagaaccggcagctcgtgagccggtagctccgcgctacactcctgcgccagcatcaggcagtcgtccggctgccccttggccgaatgcgcagccaggctaccagaaacagcaaggtgaagtgtatcgccagcttttgcaaacgcccgcgccgatgcaaaaattaaaagcgccggaaccgcaggaacctgcacttgcggcgaacagtcagagttttggtcgggtactgactatcgtccattccgactgtgcgttgctggagcgcgacggcaacatttcacttttagccttgccagtggcagaacgttggctacgtcaggtacaactgacgccgggtgaagcgccagtttgcgctcagccgctgcttattccgttgcggctaaaagtttctggcgaagaaaaatcggcattagaaaaagcgcagtctgccctggcggaattgggtattgatttccagtcagatgcacagcatgtgaccatcagggccgtgcctttacccttacgccaacaaaatttacaaatcttgattcctgaactgataggctacctggcgaagcagtccgtattcgaacctggcaatattgcgcagtggattgcacgaaatctgatgagcgaacatgcgcagtggtcaatggcacaggccataaccctgctggcggacgtggaacggttatgtccgcaacttgtgaaaacgccgccgggtggtctgttacaatctgttgatttacatccggcgataaaagccctgaaagatgagtga

SEQ ID NO: 459496 - DNA, 951 bp, Shigella boydii
atgagtgatatcagtaaggcgagcctgcctaaggcgatttttttgatggggccgacggcctccggtaaaacggcgttagccattgagctgcgtaaaattttaccagtagagttgataagcgttgattctgcccttatttacaaagggatggatatcgggacggcgaagccgaacgctgaagagttactcgccgtgccgcaccgattgctggatattcgcgatccgtcgcaggcttactcggctgctgattttcgccgcgatgcgctggcggaaatggccgatatcaccgcggcggggcggatcccactgttagtgggcggtacgatgttgtatttcaaggcattgctggaagggttgtcgccgctaccgtcggcagacccggaagtgcgggccagaattgagcaacaggcggcagagcaaggttgggagtcattgcatcgtcaacttcaggaggtagatccggttgcggcagcaaggattcatccaaatgatccacaaaggctttcccgggcactggaagtttttttcatttcgggtaaaactttaacggaactgacgcaaacgtcaggagacgctctaccgtatcaggtgcatcagttcgccatcgccccggcgagccgtgaactgctccatcaacgcattgagcagcgttttcatcagatgttggcttcaggttttgaagcagaagtccgggcgctttttgcccgaggagatttgcatacggacttgccttccattcgttgcgtgggttatcgccagatgtggtcttaccttgaaggcgaaatctcatacgatgaaatggtttatcgaggtgtttgcgccacgagacagttggcgaagcggcagataacctggctgcgtggttgggaaggggttcactggcttgacagtgaaaaaccagaacaggcgcgtgacgaagtattacaggttgttggtgctatcgcaggctga

SEQ ID NO: 459497 - DNA, 309 bp, Shigella boydii
atggctaaggggcaatctttacaagatccgttcctgaacgcactgcgtcgggaacgtgttccagtttctatttatttggtgaatggtattaagctgcaagggcaaatcgagtcttttgatcagttcgtgatcctgttgaaaaacacggtcagccagatggtttacaagcacgcgatttctactgttgtcccgtctcgtccggtttctcatcacagtaacaacgccagtggcggtaccagcagtaactaccatcatggtagcagcgcgcagaatacttccgcgcaacaggacagcgaagaaaccgaataa

SEQ ID NO: 459498 - DNA, 1281 bp, Shigella boydii
ttgtttgaccgttatgatgctggtgagcaggcggtactggtacacatctattttacgaaagacaaagatatggaagacctccaggagtttgaatctctggtttcttccgccggtgtcgaagcattgcaggtgattaccggtagccgtaaagcgccgcacccaaagtattttgtaggtgaaggtaaagcagttgaaattgcggaagctgtcaaagcgacgggtgcttcggtcgttctttttgaccatgccctgagcccggcgcaagagcgtaacctggagcgtttgtgcgagtgtcgagtcatcgaccgcaccggccttattttagatattttcgcccaacgtgcgcgtacccatgagggtaagttgcaggttgagctggcgcagctgcgccatctggctacgcgcctggtgcgtggctggacccaccttgaaagacagaaaggcgggataggtttgcgtggtccgggtgaaacccagctcgaaaccgaccgtcgtttgttgcgtaatcgcatcgtgcagatacagtcgcgcctggaaagagttgaaaagcagcgtgagcaggggcggcaatcgcgtatcaaagccgacgttcctactgtttcgctggtgggatataccaacgccggtaaatctacccttttcaatcgcatcaccgaagcgcgggtctacgcggcagaccagttgtttgccaccctcgacccgacgttgcggcgtattgacgtcgcggatgtcggtgaaaccgtacttgcagataccgtagggtttattcgccatctgccgcacgatctggtggcggcatttaaagccacgttacaagagacgcggcaagccacattactgctgcacgtcattgatgcggcggatgtgcgtgtacaagaaaacatcgaagcggtgaatacggttcttgaagagatcgacgctcacgagatcccaaccctgctggtgatgaacaagatcgatatgctggaagatttcgaaccgcgtattgatcgggacgaagagaacaaaccgatccgtgtctggctttccgcacagaccggagcggggataccacagctttttcaggctttgacggagcggctttccggcgaggtggcgcagcatacattgcgtctgccaccgcaggaagggcgtctgagaagtcgtttttatcagcttcaggcaatagaaaaagagtggatggaggaggacggcagcgtaagtctgcaagttcgtatgccgatcgttgactggcgtcgcctctgtaaacaagaaccggcgttgatcgattacctgatctaa

SEQ ID NO: 459499 - DNA, 1260 bp, Shigella boydii
atggcgtggaatcagcccggtaataacggacaagaccgcgacccgtggggaagcagcaaacctggcggcaactctgagggaaatggaaacaaaggcggtcgcgatcaagggccacctgatttagatgatatcttccgcaaactgagcaaaaagctcggtggtctgggcggcggtaaaggcaccggatctggcggtggcagttcatcgcaaggcccgcgcccgcagcttggcggtcgtgtcgttaccatcgcagcggcagcgattgtcattatctgggcggccagtggtttctataccattaaagaagccgaacgcggcgtggtaacacgctttggtaaattcagccatctggttgagccgggtctgaactggaaaccgacgtttatcgacgaagtcaaaccggtaaacgtggaagccgtgcgtgaactggccgcttccggtgtgatgctgacgtcggacgagaacgtagtgcgcgttgagatgaacgtgcagtaccgcgttaccaatccggaaaaatatctgtatagcgtgaccagcccggatgacagcctgcgtcaggctaccgacagcgccctgcgcggggttatcggtaaatacaccatggaccgcattctgacggaaggtcgtaccgtgattcgtagcgatacccagcgcgaactggaagagacgattcgtccgtatgacatgggcatcactctgctggacgtcaacttccaggctgctcgtccgccggaagaagtaaaagcggcgtttgacgatgcgattgccgcgcgtgaaaacgaacagcaatacattcgtgaagcagaagcgtataccaacgaagttcagccgcgtgcgaacggtcaggcgcaacgtatcctcgaagaggcgcgtgcgtacaaggcccagaccatcctggaagctcagggtgaagtggcgcgctttgctaaacttctgccggaatataaagccgcgccggaaattactcgcgagcgtctgtatatcgagacgatggaaaaagtgttgggtaacacccgcaaagtgctggttaacgataaaggtggcaacctgatggttctgccgttagaccagatgctgaaaggtggtaacgcccctgcggcgaagagcgataacggtgccagcaatctgctgcgtttgccgccagcctcttcctccacaaccagtggagcaagcaacacgtcgtccaccagtcagggcgatattatggaccaacgccgcgccaacgcgcagcgtaacgactaccagcgtcagggggaataa

SEQ ID NO: 459500 - DNA, 1005 bp, Shigella boydii
atgcgtaagtcagttatcgcgattatcatcatcgtgctggtagtgctttacatgtctgtctttgtcgtcaaagaaggtgagcgcggtattacgctgcgttttggtaaggtactgcgtgacgatgacaacaaacctctggtttatgagccgggtctgcatttcaagataccgttcattgaaacggtgaaaatgctcgacgcacgtattcagaccatggacaaccaggccgaccgctttgtgaccaaagagaagaaagacctgatcgtcgactcttacatcaaatggcgcatcagcgatttcagccgttactacctggcaacgggtggtggcgacatttcgcaagcggaagtgctgttgaaacgtaagttctctgaccgtctgcgttctgaaattggtcgcctggacgtgaaagatatcgtcactgattcccgtggtcgtctgaccctcgaagtacgtgacgcgctgaactccggttctgcgggtacagaagatgaagttactaccccggcagcagataacgccattgccgaagcggcagagcgcgtaacggctgagacgaagggcaaagttccggtcatcaacccgaacagtatggcggcgctgggtattgaagttgtcgatgtgcgtatcaagcagatcaacctgccgaccgaagtgtctgaagcgatctacaaccgtatgcgcgccgagcgtgaagcggtagcgcgtcgtcaccgttcacaaggtcaggaagaagcggaaaaactgcgcgcgactgccgactatgaagtgaccagaacgctggcagaagctgagcgtcagggccgcatcatgcgtggtgaaggcgatgccgaagcagccaaactgtttgctgatgcattcagtaaagatccggacttctacgcattcatccgtagcctgcgtgcttatgagaacagcttctctggcaatcaggacgtgatggtcatgagcccggatagcgatttcttccgctacatgaagacgccgacttccgcaacgcgttaa

SEQ ID NO: 459501 - DNA, 198 bp, Shigella boydii; identical to SEQ ID NO: 1878

SEQ ID NO: 459502 - DNA, 1299 bp, Shigella boydii
atgggtaacaacgtcgtcgtactgggcacccaatggggtgacgaaggtaaaggtaagatcgtcgatcttctgactgaacgggctaaatatgttgtacgctaccagggcggtcacaacgcaggccatactctcgtaatcaacggtgaaaaaaccgttctccatcttattccatcaggtattctccgcgagaatgtaaccagcatcatcggtaacggtgttgtgctgtctccggccgcgctgatgaaagagatgaaagaactggaagaccgtggcatccccgttcgtgagcgtctgctgctgtctgaagcatgtccgctgatccttgattatcacgttgcgctggataacgcgcgtgagaaagcgcgtggcgcgaaagcgatcggcaccaccggtcgtggtatcgggcctgcttatgaagataaagtggcacgtcgcggtctgcgtgttggcgaccttttcgacaaagaaaccttcgctgaaaaactgaaagaagtgatggaatatcacaacttccagttggttaactactacaaagctgaagcggttgattaccagaaagttctggatgatacgatggctgttgccgacatcctgacttctatggtggttgacgtttctgacctgctcgaccaggcgcgtcagcgtggcgatttcgtcatgtttgaaggtgcgcagggtacgctgctggatatcgaccacggtacttatccgtacgtaacttcttccaacaccactgctggtggcgtggcgaccggttccggcctgggcccgcgttatgttgattacgttctgggtatcctcaaagcttactccactcgtgtgggtgcaggtcctttcccgaccgaactgtttgatgaaactggcgagttcctctgcaagcagggtaacgaattcggcgcaacgacgggtcgtcgtcgtcgtaccggctggctggacaccgttgccgttcgtcgtgcggtacagctgaactccctgtctggcttctgcctgactaaactggacgttctggatggcctgaaagaggttaaactctgcgtggcttaccgtatgccggatggtcgcgaagtgactaccactccgctggcagctgacgactggaaaggtgtagagccgatttacgaaaccatgccgggctggtctgaatccactttcggcgtgaaagatcgtagcgggctgccgcaggcggcgctgaactacatcaagcgtattgaagagctgaccggtgtgccgatcgatatcatctctaccggtccggatcgtactgaaactatgattctgcgcgacccgttcgacgcgtaa

SEQ ID NO: 459503 - DNA, 426 bp, Shigella boydii
gtgcagttaacgaatttcactgattacggattacgtgcgctgatctacatggcgtcattgccagaagggcggatgaccagtatttctgaagtgactgacgtctacggcgtctcccgtaatcatatggtcaaaataatcaatcaacttagtcgtgccggctacgtgactgctgttcgtggaaaaaatggcggcattcgcttgggtaaaccggcgagtgcgatacgtattggtgatgtggtgcgcgagctggagcccttatcgctggtgaattgcagcagtgagttttgccacattacacctgcctgtcggttgaaacaggcgctttctaaggccgtgcaaagttttcttacggaactggataactacacgcttgccgatttggttgaagagaatcaaccgctttataaattattgctggtggagtga

SEQ ID NO: 459504 - DNA, 2442 bp, Shigella boydii
atgtcacaagatcctttccaggaacgcgaagctgaaaaatacgcgaatcccatccctagtcgggaatttatcctcgaacatttaaccaaacgtgaaaaaccggccagccgtgatgagctggcggtagaactgcacattgaaggcgaagagcagcttgaaggcctgcgtcgccgcctgcgcgcgatggagcgcgatggtcaactggtcttcactcgtcgtcagtgctatgcgctgccggaacgcctcgacctggtgaaaggtaccgttattggccaccgtgatggctacggctttctgcgggttgaagggcgtaaagatgatttgtatctctccagcgagcagatgaaaacctgcattcatggcgatcaggtgctggctcagccgctgggtgctgaccgtaaaggtcgtcgtgaagcgcgtattgtccgcgtactggtgccaaaaaccagccagattgttggtcgctactttaccgaagcgggcgtcggctttgtggttcctgacgatagccgtctgagcttcgatatcttaatcccgcccgatcagatcatgggcgcgcggatgggctttgtggtggttgttgaactgacccaacgcccgactcgccgtaccaaagcggtgggtaaaatcgtcgaagtgctgggcgacaatatgggcaccggcatggcggttgatatcgctttgcgtacccatgaaattccgtacatctggccgcaggctgttgagcaacaggttgccgggctgaaagaagaagtgccggaagaagcaaaagcgggccgtgtcgatttgcgcgatttaccgctggtcaccattgatggcgaagacgcccgtgactttgacgatgcggtttactgcgagaaaaaacgcggcggcggctggcgtttatgggtcgcgattgccgacgtcagctactatgtgcgtccgccaacgccgctggatagagaagcgcgtaatcgtggtacgtcggtgtacttcccttcgcaggttatcccgatgctgccggaagtgctctctaacggtctgtgctcgctcaatccgcaggtagaccgcctgtgtatggtgtgcgagatgacggtttcgtcgaaaggccgcctgacgggctacaaattctacgaagcggtgatgagctctcacgcgcgtctgacctacaccaaagtctggcatattctgcagggcgatcaggatctgcgcgagcagtacgctccgctggttaagcatctcgaagagttgcataacctctataaagtgctggataaagcccgtgaagaacgtggcgggatctcatttgagagcgaagaagcgaagtttattttcaacgctgaatgccgtattgagcgtatcgaacagactcagcgtaacgacgcacacaagttaattgaagagtgcatgattctggcgaatatctcggcggcgcgtttcgttgagaaagccaaagaaccagcattgttccgtattcacgacaagccgagcaccgaagcgattacctctttccgttcagtactggcggagctggggctggaactgccgggcggtaacaagccggaaccgcgtgactacgcggagctgctggagtcggttgccgatcgtcctgatgcagaaatgctgcaaaccatgctgctgcgctcgatgaaacaggcgatttacgatccagaaaaccgtggtcactttggcctggcattgcagtcctatgcgcactttacttcgccgattcgtcgttatccagacctgacgctgcaccgcgccattaaatatctgctggcgaaagagcaggggcatcagggcaacaccactgaaaccggcggctaccattattcgatggaagaaatgctgcaactgggtcagcactgttcgatggcggaacgtcgtgccgacgaagcaacgcgcgatgtggctgactggctgaagtgtgacttcatgctcgaccaggtaggtaacgtctttaaaggcgtaatttccagcgtcactggctttggattctttgtccgtctggacgacttattcattgatggtctggtccatgtctcttcgctggacaatgactactatcgctttgaccaggtagggcaacggctgatgggtgaatccagcggccagacttatcgtctgggcgatcgcgtggaagttcgcgtcgaagcggttaatatggacgagcgcaaaatcgactttagcctgatctccagcgaacgcgcaccgcgcaacgtcggtaaaacggcgcgcgagaaagcgaaaaaaggcgatgcaggtaaaaaaggcggcaagcgtcgtctggtcggtaaaaaggtaaactttgagccagacagcgccttccgcggtgagaaaaaaacgaagccgaaagcagcgaagaaagacgcgagaaaagcgaaaaagccatcggcgaaaacgcagaaaatagctgctgcgaccaaagcgaagcgtgcggcgaagaaaaaagtggcagagtga

SEQ ID NO: 459505 - DNA, 732 bp, Shigella boydii
atgagcgaaatgatttacggcatccacgcagtgcaggccctgcaggagcgcgcccctgaacgttttcaggaagtctttattttaaaaggccgtgaagataaacgtctgttaccgctgattcacgccctcgaagcccagggcgtggttatccagctggcaaaccgccaatatctcgacgagaaaagcgacggtgccgtgcatcagggcattatcgcccgcgtgaagccaggacgtcagtaccaggaaaatgatttgccggatctgatcgcttcgctcgatcagccgttcctgctgatcctcgacggtgtaaccgatccgcataacctcggcgcgtgcctgcgtagcgcagatgccgctggtgttcatgcggtgattgtgccgaaagatcgctccgcccagctcaacgccacggcgaaaaaagtggcctgtggcgcggcagaaagcgttccgctgattcgggtgactaacctggtgcgtaccatgcgtatgttgcaggaagagaatatctggatcgtcggtacggcaggtgaggcggatcatacactctatcagagcaaaatgaccggacgcctggcgctggtgatgggcgcggaaggtgaaggtatgcgtcgcctgacccgtgaacattgcgatgagttgatcagcatcccaatggcaggaagtgtttcttctctgaacgtttcggttgcaaccggaatttgcttatttgaagcggtgcgtcagcgcagctag

SEQ ID NO: 459506 - DNA, 1428 bp, Shigella boydii
atgatgaatgacggtaagcaacaatctacctttttgtttcacgattacgaaacctttggcacgcaccccgcgttagatcgccctgcacagttcgcagccattcgcaccgatagcgaattcaatgtcatcggcgaacccgaagtcttttactgcaagcccgctgatgactatttaccccagccaggagccgtattaattaccggtattaccccgcaggaagcacgggcgaaaggagaaaacgaagccgcgtttgccgcccgtattcactcgctttttaccgtaccgaagacctgtattctgggctacaacaatgtgcgtttcgacgacgaagtcacacgcaacattttttatcgtaatttctacgatccttacgcctggagctggcagcatgataactcgcgctgggatttactggatgttatgcgtgcctgttatgccctgcgcccggaaggaataaactggcctgaaaatgatgacggtctaccgagctttcgccttgagcatttaaccaaagcgaatggtattgaacatagcaacgcccacgatgcgatggctgatgtgtacgccactattgcgatggcgaaactggtaaaaacgcgtcagccacgtctgtttgattatctctttacccatcgtaataaacacaaactgatggcgttgattgatgttccgcagatgaaacccctggttcacgtttccggaatgtttggggcatggcgcggcaataccagctgggtggcaccgctggcgtggcatccagaaaatcgcaatgccgtaattatggtggatttggcaggagacatttcgccattactggaactggatagcgacacattgcgcgagcgtttatatactgcaaaagccgatcttggcgataacgccgccgttccggttaagctggtgcatatcaataaatgtccggtgctggcccaggcgaatacgctacgcccggaagatgccgaccgactgggaattaatcgtcagcattgcctcgataacctgaaaattctgcgtgaaaatccgcaagtgcgcgaaaaagtggtggcgatattcgcggaagccgaaccgtttacgccttcagataacgtggatgcacagctttataacggctttttcagtgacgcagatcgtgcagcaatgaaaattgtgctggaaaccgagccgcgtaatttaccggcactggatatcacttttgttgataaacggattgaaaagctgttgttcaattatcgggcacgcaacttcccggggacgctggattatgccgagcagcaacgctggctggagcaccgccgccaggtattcacgccagagtttttgcagggttatgctgatgaattgcagatgctggtacaacaatatgccgatgacaaagagaaagtggcgctgttaaaagcactttggcagtacgcggaagagatcgtctaa

SEQ ID NO: 459507 - DNA, 228 bp, Shigella boydii; identical to SEQ ID NO: 6976

SEQ ID NO: 459508 - DNA, 930 bp, Shigella boydii
gtggtgctctgctgggatttgtcatgcagcgtgggggtttttgcgttaattcaggcgggcctactgacttacgaagccggggcgttcccgtggcttggtactgttataggtgggtatatcttcgggctgggaattgttctggcgggtggatgtgccaccgggacctggtatcgcgcgggtgagggattgatcggcagttggatcgcgcttttcacttatatggtgatgagtgcggtgatgcgttctccacatgccagtggtttaaatcaaaccttgcagcactacagtactgaacataactctattgctgagacttttaatttgtctgtgtggccgttggttaccgttttgctggtgataacgctctgggtggtgatgaaagagttgaagaagccaaaactcaaagtcgcgaccttaccgccgcgccgaaccgggatcgctcatattctgtttgaaaaacgctggcatccctttgtcactgctgtactcatcggtttgattgcgcttttagcctggcccctgagtgaagcaaccggacgcatgtttgggttaggaatcacttccccaacggccaatattctgcaatttctggtcgcaggtgacgtgaaatacattaactggggcgttttcctggtgttagggatcttcgtggggtcatttattgcagccaaagcgagccgtgagttccgcgttcgcgcagctgatgcacaaacaacagtacgtagcgggttaggtggtgtgcttatgggcttcggtgccagcattgcaggtggttgctctatcggtaatggactggtcatgactgcaatgatgacctggcagggctggattggccttgtatttatgattctcggagtctggactgcgtcctggcttgtgtatgtacgaccacagcgtaaggcacgactggcgactgctgcggcaaattaa

SEQ ID NO: 459509 - DNA, 1359 bp, Shigella boydii
atgtcgcataacgttactccaaacacctctcgcgtggaattgcgtaaaacgcttacgttagttccggttgtaatgatgggtcttgcctatatgcagccgatgacgctgtttgatacttttggtatcgtttcaggcctcacggatggtcatgtgccgacagcctatgcgttcgcattgattgcgatcctgtttacggctctgagctacgggaagctggttcgccgctatccttctgctggctctgcatacacttacgcccagaaatccattagcccgactgtcggctttatggtgggttggtcttctctgctcgactatctgttcgcgccgatgatcaacattctgctggcgaaaatttattttgaagctctggtgccttccatcccatcgtggatgtttgtggtggcgctggtggcctttatgaccgcctttaacctgcgtagtctgaaatccgtagcgaacttcaacactgtaatcgtcgtgttgcaggtagtgctgatcgcggtgattctgggcatggttgtttatggcgtatttgaaggtgaaggcgctggtacgctggcgagcactcgtccgttctggtctggcgatgcgcatgttatcccgatgattaccggggcgacaatcctgtgcttctcctttaccggctttgacggcatcagcaacctgtcggaagaaaccaaagatgcagagcgcgtgatcccgcgtgcgattttcctgaccgcgctgattggcggcatgatcttcatctttgcaacttacttcctgcagctgtacttcccggatatctctcgctttaaagatccggatgcgtcacagcctgaaatcatgctgtacgtggcaggtaaagcattccaggttggtgcgctgatcttctccaccattaccgtactggcgtccggtatggcggcgcacgcaggtgttgcgcgtctgatgtacgtaatggggcgtgacggcgtattcccgaaaagcttcttcggttatgtacacccgaaatggcgtactccggcgatgaacatcatcctggttggcgcgattgccctgctggcaatcaacttcgacctggtaatggctacggcgctgattaactttggtgcgttggtggcgttcaccttcgttaacctgtcggttatctcgcagttctggatccgtgagaagcgtaacaagacgctgaaagatcacttccagtatctgttcctgccgatgtgtggtgcgctgaccgttggtgcgctgtgggttaacctggaagaaagctcaatggttctgggtctgatctgggcggctatcggtctgatttacctggcttgcgtcaccaagagcttccgtaacccggttccgcagtacgaagacgttgcataa

SEQ ID NO: 459510 - DNA, 930 bp, Shigella boydii
atgaaaccactgctggatgtgttgatgatcctcgatgccttagaaaaagaaggcagttttgtggcggcgtcggccaaactctacaagacgccgtccgctctgagttacaccgttcacaagctggaaagcgaccttaatattcaattgcttgatcgtagcggtcaccgcgctaaattcacccgcaccggaaaaatgttattagagaaagggcgggaagttctgcataccgtgcgggaactggaaaagcaggcgatcaaactgcatgaaggctgggaaaacgagctggtgattggcgtggacgacacgtttcctttttctctgcttgcgccactgattgaagctttttatcaacatcatagcgtgacgcgcctgaagtttatcaatggcgtactcggtggttcatgggatgccctgactcaggggcgagcggatattattgttggcgcgatgcatgagccaccatcttccagtgagtttggtttttcacggttgggcgatctggaacaagtctttgccgtcgcgcctcatcatccgttagccctggaagaagagccgttaaatcgtcgtattattaagcgatatcgggcgattgtggtgggggatactgcgcaggcaggcgcttctacggcctcacaacttctcgacgaacaagaagccattaccgttttcgattttaaaaccaaactggagctgcaaattagcggcctcggctgcggctatttaccccgttatctggcgcaacgttttctcgatagtggcgcgttaatcgagaagaaagtggtcgcccaaactctctttgaacccgtctggattggctggaacgaacagaccgcaggccttgccagcggctggtggcgagatgaaattttagcaaatagtgcgatcgccggtgtttatgcaaaatctgatgacggaaaatcagccatttaa

SEQ ID NO: 459511 - DNA, 825 bp, Shigella boydii
atgaaaaaggtcgcaattgtcgggttagggtggttaggcatgccgctggcgatgtcactttcagcgcgaggctggcaagtcaccgggagtaaaaccacacaagatggtgtcgaagcggcccgaatgagtggcattgatagctatctgcttcgcatggagcctgagttagtttgcgattctgacgatctggatgccctgatggatgccgatgcactggtcattacgcttccggcacgtcgtagcggctccggcgatgagttctatttacaagcggtacaagagttagtggatagcgcgctggcccatcgtattccccgaattatttttaccagctcaacatctgtctatggcgatgcgcaaggcatgttgaaagaaactaccccgcgtaatccggtaaccaacagtggacgagtattagaagaactcgaagactggctgcacaatttacccggtacttcggtcgatattctgcgtcttgcgggcctggtcggaccggggcgtcatcccggacgcttctttgccggaaaaaccgcgcctgatggtgaacatggtgttaatttagtccatttagaagatgttattggcgctatcactctgttgttacaggcacctaaaggcggacacatctataatatatgtgcgccagctcaccctgcgcgtaatgttttctatccgcagatggcccgtttactggggctggaacctccgcagttcagaaatagtctggacagcggcaaaggtaagattattgatggcagtcggatttgtaatgaactgggatttgaataccagtatcccgatccgctggtaatgccgctggagtaa

SEQ ID NO: 459512 - DNA, 255 bp, Shigella boydii
gtgaaactaatctggtctgaggaatcatgggatgattatctgtactggcaggaaacagataagcgaattgttaaaaagatcaatgaacttatcaaagatacccgcagaacgccatttgaaggtaaggggaagccagaacccctgaaacataatttgtcaggtttctggtcccgacgcattacagaggagcaccgtctggtatacgcggttaccgacgattcactgctcattgcagcatgtcgttatcattattga

SEQ ID NO: 459513 - DNA, 252 bp, Shigella boydii
atgcgtacaattagctacagcgaagcgcgtcagaatttgtcggcaacaatgatgaaagccgttgaagatcatgcccctatccttattactcgtcagaatggagaggcttgtgttctgatgtcactcgaagaatacaactcgctggaagagacggcttatctactgcgttcccccgctaacgcccggagattgatggactcaatcgatagcctgaaatcaggcaaaggaacagaaaaggacattattgagtga

SEQ ID NO: 459514 - DNA, 900 bp, Shigella boydii
atgacagacaacactcgtttacgcatagctatgcagaaatccggccgtttaagtgatgactcacgcgaattgctggcgcgctgtggcattaaaatcaatcttcacacccagcgcctgatcgcgatggcagaaaacatgccgattgatattctgcgcgtgcgtgacgacgacattcccggtctggtaatggacggcgtggttgatctcgggattatcggcgaaaacgtgctggaagaagagctgcttaaccgccgcgcccagggtgaagatccacgctactttaccctgcgtcgtctggatttcggcggctgccgactttcactggcaacgccggttgatgaagcctgggatggcccgctctccttaaacggtaaacgtatcgccacctcttatcctcacctgctcaagcgttatctcgaccagaaaggtatctcttttaaatcctgcttactgaacggttctgttgaagtcgccccgcgtgccggactggcggatgcgatttgcgatctggtttccaccggtgccacgctggaagctaacggcctgcgcgaagtcgaagttatctatcgctcgaaagcctgcctgatacaacgcgatggcgaaatggaagaatccaaacagcaactgatcgacaaactgctgacccgtattcagggtgttatccaggcgcgtgaatcaaaatacatcatgatgcacgcaccgaccgaacgtctggatgaagtcatcgccctgctgccaggtgccgaacgcccaactattctaccgctggcgggtgatcaacagcgcgtagcgatgcacatggtcagtagcgaaaccctgttctgggaaacgatggaaaaactgaaagcgctgggtgccagttcaatcctggtcctgccgattgagaagatgatggagtga

SEQ ID NO: 459515 - DNA, 1305 bp, Shigella boydii
atgagctttaacacaatcattgactggaatagctgtactgcggagcaacaacgccagctgttaatgcgcccggcgatctccgcttctgaaagcattacccgcactgttaacgatattctcgataacgtgaaagcacacggcgatgaggccctgcgggaatacagcgcgaagtttgataaaaccacggttaccgcactgaaggtgtctgctgaggaaattgccgccgccagcgaacgcctgagcgacgagctaaaacaggcgatggcggtggcagtgaagaatattgaaaccttccacactgcgcaaaaactgccgccggtagatgtagaaacgcagccaggcgtgcgttgccagcaggtcacgcgcccagtcgcttcagttgggttgtatattcctggcggctccgccccgctcttctcaacggtattaatgctggcgactccggcgagtattgcgggctgtaaaaaagtggtgctgtgctcaccgccgccgattgccgatgagatcctttatgcggcgcagctgtgcggtgtgcaggacgtgtttaacgtcggcggcgcacaggccattgccgcactggcgtttggtacggaatctgtgccaaaagtggacaaaatcttcgggccgggtaacgcctttgtcaccgaagcgaaacgtcaggtgagccagcgtctggacggtgcggcgatcgatatgcccgcaggcccgtcggaagtgctggtgattgctgacagcggcgctacgccggatttcgtggcttctgatttgctctctcaggctgaacacggcccggactcacaggtgattttactgacgcccgctgctgatatggcgcgtcgcgttgccgaggccgtcgaacgccagttggcagaactgccgcgtgccgaaaccgcccgccaggcactgaacgccagccgcctgatcgtgactaaagatttagcgcagtgcgtggagatctccaaccagtacggcccggagcacctgatcattcagacccgcaacgcccgtgaactggtcgatagcatcaccagcgccggttcggtatttcttggtgactggtcaccggaatcggcaggtgattacgcctccggcaccaaccacgttctaccgacttacggttacaccgccacctgttccagcctcgggctggcagatttccagaagcgcatgaccgtacaggaactgtcgaaagaggggttctccgcgctggcttcaaccatagaaacactggccgccgccgagcgcctgaccgcccacaaaaatgccgttactttgcgtgttaacgcccttaaggagcaagcatga

SEQ ID NO: 459516 - DNA, 1071 bp, Shigella boydii
atgagcaccgtgactattaccgatttagcgcgtgaaaacgtccgcaacctgacgccgtatcagtcggcgcgtcgtctgggcggtaatggcgacgtctggctgaacgccaacgaatatcccacagccgtggagtttcagcttactcagcaaacgctcaaccgctacccggaatgtcagccgaaagcggtgattgaaaattacgcgcaatatgcaggcgtaaaaccggaacaggtgctggtcagccgtggcgcggacgaaggtattgaactgctgatccgcgctttttgcgaaccgggtaaagactccatcctctactgcccaccaacgtacggcatgtacagcgtcagcgccgaaacgattggcgtcgagtgccgcacagtgccgacgctggacaactggcaactggacttacagggcatttccgacaagctggacggcgtaaaagtggtctatgtttgcagccccaacaacccgaccgggcaactgatcaatccgcaggattttcgcaccctgctggagttaacccgcggtaaggcgattgtggttgccgatgaagcctatatagagttttgcccgcaggcatcgctggctggctggctggcggaatatccgcacctggctattttgcgcacactgtcgaaagcttttgctctggcgggccttcgttgcgggtttacgctggcaaacgaagaagtcatcaacctgctgatgaaagtgatcgccccctacccgctctcgacgccggttgccgacattgcggcccaggcgttaagcccgcagggaatcgtcgccatgcgcgaacgggtagcgcaaattattgcagaacgcgaatacctgattgccgcactgaaagagatcccctgcgtggagcaggtttttgactctgaaaccaactacattctggcgcgctttaaagcctccagtgcagtgtttaaatctttgtgggatcagggcattatcttacgtgatcagaataaacaaccctctttaagcggctgcctgcgaattaccgtcggaacccgtgaagaaagccagcgcgtcattgacgccttacgtgcggagcaagtttga

SEQ ID NO: 459517 - DNA, 1068 bp, Shigella boydii
atgagtcagaagtatctttttatcgatcgcgatggaaccctgattagcgaaccgccgagtgattttcaggtggaccgttttgataaactcgcctttgaaccgggcgtgatcccggaactgctgaagctgcaaaaagcgggctacaagctggtgatgatcactaatcaggatggtctgggaacacaaagtttcccacaggcggatttcgatggcccgcacaacctgatgatgcagatcttcacctcgcaaggcgtacagtttgatgaagtgctgatttgtccgcacctgcccgccgatgagtgcgactgccgtaagccgaaagtaaaactggtggaacgttatctggctgagcaagcgatggatcgcgctaacagttatgtgattggcgatcgcgcaaccgacattcaactggcggaaaacatgggcattaatggtttacgctacgaccgcgaaaccctgaactggccgatgattggcgagcaactcactaaacgagaccgttacgcccatgtagtgcgcaacaccaaagagacgcaaattgatgtccaggtgtggctggatcgcgaaggtggcagcaagattaacaccggtgttggcttctttgatcacatgctggatcagatcgccacccacggcggtttccgcatggaagtcaacgtcaaaggcgacctctatatcgacgatcaccacaccgtcgaagataccggcctggcgctgggcgaagcgttaaaaattgccctcggcgataaacgcggtatttgccgctttggttttgtgctgccgatggacgaatgccttgcccgctgtgcactggatatctctggtcgcccgcacctggaatataaagccgaatttacctaccagcgcgtgggcgatctcagcaccgaaatgatcgagcacttcttccgttcgctctcatacaccatgggcgtgacgttgcacctgaaaaccaaaggtaaaaacgatcatcaccgtgtagagagtctctttaaagcctttggtcgcaccctgcgccaggccatccgcgtggaaggcgacaccctgccctcgtcgaaaggagtgctgtaa

SEQ ID NO: 459518 - DNA, 591 bp, Shigella boydii
atgaacgtggtgatcctggataccggctgcgccaacctgaactcggtgaagtctgccattgcgcgtcacggttatgaacccaaagtcagccgtgacccggacgtcgtgttgctggccgataaactatttttacccggcgttggcactgcacaagcagcgatggatcaggtgcgtgagcgcgagctgtttgatctcatcaaagcctgtacccaaccggtgctgggcatctgcttagggatgcaactgctggggcggcgcagcgaagagagcaacggcgtcgatttgctgggcatcatcgacgaagacgtgccgaaaatgaccgactttggtctgccactgccacatatgggctggaaccgcgtttatccgcaggcaggcaatcgcctgtttcaggggattgaagacggcgcgtacttttactttgttcacagttacgcaatgccggtcaattcgtggaccatcgcccagtgtaattacggcgaaccgttcaccgcggcggtacaaaaagataacttctacggcgtgcagttccacccggagcgttctggtgccgctggcgctaagctgctgaaaaacttcctggagatgtga

SEQ ID NO: 459519 - DNA, 738 bp, Shigella boydii
atgattattccggcattagatttaatcgacggcactgtggtgcgtctccatcagggtgattacggcaaacagcgcgattacggtaacgacccgctgccgcgcttacaggattacgccgcgcagggtgccgaagtgctgcacctggtggatctgaccggggcaaaagatccggctaaacgtcaaatcccgctgattaaaaccctggtggcgggcgttaacgttccggtgcaggttggcggcggcgtgcgtagcgaagaagacgtggcggcgttgctggaagcaggcgttgcgcgcgtggtggtcggttccaccgcggtgaaatcaccagaaatggtgaaaggttggtttgaacgtttcggtgccgatgccttagtgctggcgctggatgtccgtattgacgagcaaggcaacaagcaggtggcagtcagcggctggcaagagaactcgggcgtttcactggaacaactggtggaaacctatctgcccgtcggactgaaacatgtgctgtgtaccgatatctcgcgcgacggcacgctggcaggttctaacgtctctttatatgaagaagtgtgcgccagatacccgcaggtggcatttcagtcatccggcggcattggcgacattaacgatgttgctgccctgcgtggtacgggcgtgcgcggcgtaatagttggtcgtgcattactggaaggtaaattcaccgtgaaggaggccatcgcatgctggcaaaacgcataa

SEQ ID NO: 459520 - DNA, 777 bp, Shigella boydii
atgctggcaaaacgcataatcccatgtctcgacgttcgtgatggtcaggtggtgaaaggcgtacagtttcgcaaccatgaaatcattggcgatatcgtgccgctggcaaaacgctacgctgaagaaggcgctgacgaactggtgttctacgatatcaccgcttccagcgatggccgtgtggtagataaaagctgggtatctcgcgtggcggaagtgatcgacattccgttctgtgtggcgggtgggattaaatcgctggatgacgccgccaaaattctttcctttggcgcggataaaatctccattaactcccctgcgctggcggacccgacgttaattactcgcctggccgatcgctttggcgtgcagtgtattgtggtcggtattgatacctggtacgacgccgaaaccggtaaatatcatgtgaatcaatataccggcgatgaaagccgcacccgcgttactcagtgggaaacactcgagtgggtacaggaagtgcaaaaacgcggtgccggagaaatcgtcctcaacatgatgaatcaggacggcgtgcgtaacggttacgatctcgaacaactgaaaaaagtgcgtgaagtttgccacgtcccgctgattgcctccggtggcgcaggcaccatggaacacttcctcgaagccttccgcgatgccgacgttgacggcgcgctggcagcttctgtattccacaaacaaataatcaatattggtgaattaaaagcgtacctggcaacacagggcgtggagatcaggatatgttaa

SEQ ID NO: 459521 - DNA, 612 bp, Shigella boydii
atgttaacagaacaacaatgtcgcgaactggactgggaaaaaaccgacggactgatgccggtgattgtgcaacacgcggtatccggcaaagtgttaatgctgggctatatgaacccggaagccttagacaaaaccatcgaaagcggcaaagtcaccttcttctcgcgcactaaacagcgactgtggaccaaaggcgaaacatcgggcaattttctcaatgtggtgagtattgccccggactgcgacaacgacacgttactggtgctggcgaatcccatcgggccaacctgccacaaaggcaccagcagctgcttcggcgacaccgctcaccagtggctgttcctgtatcaactggaacaactgctcgccgaacgtaaatctgccgacccggaaacctcctacactgccaaactgtatgccagcggcaccaaacgcattgcgcagaaagtgggcgaagaaggcgtggaaaccgcactggcagcaacggtacatgaccgctttgagctgaccaacgaggcatctgatttgatgtatcacctgctggtgctgttgcaggatcaggatctggatttaacgacggtaattgagaacctgcgtaaacggcatcagtga

SEQ ID NO: 459522 - DNA, 987 bp, Shigella boydii
atgagagtagaaaataataatgtttctgggcaaaaccatgacccggaacagattgatttgattgatttgattgatttactggtccaactatggcgcggcaagatgactatcatcatttctgtcattgtggctattgccctggctatagggtatctggccgttgccaaagaaaagtggacttccacagctatcgttactcaacctgatgtggggcaaatcgctggttataccaacgcgatgaatgtgatctacggatcagctgtaccgaaagtctccgacattcaggcttcacttatcggacgttacagcactgcattctcagcattagcggaaacgctggataaccaggaagaagcagaaaagctgaccattgagcctaccgttaaaaatcagtcattaccgttagcggtttcttatgtgggtgaaacacctgaaggtgcgcagaaacagctggcgaagtatatccagcaagttgacgaccaggtcaatgaagaactggaaaaagacctgaaagataacatcgcgctgcgtatgaaaaacttgcaggactctctgaaaacccaggaagtggtcgcgcaggagcagaaagatctgcgtatccgtcagattcaggaagcgttgcagtatgcgaatcaggcgcaggtgacaaagccacaagttcagcagactgaagatgtgacacaagatacgttgttccttttggggagcgaagcgctggagtcgatgattaagcatgaggcgacccgtccgttggtgttctcgccaaactactatcagactcgtcaaaacctgctggatatcgaaagcttaaaggttgatgatcttgatattcatgcttaccgttatgtgatgaaaccgatgttacctattcgtcgcgatagcccgaaaaaggcaattaccttgattctggcggtgctgctgggcggcatggttggcgcggggattgtgctggggcgtaatgcgctgcgtaattacaacgcgaaataa

SEQ ID NO: 459523 - DNA, 1443 bp, Shigella boydii
atgtccagaaggcttcgcagaacaaaaatcgttaccacgttaggcccagcaacagatcgcgataataatcttgaaaaagttatcgcggcgggtgccaacgttgtacgtatgaacttttctcacggctcgcctgaagatcacaaaatgcgcgcggataaagttcgtgagattgccgcaaaactggggcgtcatgtggctattctgggtgacctccaggggcccaaaatccgtgtatccacctttaaagaaggcaaagttttcctcaatattggggataaattcctgctcgacgccaacctgggtaaaggtgaaggcgacaaagaaaaagtcggtatcgactacaaaggcctgcctgctgacgtcgtgcctggtgacatcctgctgctggacgatggtcgcgtccagttaaaagtactggaagttcagggcatgaaagtgttcaccgaagtcaccgtcggtggtcccctctccaacaataaaggtatcaacaaacttggcggcggtttgtcggctgaagcgctgaccgaaaaagacaaagcagacattaagactgcggcgttgattggcgtagattacctggctgtctccttcccacgctgtggcgaagatctgaactatgcccgtcgcctggcacgcgatgcaggatgtgatgcgaaaattgttgccaaggttgaacgtgcggaagccgtttgcagccaggatgcaatggatgacatcatcctcgcctctgacgtggtaatggttgcacgtggcgacctcggtgtggaaattggcgacccggaactggtcggcattcagaaagcgttgatccgtcgtgcgcgtcagctaaaccgagcggtaatcacggcgacccagatgatggagtcaatgattactaacccgatgccgacgcgtgcagaagtcatggacgtagcaaacgccgttctggatggtactgacgctgtgatgctgtctgcagaaactgccgcagggcagtatccgtcagaaactgttgcagccatggcgcgcgtttgcctgggtgcggaaaaaatcccgagcatcaacgtttctaaacaccgtctggacgttcagttcgacaatgtggaagaagctattgccatgtcagcaatgtacgcagctaaccacctgaaaggcgttacggcgattattaccatgaccgaatcgggtcgtaccgcgctgatgacctcccgtatcagctctggtctaccaattttcgccatgtcgcgccatgaacgtacgctgaacctgactgctctctatcgtggcgttacgccggtgcactttgatagcgctaatgacggcgtagcagctgccagcgaagcggttaatctgctgcgcgataaaggttacttgatgtctggtgacctggtgattgtcacccagggcgacgtgatgagtaccgtgggttctactaataccacgcgtattttaacggtagagtaa

SEQ ID NO: 459524 - DNA, 870 bp, Shigella boydii
atgaatatgctggaaaaaatccagtctcagctggaacatttgagcaaatcagagcgcaaagttgccgaggtcattctggcttcgcccgataacgcgatccattcgagtattgctgctatggcactggaagccaatgttagcgaaccgacggtgaatcgtttctgtcgcagcatggacacgcgcggttttcctgattttaaacttcatctggcacagagtctggcgaatggcactccctatgttaatcgcaatgtcaatgaagatgacagcgttgaatcatacacagggaaaatatttgagtccgcaatggcaacgcttgatcatgtccgtcattcactggataaatctgccatcaaccgcgccgtcgacttgctcactcaggcaaaaaaaatcgcctttttcggattaggctcttcagccgccgttgcccacgatgcgatgaataagttctttcgttttaatgttccggtggtgtactccgatgatatcgtgctgcaacgcatgagttgtatgaattgtagcgacggagacgtggtggtgctgatttctcacactggaagaacaaaaaatctggtcaagctggcgcagctggctcgcgaaaacgacgcaatggtgattgccctcacctctgcgggtaccccgctcgcccgggaagcaacgctggcaattaccctcgacgtaccggaagatactgacatttatatgcccatggtttctcgacttgcacagctgaccgtgatagatgtgctggcgacaggatttactttgcgacgcggtgcaaaattcagagataacttgaagcgggtcaaggaagcgctgaaggaatcgcgttttgataagcagttacttaatttaagtgacgatcgctaa

SEQ ID NO: 459525 - DNA, 150 bp, Shigella boydii
atgacgatttccgcactgaaagaaatcgaaatgcagttttgtcagatattacgcctgtgtgccgtgttaatgacaaaagcagataaaaaagttgttattttttttcataacatgatcagtatcagatttttaccgaatggaaaacgatga

SEQ ID NO: 459526 - DNA, 1476 bp, Shigella boydii
atggcggtaacgcaaacagcccaggcctgtgacctggtcattttcggcgcgaaaggcgaccttgcgcgtcgtaaattgctgccttccctgtatcaactggaaaaagccggtcagctcaacccggacacccggattatcggcgtagggcgtgctgactgggataaagcggcatataccaaagttgtccgcgaggcgctcgaaactttcatgaaagaaaccattgatgaaggtttatgggacaccctgagtgcacgtctggatttttgtaatctcgatgtcaatgacactgctgcattcaaccgtctcggcgcgatgctggatcaaaaaaatcgtatcaccattaactactttgccatgccgcccagcacttttggcgcaatttgcaaagggcttggcgaggcaaaactgaatgctaaaccggcacgcgtagtcatggagaaaccgctggggacgtcgctggcgacctcgcaggaaatcaatgatcaggttggcgaatacttcgaggagtgccaggtttaccgtatcgaccactatcttggtaaagaaacggtgctgaacctgttggcgctgcgttttgctaactccctgtttgtgaataactgggacaatcgcaccattgatcatgttgagattaccgtggcagaagaagtggggatcgaagggcgctggggctattttgataaagccggtcagatgcgtgacatgattcagaaccacctgctacaaattctctgcatgattgcgatgtctccgccatctgacctgagcgcagacagcatccgcgatgaaaaagtgaaagtactgaagtccctgcgccgcatcgaccgctccaacgtacgcgaaaaaaccgtacgtgggcaatatactgcgggcttcgcccagggcaaaaaagtgccgggatatctggaagaagagggcgcgaacaagagcagcaatacagaaaccttcgtggcgatccgcgtcgacattgataactggcgctgggccggtgtgccattctacctgcgtactggtaaacgtctgccgaccaaatgttctgaagtcgtggtctatttcaaaacacctgaactgaatctgtttaaagagtcgtggcaggatctgccgcagaataaactgactatccgtctgcaacctgatgaaggcgtggatatccaggtactgaataaagttcctggccttgaccacaaacataacctgcaaatcaccaagctggatctgagctattcagaaacctttaatcagacgcatctggcggatgcctatgaacgtctgctgctggaaaccatgcgtggtattcaggcactgtttgtacgtcgtgatgaagtggaagaagcctggaaatgggtagactccattactgaggcgtgggcgatggacaatgatgcgccgaaaccgtatcaggccggaacctggggacccgttgcctcggtggcgatgattacccgtgatggtcgttcctggaatgagtttgagtaa

SEQ ID NO: 459527 - DNA, 1812 bp, Shigella boydii
atgaatccacaattgttacgcgtaacaaatcgaatcattgaacgttcgcgcgagactcgctctgcttatctcgcccggatagaacaagcgaaaacgtcgaccgttcatcgttcgcagttggcatgcggtaacctggcacacggtttcgctgcctgccagccagaagacaaagcctctttgaaaagcatgttgcgtaacaatatcgccatcatcacctcctataacgacatgctctccgcgcaccagccttatgaacactatccagaaatcattcgtaaagccctgcatgaagcgaatgcggttggtcaggttgcgggcggtgttccggcgatgtgtgatggtgtcacccaggggcaggatggaatggaattgtcgctgctaagccgcgaagtgatagcgatgtctgcggcggtggggctgtcccataacatgtttgatggtgctctgttcctcggtgtgtgcgacaagattgtcccgggtctgacgatggcagccctgtcgtttggtcatttgcctgcggtgtttgtgccgtctggaccgatggcaagcggtttgccaaataaagaaaaagtgcgtattcgccagctttatgccgaaggtaaagtggaccgcatggccttactggagtcagaagccgcgtcttaccatgcgccgggaacatgtactttctacggtactgccaacaccaaccagatggtggtggaatttatggggatgcagtcgccaggctcttcttttgttcatccggattctccgctgcgcgatgctttgaccgctgccgctgcgcgtcaggttacacgcatgaccggtaatggtaatgaatggatgccgatcggtaagatgatcgatgagaaagtggtggtgaacggtatcgttgcactgctggcgaccggtggttccactaaccacaccatgcacctggtggcgatggcgcgcgcggccggtattcagattaactgggatgacttctctgacctttctgatgttgtaccgctgatggcacgtctctacccgaacggtccggccgatattaaccacttccaggcggcaggtggcgtaccggttctggtgcgtgaactgctcaaagcaggcctgctgcatgaagatgtcaatacggtggcaggctttggtctgtctcgttatacccttgaaccatggctgaataatggtgaactggactggcgggaaggggcggaaaaatcactcgacagcaatgtgatcgcttccttcgaacaacctttctctcatcatggtgggacaaaagtgttaagcggtaacctgggccgtgcggttatgaaaacctctgccgtgccggttgagaaccaggtgattgaagcgccagcggttgtttttgaaagccagcatgacgttatgccggcctttgaagcgggtttgctggaccgcgattgtgtcgttgttgtccgtcatcaggggccaaaagcgaacggaatgccagaattacataaactcatgccgccacttggtgtattattggaccggtgtttcaaaattgcgttagttaccgatggacgactctccggcgcttcaggtaaagtgccgtcagctatccacgtaacaccagaagcctacgatggcgggctgctggcaaaagtgcgcgacggggacatcattcgtgtgaatggacagacaggcgaactgacgctgctggtagacgaagcggaactggctgctcgcgaaccgcacattcctgacctgagcgcgtcacgcgtggggacaggacgtgaattattcagcgccttgcgtgaaaaactgtccggtgccgaacagggcgcaacctgtatcactttttaa

SEQ ID NO: 459528 - DNA, 642 bp, Shigella boydii
atgaaaaactggaaaacaagtgcagaatcaatcctgaccaccggcccggttgtaccggttatcgtggtaaaaaaactggaacacgcagtgccgatggcaaaagcgttggttgctggtggggtgcgcgttctggaagtgactctgcgtaccgagtgtgcagttgacgctatccgtgctatcgccaaagaagtgcctgaagcgattgtgggtgccggtacggtgctgaatccacagcagctggcagaagtcactgaagcgggtgcacagttcgcaattagcccgggtctgaccgagccgctgctgaaagctgctaccgaagggactattcctctaattccggggatcagcactgtttccgaactgatgctgggtatggactacggtttgaaagagttcaaattcttcccggctgaagctaacggcggcgtgaaagccctgcaggcgatcgcgggtccgttctcccaggtccgtttctgcccgacgggtggtatttctccggctaactaccgtgactacctggcgctgaaaagcgtgctgtgcatcggtggttcctggctggttccggcagatgcgctggaagcgggcgattacgaccgcattactaagctggcgcgtgaagctgtagaaggcgctaagctgtaa

SEQ ID NO: 459529 - DNA, 1179 bp, Shigella boydii
atgacgttattaggcactgcgctgcgtccggcagcaactcgcgtgatgttattaggctccggtgaactgggtaaagaagtggcaatcgagtgtcagcgtctcggcgtagaggtgattgccgtcgatcgctatgccgacgcaccagccatgcatgtcgcgcatcgctcccatgtcattaatatgcttgatggtgatgcattacgccgtgtggttgaactggaaaaaccacattatatcgtgccggagatcgaagctattgccaccgatatgctgatccaacttgaagaggaaggactgaatgttgtcccctgcgctcgcgcaacgaaattaacgatgaatcgcgagggtatccgtcgcctggcggcagaagagctgcagctgcccacttccacttatcgttttgccgatagcgaaagccttttccgcgaggcggttgctgacattggctatccctgcattgtaaaaccggtgatgagctcttccggcaaggggcagacgtttattcgttctgcagagcaacttgctcaggcatggaagtacgctcagcaaggcggtcgcgccggagcgggccgcgtaattgttgaaggcgtcgttaagtttgacttcgaaattaccttgctaaccgtcagcgcggtggatggcgtccatttctgtgcaccggtaggtcatcgccaggaagatggcgactaccgtgaatcctggcaaccacagcaaatgagcccgcttgcccttgaacgtgcgcaggagattgcccgtaaagtggtgctggcactgggcggttatggtctgtttggtgtcgagctgtttgtctgtagtgatgaggtgattttcagtgaggtctcccctcgtccacatgataccgggatggtgacgttaatttctcaagatctttcagagtttgccctgcatgtacgtgccttcctcggacttccggttggcgggatccgtcagtatggtcctgcagcttctgccgttattctgccacaactgaccagtcagaatgtcacgtttgataatgtgcagaatgccgtaggcgcagatttgcagattcgtttatttggtaagccggaaattgatggcagccgtcgtctgggtgttgcgctggcgaccgctgagagtgttgttgacgccattgaacgcgcgaagcacgccgccggacaggtaaaagtacagggttaa

SEQ ID NO: 459530 - DNA, 183 bp, Shigella boydii
atggcggttgaagttaaatacgtagtcattcgtgagggcgaagagaaaatgtcgtttaccagcaaaaaggaagccgagcaacgtgaagccctttcgctatggctggcagaacaaaaagatgtgctgagcaccattctgaaaaccggcaaattaccgtccccacccacaggtcgtcggtgctga

SEQ ID NO: 459531 - DNA, 357 bp, Shigella boydii
atgaaaaaaagaggggcgtttttagggctgttgttggtttctgcctgcgcatcagttttcgctgccaataatgaaaccagcaagtcggtcactttcccaaagtgtgaaggtctggatgctgccggaattgccgcgagcgtaaaacgtgattatcaacaaaatcgcgtggcgcgttgggcagatgatcaaaaaattgtcggtcaggccgatcccgtggcttgggtcagtttgcaggacattcagggtaaagatgataaatggtcagtaccgctaaccgtgcgtggtaaaagtgccgatattcattaccaggtcagcgtggactgcaaagcgggaatggcggaatatcagcggcgttaa

SEQ ID NO: 459532 - DNA, 207 bp, Shigella boydii
atgctgattgcccgatgcgacgctgttgcgtcttctcaggcctacgattgtggtgcgttctggggcggacaaggcactcgcgccgcatccgccaacggtcaatcaaattatcagaagccattaacgccgctgatattccgccattcccgctttgcagtccacgctgacctggtaatgaatatcggcacttttaccacgcacggttag

SEQ ID NO: 459533 - DNA, 582 bp, Shigella boydii
ttgggcaaactgttagtgccaggcgcattaggcggactggctgggctgctggtcgcaaataaatcagcacgtaaacttcttacgaaatatggcaccaacgcgttactggttggcggcggagcggtagcgggtacggtgctgtggaataaatacaaagataaaattcgcgcggcgcatcaggacgaaccgcagtttggcgcgcaaagtacgccgctggatgagcgtacagaacgtttgatccttgcgctggtctttgccgctaaaagtgatggtcatattgatgccaaagaacgtgcggcaatcgaccagcaattgcgtgaagccggcgtggaagagcaggggcgtgtactcattgagcaggcaatcgaacaaccgctggatccacaacgcctggctaccggggtccgcaatgaagaagaggcgctggaaatctatttcctgagttgcgcggctattgatattgaccattttatggaacgcagttacctgaatgcactgggtgacgcgctgaaaatcccccaggatgttcgtgacggcattgaacgcgatctcgaacagcaaaaacgcactttggcggaataa

SEQ ID NO: 459534 - DNA, 141 bp, Shigella boydii; identical to SEQ ID NO: 29621

SEQ ID NO: 459535 - DNA, 1785 bp, Shigella boydii
atgctatctaccagcgtcaatcggcattcagtgaagagtgggatgagtgggaaacattgctcgatgccaataagcgcgcagctcatagtgagttttattcgatgggcggaatggcgattacgcccgataacaccattatggcgctggcagaagattttctttcccgacgccagtacggcattcgttttcgtaatctggaaactggaaactggtaactggtacccggaactgctggataacgttgaacccagctttgtctgggcaaatgactcctggactttctactatgttcgcaagcatccggtgacgctgctgccttatcaggtctggcgtcacgccatcggtacgccagcatcgcaagataaactgatctacgaagaaaaagacgatacctattacgtcagcctgcataaaacgacctcgaagcactatgtagtcattcatttggccagcgccaccaccagtgaagttcgcctgctggacgcggaaatggccgatgccgagccgtttgtttttctgccgcgccgcaaagatcacgaatacagccttgatcactaccagcatcggttttatctgcgttccaaccgccacggcaaaaactttggcttataccgtacccgcctgcgtgatgagcaacagtgggaagagttaattccgccacgcgaaaacatcatgctggaagggtttacgctgtttaccgactggctggtggttgaagagcgtcagcgtgggttaaccagtttgcgccaaattaaccgcaagacccgggaagtcattggtattgcctttgatgatccagcctatgtgacctggattgcctacaatccagaacctgaaaccgcgcgattgcgttatggttattcttccatgaccacaccagacactttgtttgaactggatatggataccggtgagcgtcgtgtattaaaacaaacggaagttcctggttttgatgcggcgaattaccgcagtgaacacctgtggatagtcgcccgtgatggcgtcgaagttccggtttcgttggtctaccatcgcaaacattttcgcaaaggacacaacccgttgctggtgtatggctatggttcttacggcgcaagtattgatgccgatttcagttttagccgcttgagtttgttagatcgtggctttgtctacgccattgtccatgttcgcggcggtggtgagctggggcaacaatggtacgaagacggaaaatttctgaagaagaaaaatacgtttaatgattatcttgatgcctgcgatgcattgttaaaactgggctatggctttccttcgctttgttatgcgatgggcgggagtgcggggggcatgttgatgggcgttgcaattaatcaacgcccggaattattccacggcgttatcgcccaggtaccgtttgttgatgttgtaacaacgatgcttgatgaatcaattcctcttaccactggtgagtttgaagagtggggtaacccgcaggatccgcaatattacgagtacatgaaaagctacagcccgtatgacaacgtcaccgcacaggcttatccgcatttactggtaacgaccggtttacacgattctcaggtgcaatattgggaaccggcaaaatgggtcgctaaattgcgcgagctgaaaaccgataaccatcttttattgctctgtaccgacatggactcaggccatggcggtaaatctggccgctttaaatcgtacgaaggcgtagcgatggaatatgcttttctggtcgcgctggcgcagggaacattacccgctacgcctgcggattaa

SEQ ID NO: 459536 - DNA, 663 bp, Shigella boydii
atgttgcgcattatcgatacagaaacctgcggtttgcagggagggatcgttgagattgcctctgttgatgtcattgacggaaaaatcgtcaaccccatgagccacctggtgcgccccgatcgtcctattagtccacaagcgatggcgattcatcgcatcaccgaagccatggtcgccgataaaccgtggattgaagatgtgatcccacactattacggtagtgaatggtatgtcgcgcacaacgccagctttgaccgccgcgtactgcctgagatgcccggtgagtggatttgcactatgaaactggcccgtcgtttgtggccagggatcaagtacagcaatatggcgttatataaaacacggaagctcaatgtacagacgccgccgggcctgcatcatcaccgcgcgttgtatgactgttatatcaccgccgcgttgcttatcgatattatgaacacctccggctggacggcagaacagatggccgatatcaccggacgtccgtcgttgatgacgaccttcacctttggcaaataccgtggcaaagcggtttccgacgttgccgaacgcgatccgggctatctgcgctggtcatttaataacctggacagcatgagcccggagctgcgtttaacactgaaacattatctggaaaagacttaa

SEQ ID NO: 459537 - DNA, 657 bp, Shigella boydii
atgtcgttctggaaagttgcagcagcgcaatatgagcctcgtaaaacctcactcaccgaacaggtagctcatcatctggagtttgtgagggccgccgccaggcaacaatgtcagctgttagtttttccatcgctttctttactggggtgtgattattcgcgacgtgcccttcctgccccacccgatctctcactgttagacccgctttgttatgccgcaacgacctggcgaatgaccatcattgccggccttcccgttgaatataacgatcgctttattcgtggaattgcggtgttcgcaccgtggcgaaaaacgcctgggatctaccatcagagtcatggtgcatgtctgggccgtcgttccagaaccatcacggtggtcgatgaacaaccgcaaggtatggatatggacccgacctgttcactgtttactacagggcaatgtctgggagaacccgacctgctggcgtcggcccgtcgcttacaatttttttcacatcagtactcgattgccgtgctgatggcaaatgcccgtggtaacagtgcactatgggatgaatatggtcgtctcatcgttcgcgccgatcgtggttcattattgttagtcggtcagcgttcatcacagggttggcaaggcgatatcattccattacgctag

SEQ ID NO: 459538 - DNA, 231 bp, Shigella boydii
atgctgaagaatctggctaaactggatcaaacagaaatggataaagtgaatgtcgatttggcggcggccggggtggcatttaaagaacgctacaatatgccggtgatcgctgaagcggttgaacgtgaacagcctgaacatttgcgcagctggtttcgcgagaggcttattgcccaccgtttggcttcggtcaaactgtcacgtttaccttacgagcccaaacttaaataa

SEQ ID NO: 459539 - DNA, 375 bp, Shigella boydii
atggcttcaactgcacgctcccttcgctacgcgctggcaatcctgaccacttcgttggtgacaccttccgtctgggcacatgcgcatttaacgcatcagtatcctgcggcaaacgcgcaagtgacagctgcaccgcaggcaatcactttaaacttctcggaaggtgttgaaacaggattcagtggtgcaaaaatcacggggccaaaaaacgaaaatattaaaacattaccggcgaagcgaaatgagcaggaccaaaagcaactgattgttccactggccgattcgctgaaacccggaacctacaccgttgactggcatgttgtttcggtggacgggcataaaacgaaaggacactacacctttagcgtgaaataa

SEQ ID NO: 459540 - DNA, 873 bp, Shigella boydii
atgctggcgtttacctggatcgcgctgcgatttatccatttcacctcgctgatgctggtttttggcttcgcaatgtacggtgcctggctggcccccttgacgattcgtcgcttgctggcgaagcgttttctgcgtttacaacagcacgctgccgtctggagtttgatcagtgccactgcaatgctcgccgttcagggcgggttgatgggaacgggatggacagatgtattttcgccaaacatttggcaggctgttttgcaaacgcagtttggtggcgtctggttatggcaaattgttctcgccctcgtaacgttgatcgtcgcccttatgcaaccgcggaatatgccacgtttgctgtttatgctcactaccgcgcaatttattctgctggcgggagtggggcatgcgacgctgaatgaaggggtaacggcgaaaatccatcagactaatcacgcgattcacctgatttgtgcggcggcgtggtttgggggattactgccggtgctctggtgtatgcaactcatcaaaggccgttggcgacaccaggctattcaggcgctgatgcgtttttcatggtgcgggcattttgcggtgatcggcgtactggcaagcggcgtgcttagtgcattgttgattaccggatttccccccacgcttacgacttactggggccaactcttattgctcaaagccatcctggtgatgattatggtggtcattgcgctggctaatcgttatgttcttgtaccgcgcatgaggcaggatgaagatcgtgcggcaccctggtttgtgtggatgactaaactcgaatgggcgataggtgcggtagtgctggtgatcatcagcctgcttgcgactctcgaacctttttga

SEQ ID NO: 459541 - DNA, 342 bp, Shigella boydii
atgatgaaaaaaagtattctggcgtttctgttactcaccagttctgcagcggcgctggctgcaccgcaggtgattactgtcagtcgttttgaagtgggtaaagacaaatgggcgtttaatcgcgaagaggtgatgctgacttgccgaccgggtaatgctttgtatgttattaatccgagtaccctcgtgcagtatcctttaaacgatatcgcacaaaaggaagttgccagtgggaagaccaatgcccaacccatttcggtgattcagattgatgatcctaacaatcccggcaaaaaaatgagtctggcaccgtttatagaacgagctgaaaaactctgttaa

SEQ ID NO: 459542 - DNA, 555 bp, Shigella boydii
gtgtccgttaaactcaggctacctcagacatacaactgcatcagggaggcagcagatcaacttccggcatggttcccattagctatggatttagcccttgtaacaggacaacgtcgcgaagacataacgaatatgcggttcagtgatatttatgatgatcgtctccacatcaggcaaattaagacaggaatgatgattgctatccccctgtcactcagccttcctgtcgctggtttacgacttggtgcagtagttgaacaatgccgcatggtaagtaggggggattatctaatcagtgccgggattagaaaaaacagccctgacggcagcattcacccggacggcctgacaaagaaatttgtcgcagccagaaaattaacaggtatccagttcagtgaaaacccaccaacttttcacgaagtcagaagcctggctggacgattgtacaaagaaacatgtggagaagaatttgctcagcgtctacttggccacacatcggagaagacaacaaaaatgtatcttgatgagagagaaaaaacgtacttactgctctga

SEQ ID NO: 459543 - DNA, 303 bp, Shigella boydii
atgagcagaaaaaaccaacgttactctaaagagttcaaagccgaagctgtcagaacggttcttgaaaatcaactttcgatcagtgaaggcgcttcccgattatcccttcctgaaggcactttaggacaatgggttaccgccgccagaaaagggctcggtactcctggttcccgcacggtggctgaactggaatctgaaattctgcaactgcgtaaggcgttaaatgaagctcgccttgagcgagatatattaaaaaaagcaacagcgtattttgcacaggagtcgctgaaaaatacgcgttaa

SEQ ID NO: 459544 - DNA, 216 bp, Shigella boydii
atgaaaaatattaaattacttggttcagctatgttggtgagcctggcattgttctcgcaaaattcgttggcaaaagagtataaaattggtgcgtcattattaacacagcaacatcctttctatattgatcttgcgaatgccatgaaagaagaggcaaaaaaagacaatgtcaatttaagtgtctctattggtaatgctgccaacttactgatttag

SEQ ID NO: 459545 - DNA, 855 bp, Shigella boydii
atgtacatcatttcaagcaaaaacatgctgaaaaaagcccagtcagagggatatgccgtccccgctttcaacattcataaccttgaaactttacaggtagttgttgagagcgctgcacaacttcgctctcccgttatgctggcgggaacacccggtacttatcgttatggtggcgtgggaagtttaatttcgttagtacaatcgctggctcgcgagtacaacctgccgttagtcctgcatctcgaccatcatgaagagagtgatgacatttttaacaaggttcgcgcagggatccgttctgtcatgattgatggctcccatttgccatttgaagacaacattgcgcgagtgcaagaagttaccaccttttgccatcgctttgatgttagcgttgaggtcgagctagggcgtcttggcggccaggaggacgatctgctggtggatgaaaaagattccgcttatacctcaccagccgcagctgcagagtttgttcaacgtacccaaattgactccctggccgtagcaatcggcacagcacatggtttatatgcgcatgaaccacgactggattttgtgcggctggaacagattcgtcagcgagtggagattccactggtgttgcatggtgcttcgggcttatcagaacaggacgttcagcactgtattcgccgcggtatttgtaaagtgaatgtcgcgacagaattgaaaattgcgtttgccgatgcgttaaaaggatatttctacaacaatcctgcggcaaatgatccacgccactatatgcagcccgcaaaggccgccatgaaagaagtcgtaactcgtattattggtgtctgtggtagtgaaggaaaaatttaa

SEQ ID NO: 459546 - DNA, 816 bp, Shigella boydii
gtgccgagaaaatcgtctaacctactgaaacgcagattaaaaattgcagaaattgttgccgcccaaggtgaaatcaaagttgatgacttatctgcgcaacttggtgtctctggcgtgacgatccgcggcgatctcagttatctggagcaacagggatatttaaagcgatcatttggcggtgctattgcgacaccactctcctctgaaccagaagcgatacaaccgatcgcgccattgtctctggcacaacaaatggaaatagcacgacattgcgcacggttaattcgcgatcgtgacacgctatttcttggacatgggacaatctgccgtaagatcattccattgctcagcgaagtgaaaaaactgcgtctgatcaccaacgatcccgaacatgcgctgctggcaaatcagtttattgatggcgaaataatactggctggcagtgaaatgctgcgccccgacaccgcactggccggaaaaccgcttgaacaggcacttcagcatttcaccattacacatagcattctggaaatcaaccatctggatgctgatggtactttaaatatcaacgttcccagactggccgctgcctggcagctctgtttcgatcatgcccagaataagacggttatcgttgccgccgatcctgcgccatcaacggctgctatcgggcatttgcatcaggcagaaaatgtgatcgtcagccgcagcattaacgaacaatatcagcaacaattgcagtcggctgatttcgttatcctttataccagtaatgagtgctttacctggtccaatcgcgaaaggcttcaggaatga

SEQ ID NO: 459547 - DNA, 957 bp, Shigella boydii
gtgacaataactatctgcgctatgggcgaattgctggccgagtttttgtcccgcaacccacatcaaaaattcactcagcctggggagtttatcgggccatttcccagcggtgcgccagcaatttttgctgctcaggtggcaaaactgtcccatcgggccatcttcttcggatgtgttggtaatgatgattttggccgactcattatagagcgcctccgtcatgaaggtgtcattaccgatgggctccatgttatgaacaatgccgtcacaggtacggcgttcgtgagttatcaaaatccccagcagcgcgatttcgtctttaatatccctaacagcgcctgcggcttgtttactgctgagcacattgataaggatctgctaaaacagtgtaaccatctccatattgtgggctcatcgttgttctcatttcgcatgatcgatgtcatgcgtaaagcaataacgacgatcaaatcggctggcggcaccgtttctttcgatcccaatattcgcaaagagatgctgagcattcctgaaatggcgcaggctctcgattatttgattgaatatacggatattttcatccccagcgaaagcgaactccctttcttcgcgcgtcacaaaaatctgtcagaagaacagattgttagcgatcttctccacggcggcgtaaaacatgtggcgataaaacgcgcccagcgtggggccagctattacaagcttaaaaacggtacattacacgcccagcatgttacaggccacgatatcgaaattatcgatccaacgggtgcaggcgactgctttggcgcaacgtttatcactcttttcttatccggtttcccggcacataaggcactgcaatatgcaaatgccagcggcgcgctcgccgtaatgcggcaaggtccgatggaagggatatcctcactggctgacattgaagactttttgcagcagcactga

SEQ ID NO: 459548 - DNA, 243 bp, Shigella boydii
gtggacactcgttttgttcaggcccataaagaggcgcgctgggcgctggggctgacccttttgtatctggcagtttggttagcagccgcttacttacctgacgttgcccccggttttaccggctttccgcgctggtttgagatggcctgcatcctgacgccgctgctgtttattggactgtgctgggcgatggtgaaatttatctatcgcgatatcccactggaggatgacgatgcagcttga

SEQ ID NO: 459549 - DNA, 1452 bp, Shigella boydii
atgcagcttgaagtgattctaccgctggtcgcctatctggtggtggtgttcggtatctctgtttatgcgatgcgtaaacggagcaccggtaccttccttaatgagtatttcctcggcagccgctctatgggcggtattgtgctggcgatgacgctcaccgcgacctatatcagtgcaagttcgtttatcggcgggcctggagctgcttataaatacggcctgggttgggtattgctggcgatgattcagcttcctgcagtctggctttcgctcggtattctcggcaagaagttcgcgattcttgcgcgccgctacaatgcagtgacgctgaacgacatgctgtttgcccgctaccagagtcgtcttctggtgtggctggcgagtttgagtttgctggttgcgttcgttggggcaatgaccgtgcagtttatcggcggtgcgcgcctgctggaaaccgcggcgggtattccttatgaaaccgggctgctgattttcggtatcagcattgcgttgtataccgcctttggcggctttcgcgccagcgtgctgaacgacaccatgcaagggcttgtgatgctgattggcaccgttgtgctgcttattggcgtggtacatgccgcaggtggtttaagtaatgcggtagagacgctgcaaaccatcgatccgcaactggttacgccacaaggcgctgacgatattctgtcgcctgcctttatgacgtcgttctgggtactggtgtgctttggcgtgattggcctgccgcatactgcggtgcgctgtatctcttataaagacagcaaagcggtacaccgggggatcatcatcggtacgattgtagtcgcaatcctgatgttcggtatgcacctggccggagcgttaggtcgtgcagtgatccccgatctcaccgtaccggatctggtgatcccgacgttaatggtaaaagtgctgccaccgtttgctgccgggatctttctggctgcacctatggctgcgatcatgtcgacaattaacgcccaattgctacaaagttccgctacgatcattaaagatctctatctgaatatccgtccggatcaaatgcaaaacgagacgcgtctgaagcggatgtcggcggtaattacgttagttctcggcgcgttgctgctgcttgccgcctggaagccgccagaaatgatcatctggctgaatttgctggccttcggtgggttggaagccgttttcctgtggccgctggtgctgggtctttactgggaacgcgccaacgccaaaggcgcgctaagtgcgatgatcgttggcggcgtgctgtatgccgtactcgcgacgctgaatattcagtacctgggcttccaccctatcgtgccctcgttactactaagtttgctggctttcctggtcggaaaccgtttcggtacatccgtcccgcaagctaccgttttgactactgataaataa

SEQ ID NO: 459550 - DNA, 882 bp, Shigella boydii
atgccttggatccaactgaaactgaacaccaccggcgcgaacgctgaagatcttagcgatgcgctgatggaagcgggtgccgtttctatcacttttcaggatacccacgatacgccagtatttgagccgctgccgggcgaaacgcgcctgtggggcgacaccgatgtgattggtctgttcgacgctgaaaccgatatgaacgacgtggtggcgattctggaaaaccatccgctgctcggcgcaggcttcgcgcataaaatcgaacaactggaagataaagactgggagcgcgaatggatggataatttccacccgatgcgctttggtgaacgactgtggatctgcccaagctggcgtgatgtgccggacgaaaacgccgtcaacgtgatgttagacccagggctggcgtttggtacgggtacccatccaactacctctctgtgcctacaatggctcgacagcctcgatttaactggtaaaacagtcatcgactttggctgcggttccggcattctggctatcgcggcgctgaaactgggtgcagcaaaagccattggtattgatatcgatccgcaggcgattcaggctagccgcgacaacgccgaacgtaatggcgtttctgaccgtctggaactctacttaccgaaagatcagccagaagaaatgaaagccgacgtggtggtcgcgaacatccttgcaggcccattacgtgaactggcaccgttaatcagcgtcctgccggtttcaggcggtttgctgggcctttccggtattctggcaagccaggcagagagcgtttgtgaagcttatgccgatagcttcgcactggacccggtcgtggaaaaagaagagtggtgccgtattaccggtcgtaagaattaa

SEQ ID NO: 459551 - DNA, 966 bp, Shigella boydii
atgcgcatcggacaatatcagctcagaaatcgcctgatcgcagcgcccatggctggcattacagacagaccttttcggacgttgtgctacgagatgggagccggattgacagtatccgagatgatgtcttctaacccacaggtttgggaaagcgacaaatctcgtttacggatggtgcacattgatgaacccggtattcgcaccgtgcaaattgctggtagcgatccgaaagaaatggcagatgcagcacgtattaacgtggaaagcggtgcccagattattgatatcaatatgggttgcccggctaaaaaagtgaatcgcaagctcgcaggttcagccctcttgcagtacccggatgtcgttaaatcgatccttaccgaggtcgtcaatgcagtggacgttcctgttaccctgaagattcgcactggctgggcaccggaacaccgtaactgcgaagagattgcccaactggctgaagactgtggcattcaggctctgaccattcatggccgtacacgcgcctgtttgttcaatggagaagctgagtacgacagtattcgggcagttaagcagaaagtttccattccggttatcgcgaatggcgacattactgacccgcttaaagccagagctgtgctcgactatacaggggcggatgccctgatgataggccgcgcagctcagggaagaccctggatctttcgggaaatccagcattatctggacactggggagttgctgcccccactgcctttggcagaggttaagcgcttgctttgcgcgcacgttcgggaactgcatgacttttatggtccggcaaaagggtaccgaattgcacgtaaacacgtttcctggtatctccaggaacacgctccaaatgaccagtttcggcgcacattcaacgccattgaggatgctagcgaacagctggaggcgttggaggcatacttcgaaaattttgcgtaa

SEQ ID NO: 459552 - DNA, 297 bp, Shigella boydii
atgttcgaacaacgcgtaaattctgacgtactgaccgtttctaccgttaactctcaggatcaggtaacccaaaaacccctgcgtgactcggttaaacaggcactgaagaactattttgctcaactgaatggtcaggatgtgaatgacctctatgagctggtactggctgaagtagaacagcccctgttggacatggtgatgcaatacacccgtggtaaccagacccgtgctgcgctgatgatgggcatcaaccgtggtacgctgcgtaaaaaattgaaaaaatacggcatgaactaa

SEQ ID NO: 459553 - DNA, 885 bp, Shigella boydii
atgagaacaggatgtgaaccgacccggtttggtaatgaagctaagaccattattcacggtgatgcgcttgccgaacttaaaaagatccccgccgaaagtgtcgatctgatctttgccgacccaccatataacatcggtaaaaattttgatggtctgatcgaagcctggaaagaagatctgtttatcgactggctgtttgaagtgattgcagagtgccaccgcgttctgaaaaagcagggcagcatgtacatcatgaacagcacggaaaacatgccctttatcgatctccagtgccgcaagctttttaccatcaaaagtcgcatcgtctggtcatatgacagttctggagtacaggcgaaaaaacactacggctccatgtacgaccccatcctgatgatggtgaaagacgcaaagaactacacattcaacggtgatgctattctggtagaagccaaaaccggatcgcagcgcgcgttgatcgattatcgcgaaaatcctccacagccatacaatcatcaaaaagtaccgggtaacgtctgggattttccgcgcgtgcgttatttgatggatgaatatgagaaccacccgacgcaaaaaccggaagccttactgaaacgcattattctcgcctcttccaacccaggcgatatcgttctcgacccgtttgccggtagctttactaccggtgccgtagccgtctccagcgggcgaaaattcattggtattgagatcaacagcgagtacatcaaaatggggcttcgacggctggatgtcgcgtcgcattactctgcggaagaactggcgaaagtgaaaaaaagaaagaccggcaacctgtcaaaacgaagccggttaagcgaagttgaccccgatctcattgcaaagtaa

SEQ ID NO: 459554 - DNA, 180 bp, Shigella boydii
atgattcgcaagtattggtggctcgtcgttttcgctgtcttcgtttttctgtttgatactttactgatgcagtggattgaactgctgacaacagaaacagacaaatgccgtaatatgaactcagttaatccactaaaactggttaactgtgacgaactgaattttcaggacagaatgtga

SEQ ID NO: 459555 - DNA, 663 bp, Shigella boydii
atggcaaaaagaaccaaagccgaagctctgaagacccggcaagaactgattgaaactgccatcgcccagtttgcgcagcatggcgtaagcaagacgacgctcaacgacattgccgacgccgctaacgttacgcgtggcgctatctactggcacttcgaaaacaagactcaactgtttaatgagatgtggttgcaacagccttcattgcgggagttaatccaggaacacttgacggctggattagagcatgacccgtttcaacaattgcgtgaaaaattgattgtcggcttgcaatatattgccaaaattccccgccagcaggcgttgctgaaaatcttatatcacaaatgtgaatttaatgatgagatgctggccgagggagtgatacgcgaaaagatgggctttaatccgcagactctccgcgaagtattgcaggcgtgtcagcaacaaggttgtgtagcaaataacctcgatttagatgttgtgatgattattattaatggtgccttcagcggaattgttcaaaactggttaatgaatatggcgggttatgatctttataaacaagcacccgcgctggtcgataacgtattaagaatgttcatgccagatgaaaacataacgaaattaattcatcaaacgaatgaattaagtgtcatgtaa

SEQ ID NO: 459556 - DNA, 1158 bp, Shigella boydii
atgacgaaacatgccaggtttttcctcctgccctcctttattctgatctccgcggctttaatcgccggttgtaacgataagggagaagagaaagctcacgtcggtgaaccgcaggttaccgttcatattgtgaaaacggccccgttagaagttaagactgaattaccaggccgcaccaatgcttaccgtatagccgaagttcgcccacaggttagcgggatcgtactgaatcgtaatttcactgaaggcagcgatgtacaagcaggccagtccctgtaccagatcgatcccgcgacctatcaggcaaattatgacagcgcgaaaggcgaactggcgaaaagtgaagccgccgccgccatcgcgcatttgacggtaaaacgttacgttccgctcgtgggtacgaaatacatcagccagcaggagtacgaccaggccattgctgatgctcgccaggccgatgccgccgtgattgccgcaaaagccacagtcgaaagcgctcgcatcaatctcgcttataccaaagtgactgcgccaattagcggacgtatcggcaaatcgaccgtgaccgaaggcgctcttgtcactaatgggcaaacgactgaactggcgactgtccagcagctcgatcctatctacgttgatgtgacccaatccagcaacgattttatgaggctgaagcaatccgtagagcaaggaaatttgcataaggaaaacgccaccagcaacgtagagttggtcatggaaaacggtcaaacctatcccctgaaaggtacgctgcaattctctgatgtgaccgttgatgaaagcaccggctccataaccctacgtgctgtcttccctaacccgcaacatacgcttttgccgggtatgtatgtgcgtgcacggattgatgaaggcgtccaacctgacgccattcttatcccgcaacaaggcgttagccgcacaccgcgtggtgatgcaaccgtgctgattgttaacgataaaagtcaggtggaagcgcgccctgtcgttgccagtcaggcgattggcgataaatggttgattagcgaaggtctgaaatctggcgatcaagtcattgtcagcggcctgcaaaaagcgcgtccgggagagcaggttaaagccactaccgatacccccgcagatactgcatcgaagtaa

SEQ ID NO: 459557 - DNA, 1710 bp, Shigella boydii
atggcaaacttttttattcgacgaccgatatttgcatgggtgctggccattattctgatgatggcgggcgcactggcgatcctacaattgcccgtcgctcagtatccaaccattgcaccgcctgcggtttctgtttcggcaaactatccaggtgctgatgcgcagaccgtgcaggatacggtgacgcaggttatcgaacagaatatgaatggtatcgataacctgatgtatatgtcctccaccagcgattccgccggtagcgtgacaattactcttaccttccagtccgggaccgatcctgatatcgcgcaagtgcaggtgcagaacaaactccagctcgccacgccgttgctgccgcaggaggttcagcagcaggggatcagtgttgaaaagtccagtagcagctatttgatggtggcgggttttgtctctgataacccaggcaccacacaggacgatatctcggactatgtggcctctaacgttaaagatacgcttagccgtctgaatggcgtcggtgacgtacagcttttcggcgcacagtatgcgatgcgtatctggctggacgccgatctgctaaacaaatataaactgacaccggttgatgtgattaaccagttgaaggtacagaacgatcagatcgctgccggacagttgggcggaacgccagcgttaccagggcaacagttgaatgcctcgattattgctcaaacgcggttaaaaaatccggaagaattcggcaaagtgaccctgcgcgtaaacagtgacggctcggtggtacgcctgaaagatgtcgcacgggttgaacttggcggtgaaaactataacgttatcgctcgtatcaacggaaaaccggcggcgggcctggggattaagctggcaaccggcgcgaatgctctcgataccgcgaaagccattaaggcaaaactggcggaattacagccattcttcccgcagggaatgaaggttctctacccttatgacaccacgccattcgtccagctttctattcacgaagtggtaaaaacgctgttcgaagccattatgctggtgttcctggtgatgtatctgttcttgcagaatatgcgagcaacgctgatccccaccattgcggtacccgtggtgttgttagggacgtttgccatcctcgccgcttttggttactccatcaacacactaacgatgttcgggatggtgcttgccatcgggctgctcgtcgatgatgcgatagtggtggtggagaacgtcgagcgcgtgatgatggaggataagctcccgccaaaagaagcgacggaaaaatcgatgtcgcaaattcagggcgcactggtgggtatcgcgatggtgctgtcagcggtatttattccgatggcattcttcggcggttctactggggcaatttatcgccagttctctatcaccatcgtttcggcaatggcactttctgttctggtggcattgattcttacccctgcgttatgtgcaacgctgcttaaacccgtctctgctgagcatcacgaaaataagggcggtttcttcggctggtttaataccaccttcgatcatagcgttaaccactacaccaacagcgtcggcaaaatcctcggttccacaggacgatatttactgatctatgcgctgattgttgcaggaatggtggtgttgtttttacgtcttccttcttacctgaagaggatcagggtgtctttctga

SEQ ID NO: 459558 - DNA, 291 bp, Shigella boydii
atgacaaattatgtgaattgtaaaaatagtgaagggagcgggaactatagaaagtttttaaagagtgagtggaagaatatcttattaatttttatgggtttcactgaaaataataaaggcatccgaaagtgcctttatgtttctgatttatcctttaaagcaacggcggatcaccacaaagaacaccggtacgaagaagattgccagcaacgttgcagagaccattccgcccattaccccgatacccactgcgttctgcgcgccactgcctgcaccgttactgatagctag

SEQ ID NO: 459559 - DNA, 222 bp, Shigella boydii
atgaaaagattaattcctgtggcattgctcaccgcattgctggcgggctgtgctcacgattcgccctgcgttccggtttatgacgatcagggtcgtctggttcacaccaatacctgtatgaaaggcacgactcaggataactgggaaacggctggggctattgccggcggggcagcggctgttgctggcctgacgatggggatcatcgctctgtcgaaataa

SEQ ID NO: 459560 - DNA, 1026 bp, Shigella boydii
atgaaaaagatgatgatagccacactggctgccgccagcgtgctgcttgccgttgcaaatcaggcgcatgctggcgcgacgcttgatgccgttcagaaaaaaggttttgtgcaatgcgggatcagtgatggattacctgggttctcttatgccgatgcagacggtaagttttcaggtattgatgttgatgtttgtcgtagtgttgccgctgctgtatttggtgacgacacgaaagtgaaatataccccactcacagcaaaagaacgcttcacggctttacagtcaggggaagtggatttgctctcccgtaatacgacctggacttcatctcgcgacgccgggatgggaatggcatttactggcgtcacttattacgacggcattggcttcctgacgcacgataaagcggggctaaaaagcgcgaaagaactggatggcgctaccgtctgtattcaggcgggtactgataccgaactcaacgttgccgactatttcaaggcaaacaatatgaagtacacaccggtgactttcgatcgctctgacgaatcagcgaaggcactggaatctggtcgctgcgatacgctggcctcggatcagtcgcaactgtatgccctgcgcatcaaattaagcaacccagctgaatggattgtcttaccggaggttatctctaaagaaccgcttgggccggtagttcgtcgtggcgatgatgaatggttctcgattgtacgctggacgcttttcgccatgctgaatgctgaagagatgggcatcaattcccagaacgtcgatgaaaaagcggctaatccagcaacgcctgatatggcacatctgctgggtaaagaaggcgattacggcaaggatctgaagttggataataaatgggcctataacatcatcaaacaggtgggtaactactcggaaattttcgagcgtaacgtaggttcagaaagcccgctgaaaattaaacgtgggcaaaataatctctggaataacggcggtattcagtacgcgccgcccgtgcgttaa

SEQ ID NO: 459561 - DNA, 186 bp, Shigella boydii
atgtctcatcgccgctcaaccgttaaaggctcactctcctttgccaaccctacggttcgtgcctggttattccagatccttgccgttgttgctgttgtcggaattgttggttggttatttcacaacactgtaacgaatctcagtaagcgtcaacggagcaccgtattgacgcttatttattggtga

SEQ ID NO: 459562 - DNA, 186 bp, Shigella boydii
atgttcttcggcagcgatcacggtggagagcgtggtgcgctactgtacgggctgatcggcacctgccgactgaacggtatcgatccggaagcgtatctgcgctatatcctgagcgtactgccggaatggccttccaaccgtgttgacgaactcctgccatggaacgtagcactcaccaataaataa

SEQ ID NO: 459563 - DNA, 1176 bp, Shigella boydii
atgacctttcgcaattgtgtcgccgtcgatctcggcgcatccagtgggcgcgtgatgctggcgcgttacgagcgtgaatgccgcagcctgacgctgcgcgaaatccatcattttaacaatggcctgcatagccagaacggttatgtcacctggaatgtggatagcctggaaagtgccattcgccttggattaaacaaggtgtgcgaggaagggattcgtatcgatagcattgggattgatacctggggcgtggactttgtgctgctcgaccaacagggtcagcgtgtgggcctgcccgttgcttatcgcgatagccgctccaatggcctaatggcgcaggcacagcaacaactcggcaaacgcgatatttatcaacgtagcggcatccagtttctgcccttcaatacgctttatcaactgcgtgcgctgacggagcaacaacctgaacttattccacacattgctcacgctctgctgatgccggattacttcagctatcgcctgaccggcaagatgaactgggaatataccaatgccaccaccacacaactggtcaatatcaatagcgacgactgggacgagtcgctactggcgtggagcggggccaacaaagcctggtttggtcgcccgacgcatccgggtaatgtcattgggcactggatttgcccgcagggtaatgagattccggtggtcgccgttgccagccatgataccgccagcgcggttatcgcctcgccgttaaacggttcacgcgctgcttatctctcttctggcacctggtcattgatgggcttcgaaagccagacgccatttaccaatgacacggcgctggcagccaacataaccaatgaaggcggggcggaaggtcgctatcgggtgctgaaaaatattatgggcttatggctgcttcagcgagtgcttcaggagcggcaaatcaacgatctcccggcgcactttctctcccactgcgagcgcattaaagccaccaacggtaaagatcgggtgatcatgcactgccacgccaccaacctgatcgccctcacctatgtactggaaaacgacaccgcggtctttactcgccaactgtgggaaggcagcaccgagtgtctggtggtattcccggatggcgttggcattctgccgtggatggtgcccggcacggacgaaatcgggtaa

SEQ ID NO: 459564 - DNA, 837 bp, Shigella boydii
atgaccgtattacatagtgtggatttttttccgtctggtaacgcgtccgtggcgatagaaccccggctcccgcaggcggattttcctgaacatcatcatgattttcatgaaattgtgattgtcgaacatggcacgggtattcatgtgtttaatgggcagccctataccatcaccggtggcacggtctgtttcgtacgcgatcatgatcggcatctgtatgaacataccgataatctgtgtctgaccaatgtgctgtatcgctcgccggatcgatttcagtttctcgccgggctgaatcagttgctgccacaagaactggatgggcagtatccgtctcactggcgcgttaaccacagcgtattgcagcaggtgcgacagctggttgcacagatggaacagcaggaaggggaaaatgatttaccctcgaccgccagtcgcgagatcttgtttatgcaattactgctcttgctgcgtaaaagcagtttgcaggagaacctggaaaacagcgcatcacgtctcaacttgcttctggcctggctggaggaccattttgccgatgaggtgaattgggatgccgtggcggatcaattttctctttcactgcgtacgctacatcggcagcttaagcagcaaacgggactgacgcctcagcgttacctgaaccgcctgcgactgatgaaggcccgacatctgctacgtcacagcgaggccagcgttactgacatcgcctatcgctgcggattcagcgacagtaaccacttttcgacgctttttcaccgagagtttaactggtcaccgcgtgatattcgccagggacgggatggctttctgcaataa

SEQ ID NO: 459565 - DNA, 939 bp, Shigella boydii
atggctttctgcaataacgcgaatcttctcaacgtatttgtacgccatattgcgaataatcaacttcgttctctggccgaggtagccacggtggcgcatcagttaaaacttctcaaagatgatttttttgccagcgaccagcaggcagtcgctgtggctgaccgttatccgcaagatgtttttgccgaacatacacatgatttttgtgagctggtgattgtctggcgcggtaatggtctgcatgtactcaacgatcgcccttatcgcattacccgtggcgatctcttttacattcatgctgacgataaacactcctacgcttccgttaacgatctggttttgcagaatattatttattgcccggagcggctgaagctgaatcttgactggcagggagcgattccgggatttagcgccagcgcagggcaaccacactggcgcttaggtagcgtggggatggcgcaggcgcggcaggttatcggtcagcttgagcatgaaagtagtcagcatgtgtcgtttgctaacgaaatggctgagttgctgttcgggcagttggtgatgttgctgaatcgccatcgttacaccagtgattcgttgccgccaacatccagcgaaacgttgctggataagctgattacccggctggcggctagcctgaaaagtccctttgcgctggataaattttgtgatgaggcatcgtgcagtgagcgcgttttgcgtcagcaatttcgccagcagactggaatgaccatcaatcaatatctgcggcaggtcagagtgtgtcatgcgcaatatcttctccagcatagccgcctgttaatcagtgatatttcgaccgaatgtggctttgaagatagtaactatttttcggtggtgtttacccgggaaaccgggatgacgcccagccagtggcgtcatctcaattcgcagaaagattaa

SEQ ID NO: 459566 - DNA, 1035 bp, Shigella boydii
atgagtaacgcgattacgatggggatattttggcatttgatcggcgcggccagtgcagcctgtttttacgctccgttcaaaaaagtaaaaaaatggtcatgggaaaccatgtggtcagttggtgggattgtttcgtggattattctgccgtgggccatcagcgccctgttactgccgaatttctgggcgtattacagctcgtttagtctctctacgctgctgcctgtttttctgttcggcgctatgtgggggatcggtaatatcaactacggcctgaccatgcgttatctcggcatgtcgatgggaattggcatcgccattggcattacgttgattgtcggtacgctgatgacgccaattatcaacggcaatttcgatgttctgcttaataccgaaggcggacgcatgacgttgctcggcgttctggtggcgctgattggtgtagggattgtgactcgcgccgggcagttgaaagagcgcaaaatgggcattaaagccgaagagttcaacctgaaaaaagggctggtgctggcggtgatgtgcggcattttctctgccggtatgtcttttgcgatgaacgccgcaaaaccgatgcatgaagccgctgccgcactgggcgtcgatccactgtatgtcgctctgccaagctatgtcatcatcatgggcggcggcgcgatcatcaacctcggtttctgcttcattcgtctggcaaaagtgaaggatttgtcgctaaaagccgacttctcgctggcaaaaccgctgatcattcacaatgtgttactctcagcactgggcgggttgatgtggtatctgcaattctttttctatgcctggggccacgcccgcattccggcgcagtatgactacatcagttggatgctgcatatgagtttctatgtattgtgcggcggtatcgtcgggctggtgctgaaagagtggaacaatgcaggtcgccgtccggtaacggtgttgagcctcggttgtgtggtgattattgtcgccgccaacatcgtcggcatcggcatggcgaattaa

SEQ ID NO: 459567 - DNA, 621 bp, Shigella boydii
atgagctataccctgccatccctgccgtatgcttacgatgccctggaaccgcacttcgataagcagaccatggaaatccaccacaccaaacaccatcagacctacgtcaacaacgccaacgcggcgctggaaagcctgccagaatttgccaacctgccggttgaagagctgatcaccaaactggaccagctgccagcagacaagaaaaccgtactgcgcaacaacgctggcggtcacgctaaccacagcctgttctggaaaggtctgaaaaaaggcaccaccttacagggtgacctgaaagcggctatcgaacgtgacttcggctccgttgataacttcaaagcagaatttgagaaagcggcagcttcccgctttggttccggctgggcatggctggtgctgaaaggcgataaactggcggtggtttctactgctaaccaggattccccgctgatgggtgaagctatttctggcgcttccggcttcccgattctgggcctggatgtgtgggaacatgcttactacctgaaattccagaaccgccgtcccgactacatcaaagagttctggaacgtggtgaactgggatgaagcagcggcacgtttcgcggcgaaaaaataa

SEQ ID NO: 459568 - DNA, 912 bp, Shigella boydii
atgcagataaaacgctcgattgagaaaatcccgggggggatgatgctcgtcccgctattccttggcgcactgtgccacaccttctcgccgggggcggggaaatattttggatcattcaccaacgggatgattaccggtacggtgtccattctggcggtgtggtttttttgcatgggggcgtcaataaaattaagcgcgacgggaacggtattgcgtaaatccggtacgctggtggtaacaaaaattgccgtcgcgtgggtggttgcggcaattgcctcgcgcattattccggaacatggtgttgaagttggattctttgccggactttcaacgctggcgctggtagcggcgatggatatgaccaatggcggactttacgcttccatcatgcagcagtacggcacaaaagaagaagctggggcatttgtgttgatgtcgttggagtccgggccgctcatgacgatgattattctgggcactgcagggattgcctcgtttgaaccgcatgttttcgtcggcgcagtattaccgttcttggtgggctttgccctggggaaccttgaccctgaattacgagaatttttcagcaaagcggtgcaaacgctgattccattctttgccttcgcgctgggcaataccattgatttgactgtgattgcccagactggtttgctggggatcctgttgggtgtggcagtaattatcgtgaccggtattccgttgattatcgccgataaattgattggcggtggcgatggcactgccggaattgccgcttccagttccgcaggggccgcggtagcgacggcggtcattgtgacttcgattctggtgccaattcttacctctatctggtcacgtaaagtcaaagccagagcagcgaaaatcgaaattttaggtacggtgaaataa

SEQ ID NO: 459569 - DNA, 675 bp, Shigella boydii
atgcgatatccggttgatgtatacacaggcaagattcaggcttatcccgaaggcaaacccagcgcaattgccaaaatccaggttgatggtgagttgatgctgacggagctggggctggaaggtgacgagcaggcggagaaaaaggttcacggtgggccagacagagcgctgtgtcattatcctcgtgagcattatctctactgggcgcgggaatttccggaacaggcggagttgtttgttgcgcctgcgtttggtgaaaacctctcaaccgacggcctgacggaaagtaatgtttatatgggcgatattttccgctggggagaggcattaattcaggtcagccagccgcgctcaccttgctataaactcaattaccattttgatatcagcgatatagcgcagttgatgcaaaacacaggtaaggtggggtggttgtatagcgtgatagcgccagggaaagtgtctgcggacgcgccgctggagttggtttcccgtgtcagcgatgtgaccgtgcaggaggctgccgccatcgcatggcatatgccgtttgatgacgatcagtatcaccgtttactctccgccgccgggttatcgaaaagctggacgcggacgatgcaaaagcgccgactgagcggcaagatcgaagattttccccgccggttgtggggaaaataa

SEQ ID NO: 459570 - DNA, 1374 bp, Shigella boydii
atgataggcagcttaaccgcgcgcatcttcgccatcttctggctgacgctggcgctggtgttgatgttggttttgatgttacccaagctcgattcacgccagatgaccgagcttctggatagcgaacagcgtcaggggctgatgattgagcagcatgtcgaagcggagctggcgaacgatccgcccaacgatttaatgtggtggcggcgtctgttccgggcgattgataagtgggcaccgccaggacagcgtttgttattggtgaccaccgaaggccgcgtgatcggcgctgaacgcagcgaaatgcagatcattcgtaactttattggtcaggccgataacgccgatcatccgcagaagaaaaagtatggccgcgtggaactggtcggtccgttctccgtgcgtgatggcgaagataattaccaactttatctgattcgtccggccagcagttctcaatccgatttcattaacttactgtttgaccgcccgctattactgctgattgtcaccatgttggtcagtacgccgctgctgttgtggttggcctggagtctggcaaaaccggcgcgtaagctgaaaaacgctgccgatgaagttgcccagggaaacttacgccagcacccggaactggaagcggggccacaggaattccttgccgcaggtgccagttttaaccagatggtcaccgcgctggagcgcatgatgacctctcagcagcgtctgctttctgatatctctcacgagctgcgcaccccgctgacgcgtctgcaactgggtacggcgttactgcgccgtcgtagcggtgaaagcaaggaactggagcgtattgaaaccgaagcgcaacgtctggacagcatgatcaacgatctgttggtgatgtcacgtaatcagcaaaaaaacgcgctggttagcgaaaccatcaaagccaaccagttgtggagtgaagtgctggataacgcggcgttcgaagccgagcaaatgggcaagtcgttgacagttaacttcccgcctgggccgtggccgctgtacggcaatccgaacgccctggaaagtgcgctggaaaacattgttcgtaatgctctgcgttattcccatacgaagattgaagtgggctttgcggtagataaagacggtatcaccattacggtggacgacgatggtcctggcgttagcccggaagatcgcgaacagattttccgtccgttctatcggaccgatgaagcacgcgatcgtgaatctggcggtacaggattggggctggcgattgttgaaaccgccattcagcagcatcgtggctgggtgaaggcagaagacagcccgctgggcggtttacggctggtgatttggttgccgctgtataagcggagttaa

SEQ ID NO: 459571 - DNA, 699 bp, Shigella boydii
atgaataaaatcctgttagttgatgatgaccgagagctgacttccctattaaaggagctgctcgagatggaaggcttcaacgtgattgttgcccacgatggggaacaggcgcttgatcttctggacgacagcattgatttacttttgcttgacgtaatgatgccgaagaaaaatggtatcgacacattaaaagcacttcgccagacacaccagacgcctgtcattatgttgacggcgcgcggcagtgaacttgatcgcgttctcggccttgagctgggcgcagatgactatctcccgaaaccgtttaatgatcgtgagctggtggcacgtattcgcgcgatcctgcgccgttcgcactggagcgagcaacagcaaaacaacgacaacggttcaccgacactggaagttgatgccttagtgctgaatccaggccgtcaggaagccagcttcgacgggcaaacgctggagttaaccggtactgagtttaccctgctctatttgctggcacagcatctgggtcaggtggtttcccgtgaacatttaagccaggaagtgttgggcaaacgcctgacgcctttcgaccgcgctattgatatgcacatttccaacctgcgtcgtaaactgccggatcgtaaagatggtcacccgtggtttaaaaccttgcgtggtcgcggctatctgatggtttctgcttcatga

SEQ ID NO: 459572 - DNA, 513 bp, Shigella boydii
atgcgcatagttaccgctgccgtcatggcctcaacgctggcagtcagttcattaagccacgctgctgaagtcggttcaggcgataactggcatccgggtgaagaacttacgcagcgcaggacgcagcgcagtacgcagagccatatgttcgacggcataagtttaaccgaacatcagcgtcagcagatgcgagatcttatgcaacaggcccggcacgaacagcctcctgttaatgttagcgaactggagacaatgcatcgccttgtcaccgcagaaaattttgatgaaaacgctgtgcgcgcacaggcagaaaaaatggcgaatgagcaaattgctcgtcaggttgagatggcaaaagtccgcaaccaaatgtatcgcctgttaacgccggagcagcaagcggttttaaacgagaaacatcaacaacgaatggagcagttgcgtgacgtgacgcaatggcaaaaaagttcatcgttgaagctattgagtagtagcaactcacgttcccagtag

SEQ ID NO: 459573 - DNA, 903 bp, Shigella boydii
atgaatcaatcttatggacggctggtcagtcgggcggcgattgctgcgacggcgatggcttcgttgctattgctgattaaaatttttgcatggtggtataccgggtcggtgagtattctcgccgcgctggtggattcgctggtggatatcggcgcgtcgttgacgaatttactggtggtgcgatattccctgcaacctgccgacgataatcactcgtttggtcacggtaaagcagagtccctcgcggcgctggcgcaaagtatgtttatctctggttcggcactattcctgtttttgacgggtattcaacatctgatatctccaacaccgatgatagatccaggcgtcggggttatcgtgacaattgtggcgctaatttgtacgattatccttgtctcgtttcagcgttgggtggtgcgccggacgcaaagccaggcggtgcgggctgatatgctacattaccagtctgatgttatgatgaacggcgcaattctgctggcgctggggttgtcctggtacggctggcatcgcgccgatgctctgtttgcattgggaatcggcatctatattttatatagcgcgttacgcatgggatatgaggcggtacagtcattactggatcgcgcattgcctgatgaggaacggcaagaaattattgatatcgtgacttcctggccgggtgttagcggcgctcacgatcttcgcacgcggcagtcagggccgacccgctttattcagattcatttggaaatggaagactctctgcctttggttcaggcacatatggtggcggatcaggtagagcaggctattttacggcgttttccgggatcggatgtaattatccatcaggacccctgttccgtcgtacccagggagggtaaacggtctatgctttcataa

SEQ ID NO: 459574 - DNA, 963 bp, Shigella boydii
atgattaagaaaatcggtgtgttgacaagcggcggtgatgcgccaggcatgaacgccgcaattcgcggggttgttcgttctgcgctgacagaaggtctggaagtaatgggtatttatgacggctatctgggtctgtatgaagaccgtatggtacagctagaccgttacagcgtgtctgacatgatcaaccgtggcggtacgttcctcggttctgcgcgtttcccggaattccgcgacgagaacatccgcgccgtggctatcgaaaacctgaaaaaacgtggtatcgacgcgctggtggttatcggcggtgacggttcctacatgggtgcaatgcgtctgaccgaaatgggcttcccgtgcatcggtctgccgggcactatcgacaacgacatcaaaggcactgactacactatcggtttcttcactgcgctgagcaccgttgtagaagcgatcgaccgtctgcgtgacacctcttcttctcaccagcgtatttccgtggtggaagtgatgggccgttattgtggcgatctgacgttggctgcggccattgccggtggctgtgaattcgttgtggttccggaagttgaattcagccgtgaagacctggtaaacgaaatcaaagcgggtatcgcgaaaggtaaaaaacacgcgatcgtggcgattaccgaacatatgtgtgatgttgacgaactggcgcatttcatcgagaaagaaaccggtcgtgaaacccgcgcaactgtgctgggccacatccagcgcggtggttctccggtgccttacgaccgtattctggcttcccgtatgggcgcttacgctatcgatctgctgctggcaggttacggcggtcgttgtgtaggtatccagaacgaacagctggttcaccacgacatcatcgacgctatcgaaaacatgaagcgtccgttcaaaggtgactggctggactgcgcgaaaaaactgtattaa

SEQ ID NO: 459575 - DNA, 990 bp, Shigella boydii
atgaacaagtggggcgtagggttaacatttttgctggcggcaaccagcgttatggcaaaggatattcagcttcttaacgtttcatatgatccaacgcgcgaattgtacgaacagtacaacaaggcattcagcgcccactggaaacagcaaactggtgataacgtggtgatgcgtcagtcacacggtggttcaggtaaacaagcgacgtcggtaatcaacggtattgaagctgatgttgtcacgctggctctggcctatgacgtggacgcaattgcggaacgcgggcggattgataaagagtggatcaaacgtctgccggataactccgcaccgtacacttccaccattgttttcctggtgcgtaagggcaatccgaagcagatccatgactggaacgatctgattaaaccgggtgtttcggtgatcacgcctaatccgaaaagctctggtggcgcacgctggaactacctggctgcctggggctacgcgctgcatcacaacaacaacgatcaggcaaaagcacaggattttgttcgggcactgtataaaaacgtcgaagttctggattctggcgcgcgcggctccactaacacctttgtcgagcgcgggattggcgatgtactgatcgcctgggaaaacgaagctctgctggcagcgaatgaactggggaaagataaattcgaaatcgtcacgccgagtgagtctatcctcgcagagccaaccgtgtcggtggtcgataaagtggtcgagaaaaaaggcaccaaagaggtggcggaagcctacctgaaatatctctactcgccagaaggtcaggaaattgccgcgaaaaactactaccgtccgcgcgacgctgaagtagcgaaaaagtacgaaaatgcgtttccaaagctgaagttattcaccattgatgaagagttcggcggctggacgaaagcgcaaaaagagcattttgctaacggcggtacgttcgatcagatcagcaaacgctga

SEQ ID NO: 459576 - DNA, 756 bp, Shigella boydii
atgaaaaaagcgggtcttctttttttggtgatgatagttatcgccgttgtggctgccggtattggttactggaaattaaccggtgaagagtcggatacattacgtaagattgtccttgaggaatgtttgcccaatcagcagcaaaatcaaaatccttcgccatgtgcggaagtcaaacccaatgccggatacgtggttttaaaagatcttaatggcccactgcaatatctgttgatgccaacgtatcgtattaacggtactgaaagtcctttgttgaccgatccttcaacgccgaacttcttttggttggcctggcaggcgcgtgattttatgagcaaaaagtacggccagccggttcccgatcgcgcggtttctttggcgatcaactcccgcaccgggcgtacgcaaaaccattttcatattcatatctcttgtattcgtcctgatgtgcgcgaacaactggataacaatctggcgaacatcagcagccgctggttgccactgccaggtggtttgcgcgggcatgaatacctggcgcgtcgggtaacggaaagcgaactggtacaacgcagcccatttatgatgctggcagaagaagtacctgaggcgcgggaacatatgggaagctacgggctggcgatggtacggcagagtgataactcatttgtattgctggcgacacaacgaaatctactgacgcttaaccgtgcttcagccgaggaaattcaggatcatcagtgtgagattttgcgttaa

SEQ ID NO: 459577 - DNA, 768 bp, Shigella boydii
atgcgacatcctttagtgatgggtaactggaaactgaacggcagccgccacatggttcacgagctggtttctaacctgcgtaaagagctggcaggtgttgctggctgtgcggttgcaatcgcaccaccggaaatgtacatcgatatggcgaagcgcgaagctgaaggcagccacatcatgctgggtgcgcaaaacgtggacctgaacctgtccggcgcattcaccggtgaaacctctgctgctatgctgaaagacatcggcgcacagtacatcatcatcggccactctgaacgtcgtacttaccacaaagagtctgacgaactgatcgcgaaaaaattcgcggtgctgaaagagcagggtctgactccggttctgtgcatcggtgaaaccgaagctgaaaacgaagcgggcaaaactgaagaagtttgcgcacgtcagatcgacgcggtactgaaaactcagggtgctgcggcattcgaaggtgcggttatcgcttacgaacctgtatgggcaatcggtactggcaaatctgcaactccggctcaggcacaggctgttcacaaattcatccgtgaccacatcgctaaagttgacgctaacatcgctgaacaagtgatcattcagtacggcggctctgtaaacgcgtctaacgctgcagaactgtttgctcagccagacatcgacggcgcgctggttggcggtgcgtctctgaaagctgacgctttcgcagtaatcgttaaagctgcagaagcggctaaacaggcttaa

SEQ ID NO: 459578 - DNA, 600 bp, Shigella boydii
atgaagccagggtgtacgctgttttttctcttatgttctgcattaaccgttacaacaacggcgcatgcacaaacaccagatacggcaacgaccgcgccttatctgctggctggagcccctactttcgatctctccatcagccagtttcgagaagactttaacagccagaatcctagcctgccactgaacgaatttcgtgccatcgacagcagtcccgacaaagccaatctcactcgtgctgcaagtaaaattaacgagaacttgtatgcttctacagcgctggagcgcggtaccttaaaaatcaaaagcattcaaatgacctggctacccatccaggggccagagcaaaaagcagcgaaagcgaaagctcaggaatacatggcagcagtgatccgcacactcaccccattaatgaccaaaacacaaagccagaaaaaactgcagtcgctgctaacggcggggaaaaacaaacgttattacaccgagacagaaggtgcactgcgttatgttgtcgcggacaacggcgaaaaggggctgaccttcgctgttgaaccgattaagctggcgctatctgaatcgcttgaaggtttgaataaatga

SEQ ID NO: 459579 - DNA, 390 bp, Shigella boydii
atgaccatacagcaatggttattctcatttaaagggcgtattggacgccgtgatttctggatttggataggcctgtggttcgcaggcatgctggtgcttttctcactggcgggtaaaaatttactcgatattcagaccgcggcgttttgccttgtgtgcttgctttggccaacagcggcagtaactgttaagcgcttgcatgatcgcgggcgttccggcgcatgggcatttctgatgattgtggcgtggatgctgctggcgggtaactgggcgattttaccgggtgtctggcaatgggcggtggggtgttttgtcccgacgttgattctggtgatgatgcttatcgatcttggtgcgtttgttggcacacaaggcgaaaataaatattga

SEQ ID NO: 459580 - DNA, 345 bp, Shigella boydii
atgctgttgaaaagcaaattccccagccagttggtggacgccagcgtagctaatgaattaccgcaaatgaacagcaaaccgttagtctggctggaaggtgtttcatcggtactgttcggtgtagccgcattctcgaccttttatgtgattgtggtgtggatgcccaaatatgcgatggcttttgctggtatgtcagaagctgaggcattaaaaaccatctcttattacagtatgggctcgttggtctgtgtctttatttttgccgcactactgaaaaaaatggtccggcccatctgggctaatgtatttaactctgcactggcggtaatgctgccaacttactga

SEQ ID NO: 459581 - DNA, 324 bp, Shigella boydii
atgcgcacctggattgcccagaccggtgacagtgaaagctggcgtcagtgggaaaatggcaagtgtgccattcctgatcgtgtagtcgagcaactgttggctatgcgtcagcaaagaaaaaaacatcttcatgccatcatagagaaaataaataaccgcatcggcaacaacaccatgcgttttttccccgacttaaccgcatttcaacgagtctaccctgatggcaattttattgactggaagatctatcaatcggtagccgctgaaggtaatgctgttgaaaagcaaattccccagccagttggtggacgccagcgtagctaa

SEQ ID NO: 459582 - DNA, 1113 bp, Shigella boydii
atggtaaatgttcgtcagcccagggatgtcgcacaaattctgctttcggtgctgtttttagccatcatgattgtggcatgtctgtggattgttcaaccctttattctcggctttgcatgggccggtacggtggttatcgccacctggccggtattgttacgtttgcaaaagatcatgtttggccgccgctctctcgccgttctggtgatgacgctgttattagtgatggtgtttatcatccctattgctttgctggttaacagtatcgtcgacggcagcggcccgctaattaaagccatttccagcggcgacatgacgttacccgatctggcgtggcttaataccattccggtgattggcgcgaagctgtatgcaggctggcacaacttgctggatatgggggggacggcgatcatggcgaaagtccgcccttatattggcaccaccaccacctggttcgttgggcaggcggcgcatatcgggcgctttatggtgcattgtgcgctgatgcttctcttcagtgccctgctgtactggcgcggtgaacaggtggcacaaggcattcgccattttgcaacccgtctggcaggcgttcgcggagatgccgccgtactgctggcggcacaggctatccgcgcggtggcgctgggtgtggtggtgacggcgttagtacaggcagtgcttggcggtatcggcctcgccgtatccggcgtaccttatgcaacgttgctaacggtgttaatgatcctctcctgccttgtccagcttggcccgttgccggtactgattccggcgattatctggctctactggactggcgataccacctggggaacggtattgttagtgtggagcggtgtggttggcacgctggataacgtcatccgcccaatgttaattcgcatgggtgccgatttaccgctgatcctgatcctctctggtgttattggtggtttgattgctttcgggatgatcggtctgtttattggtccggttctgttagccgtttcctggcgtctgtttgccgcgtgggtggaagaagtcccgccgccgacggaccaaccggaagaaattctcgaagaacttggcgaaatcgagaaaccgaataagtaa

SEQ ID NO: 459583 - DNA, 3057 bp, Shigella boydii
atgattccacagatttcccaggcacccggcgtcgttcaactggtgcttaattttttgcaagagctggagcaacaaggttttaccggcgatacggcgacaagttatgccgatcgtctgacaatgtcgaccgacaacagtatttaccaacttctccccgatgcggtggtatttccgcgttcaaccgcagatgtggcgctgatcgcccgtcttgccgcgcaggaacgctattcatcgctgatctttaccccccgcggcggcggcaccggcactaacggtcaggcgctcaaccaggggattattgttgatatgtcccgccatatgaaccgcatcatcgaaattaaccctgaagagggctgggtgcgcgttgaggccggggtgataaaagatcaactcaatcagtacctgaaaccgttcggctacttttttgcgccggaactttcgaccagcaaccgggcaacgctcggtgggatgatcaataccgatgcatccggtcagggatcgctggtctatggcaaaacgtcagatcacgtacttggcgtacgcgcggtgttgttggggggcgatattctcgatacgcaacctttacccgtcgaattggcggaaacgctgggtaaatccaataccacaatcgggcgaatttataacacggtttatcaacgttgccgtcagcaacgccagttaattatcgacaacttccccaaacttaaccgctttcttaccggttacgatctgcgtcatgtctttaacgatgagatgaccgagttcgacctgacgcgcattctgacgggttcagaagggacgctggcctttattaccgaagcgcggctggatattacgcgcttgcctaaagtgcgccgtctggtgaacgtcaaatatgactcttttgactctgcgctgcgtaacgcgccgtttatggttgaggcgcgggcgctttcggtagagacggtggactcaaaagtgctgaatctggcgcgggaagatattgtctggcattccgtcagcgagttgattaccgatgtgcctgaccaagagatgctcgggctgaacattgtggaatttgctggtgatgatgaggcgctgattgatgagcgggtaaatgcactctgtgcgcggttggatgagctgatcgccagtcatcaagcaggtgtcatcggctggcaggtgtgccgtgagctggcgggggttgaacgtatctatgcaatgcgcaaaaaagccgttggtctgcttggcaatgccaaaggtgccgctaagccaattccgtttgctgaggatacctgcgtaccaccggaacacctggcggattatattgctgaatttcgcgcgctgctcgacagccacggcttaagctacggtatgttcggtcacgtcgacgcaggtgtcttgcacgtccgtccagcgctggatatgtgcgatcctcaacaagagattttgatgaagcaaatctctgatgacgtggtggcgctgactgcgaaatacggtggtttgttgtggggcgagcacggcaaaggttttcgcgctgaatacagcccggcgtttttcggtgaggaactttttgcagaactgcgcaaagtgaaagcggcatttgacccgcataaccgactcaacccagggaagatttgcccgccagaaggtctcgatgcgccgatgatgaaagtggacgcggtgaagcgcggtacattcgatcggcagatccccattgcggtacgccagcagtggcgcggtgcgatggagtgtaacggcaacggtttatgcttcaactttgatgcccgtagtccgatgtgtccgtcgatgaagatcacccagaaccggattcattcaccgaaagggcgcgcaacgctggtgcgtgaatggctgcgtttgttggcggatcgcggcgttgatccactcaaactggaacaagaactgcctgaatccggcgtcagtttgcggacgttaattgcccgcacgcgcaatagctggcatgcgaataaaggcgaatatgacttctcacacgaagtcaaagaggcgatgtcgggctgtctggcctgtaaagcgtgttcgaccctgtgccccatcaaaattgatgtgccggagtttcgctctcgttttctgcagctctatcacacccgttatttacgcccgctgcgcgaccacctcgtcgctacggtcgagagctacgcgccgctgatggcacgcgcgccgaaaacctttaacttcttcattaaccagccgctggtgcgcaaactctcggaaaaacatatcggcatggttgatttgccgctgctgtcggtcccctcgctacaacaacaaatggtggggcatcgctcggcaaacatgacgctggaacagcttgaatctctcaatgcagagcagaaagcgcgcacagtgttggtggtgcaggacccctttaccagctattacgatgcgcaagtggtggcggattttgtccgtctggtcgaaaaattaggtttccagcctgtgttactgccattttcgccaaatggcaaagcccagcatattaaaggttttcttaatcgttttgcgaagacggcgaaaaagacggcggatttcctcaaccgtatggcgaagctgggtatgccaatggtgggcgtcgatccggcgctggtactttgttatcgcgatgaatataaactggcgctgggcgaggagcgtggcgagtttaacgtcttactggcgaatgaatggctggcaagcgcacttgagtcacagccagtggctacagtcagcggtgaatcatggtatttctttggtcactgtaccgaagttaccgccttgccgggtgcgccagcacaatgggccgcgatatttgcccgttttggcgcgaaactggaaaatgtcagcgtgggttgctgcggcatggcagggacttacggacatgaagcgaaaaaccatgaaaattcgctcgggatctatgagttatcctggcatcaggctatgcagcgactgccgcgtaaccgctgtctggcgaccggatattcctgccgtagccaggtaaaacgggttgaaggcacgggggtacgccatcctgtgcaggctttactggagattattaaatga

SEQ ID NO: 459584 - DNA, 411 bp, Shigella boydii
atgatatggaaacggaaaatcaccctggaagcactgaatgctatgggtgaaggaaacatggtggggttcctggatattcgctttgaacatattggtgatgacacccttgaagcgacaatgccagtagactcgcggacaaagcagcctttcgggttgctgcatggaggagcatccgtggtactggccgaaagtatcggttccgttgccggttatttatgtaccgaaggtgagcaaaaagtggttggtctggaaatcaatgctaatcacgtccgctcggcacgagaagggcgggtgcgcggcatatgtaaaccgttgcatctcggttcgcgtcaccaggtctggcagattgaaatcttcgatgagaaagggcgtttgtgctgttcgtcacgattgacgaccgccattttgtga

SEQ ID NO: 459585 - DNA, 189 bp, Shigella boydii
atgtctactcaacttgatcccacccagctggccattgaatttttacgccgtgaccagagcaatctttcacctgcccaatatctcaaacgtctgaaacaactagaacttgaatttgctgacctgcttactctctcttctgctgaattaaaagaagaaatctactttgcctggcgtctgggcgtgcattga

SEQ ID NO: 459586 - DNA, 369 bp, Shigella boydii
atggacatgcattcaggaacctttaacccacaagatttcacctggcaaggcttaacgctgacacccgcagcggcgatacacatccgtgagctggtggcaaagcagccgggtatggtcggcgtgcgcttaggcgtgaagcaaacgggctgcgcgggctttggctatgtgctcgacagtgttagcgagccggacaaagacgatctgctgtttgaacacgacggcgcgaagctgtttgtcccgctgcaagcgatgccgtttattgatggcacggaagtcgatttcgttcgtgaaggacttaatcagatattcaaatttcacaaccctaaagcccagaatgaatgtggctgtggcgaaagctttggggtatag

SEQ ID NO: 459587 - DNA, 201 bp, Shigella boydii
atgtctcgtaatactgaagcaactgacgatgtcaaaacctggaccggcggcccgctgaattataaagaaggattcttcacccagttagccaccgatgagctggcaaaggggataaacgaagaggtggtgcgcgcaatttcggcgaagcgtaatgagccggagtggatgctggagtttcgtctaaacgcctatcgcgcatag

SEQ ID NO: 459588 - DNA, 1281 bp, Shigella boydii
atggaagaaccgcactggttgaaagcgcactacgacaagctgaattatcaggattacagctactactcagcaccatcgtgcggtaattgtgacgacacttgcgcgtctgaacctggcgcggtgcagcaaactggcgcgaacgcctttttaagtaaagaggtggaggcggcgtttgagcagttgggcgttcccgtgcgggaaggcaaagaggtggcggtggatgccattttcgactctgtttcggttgccactacttatcgcgaaaaactggcggagcagggaattattttctgttcctttggtgaggcgatccacgatcacccggaactggtgcgtaaatatctcggcaccgtggtgccggggaatgacaacttctttgccgcgcttaatgcggcggtagcctctgacggtacgtttatttatgtgcctaaaggcgtgcgctgcccgatggaactttccacctattttcgcattaacgcggaaaaaaccgggcagtttgagcgcaccattctggtggccgacgaagacagctacgtcagctacattgaaggctgttccgctccggtgcgtgacagctatcagttacacgcggcagtggtggaagtcatcatccataaaaacgccgaggtgaaatattccacggtacaaaactggttccctggcgataacaacaccggcggtattctcaacttcgtcaccaagcgtgctttgtgcgaaggcgaaaacagcaaaatgtcatggacgcaatcagaaaccgggtccgcgattacgtggaaatatcccagctgcattttgcgcggcgataactccattggtgagttttactcagtggcgctgaccagcggtcatcggcaagcggataccggcaccaagatgatccacatcggtaaaaacaccaaatcgaccattatctcgaaagggatctctgccggacatagtcagaacagttatcgcggcttagtgaaaatcatgccgacggcaaccaatgcgcgcaatttcactcagtgcgactcaatgctgattggcgctaattgtggggcgcataccttcccgtatgtcgaatgtcgcaataacagcgcacaactggagcacgaggcaacgacatcacgtattggtgaagatcaactgttttactgcctgcaacgcgggatcagcgaagaagacgccatctcgatgattgttaacggtttctgcaaagacgtgttctcagaactgccgctggaatttgccgttgaagcacaaaaactcctcgccatcagtcttgaacacagcgtcggataa

SEQ ID NO: 459589 - DNA, 747 bp, Shigella boydii
atgttaagtattaaagatttacacgtcagcgtggaagataaagctatcctgcgtggattaagcctcgccgttcgtcccggcgaagttcacgccattatggggccaaacggttcgggcaaaagtaccttatcggcaacgcttgccgggcgcgaagattatgaagtgacgggcggcacggttgagttcaaaggcaaagatttgcttgcactgtcgccggaagatcgtgcaggcgaaggcatctttatggccttccagtatccggtggagattccaggcgtcagtaaccagtttttcctgcaaacggcacttaatgcagtgcgcagctatcgcggccaggaaacgctcgaccgctttgattttcaggatttgatggaagagaaaatcgctctcctgaagatgccggaagatttattaacccgttcggtaaacgttggtttttccggcggcgagaaaaagcgcaacgatattttgcaaatggcggtgctggaaccggagttatgcattcttgatgagtcggactccgggctggatattgacgcattaaaagtggtcgccgatggcgtgaactccctgcgtgatggcaagcgctcattcatcattgttacgcactaccaacgcattctcgactacatcaagcctgattacgtccatgtgctatatcagggacgaattgtgaaatccggcgatttcacgttggtcaaacaactggaggagcagggttatggctggcttaccgaacagcagtaa

SEQ ID NO: 459590 - DNA, 1272 bp, Shigella boydii
atggctggcttaccgaacagcagtaacgcgctgcaacagtggcatcacttgtttgaagctgaagggacaaaacgctccccgcaagcacagcagcatttacaacaattgctgcgtaccggactgccgacacgtaaacatgaaaactggaaatatacgccgctggaagggctgaccaatagccagtttgtcagcattgcgggggagatatccccacagcagcgtgatgccttagcgttaacgttagacgccgtgcggctggtgtttgtcgatggacgttacgtgcccgcgctgagcgatgcaattgaaggcagcggatatgaagtgagcattaacgacgaccgtcaggggttacccgacgctattcaggcggaagtgtttctgcatttgacggaaagcctggcacaaagcgtgacgcatatcgccgtgaagcgcggtcaacggccggcaaagccattgctgttaatgtatatcacccagggcgtggcaggtgaagaggtgaacactgcccattaccggcatcatctggatctggcggaaggtgccgaagcaacggtgatcgaacattttgtcagccttaatgatgctcgtcattttaccggggcacggttcactatcaatgtcgcagcgaacgcccacttgcagcatatcaagctggcgtttgaaaacccgctcagtcaccactttgctcataacgatttgttgctggctgaggatgccaccgcatttagccatagtttcctgctgggtggcgcagtgttacgacacaacaccagtacgcaactcaatggcgaaaacagcacgctgcggatcaatagcctggcgatgccggtgaaaaacgaggtgtgtgatacccgtacctggctggaacacaataaaggtttttgtaacagccgacagttgcacaaaactatcgtcagcgacaaaggccgcgcggtatttaacggtttgatcaacgtcgcgcagcacgccatcaaaacggatggtcagatgaccaacaataatctgctgatgggcaaactggcggaagtggatacgaaaccgctgctggaaatctatgcagatgatgtgaaatgcagccacggcgcgacggtggggcgtattgatgatgaacagatgttctatctgcgctcgcgcgggatcaatcagcaggatgcccagcagatgatcatttacgcctttgctgccgaactgacggaagcactgcgtgatgaggggcttaaacagcaggtgctggcccgaatcggtcaacggctgccaggaggtgcaagatga

SEQ ID NO: 459591 - DNA, 1221 bp, Shigella boydii
atgactttttccgtcgacaaagtgcgggccgactttccggtgctttcgcgtgaggtaaacggtttgccgctggcttatctcgacagcgccgccagtgcacagaaaccgagccaggtgattgacgccgaggccgagttttatcgtcatggctacgcggcggtgcatcgcggtattcataccttaagcgcccaggcgaccgagaaaatggagaacgtgcgcaagcgggcatcgctgtttattaatgcccgttcggcggaagagctggtgttcgtccgcggcacgacggaagggatcaatctggtcgccaatagctggggcaacagcaatgtgcgggcgggcgataacatcatcatcagtcagatggagcaccacgctaacattgtcccctggcagatgctttgcgcacgcgttggcgcagagctgcgtgtgatccctctcaaccccgacggtacgctgcaactggagacgctgcatacgctgtttgatgagaaaactcgcctgctggcaattactcatgtctccaacgtgcttggcacagaaaatccactggcgggaatgatcacgcttgcgcaccagcatggcgcaaaagtgctggtggatggcgctcaggcggtgatgcatcatccggtggatgttcaggcgctggattgcgatttttacgtgttttccgggcataaactgtatggccccaccgggattggcattctttatgtcaaagaagccttgttgcaggagatgccgccgtgggaagggggcggttctatgatcgccaccgtcagcctgagtgaaggcactacctggaccaaagcaccatggcggtttgaagccggtacacccaataccgggggcatcattggtcttggcgcggcgctggaatatgtttcggtgctggggcttaataacatagccgagtatgaactgaatctgatgcattacgcgctatcacagctggaatctgtaccgaatctcactctctatggcccacaaaacaggcttggcgttattgcttttaatctcggaaaacaccacgcctatgatgttggcagttttctcgataattacggcattgctgtgcgtaccggacatcactgcgctatgccattaatggcctattacaacgtccctgcgatgtgtcgggcgtcgctggccatgtataacactcatgaagaagtggatcgtctggtgaccggcctgcaacgtattcaccgtctgctgggataa

SEQ ID NO: 459592 - DNA, 417 bp, Shigella boydii
atggctttattgccggataaagaaaaattgctgcgtaattttttacgctgcgccaactgggaagagaaatatctctacattattgagctgggccagcgtctgccagaattacgcgacgaagaccgaagcccacaaaatagcattcagggctgccagaatcaggtgtggattgtcatgcgccagaatgcgcagggaattattgaattgcagggcgacagcgatgcggcgattgtgaaagggcttattgcggtcgtatttattctctacgatcagatgacgccgcaggatattgtcaatttcgatgtgcgtccgtggtttgaaaaaatggcgctcacccaacatctcaccccatctcgttcacaaggtctggaagcgatgattcgcgcaattcgcgccaaagccgctgcacttagctaa

SEQ ID NO: 459593 - DNA, 246 bp, Shigella boydii
atgaaacgcgagtctttgcttacactcacgcttatcggcgcttttagcgccatccaggctgcctgggcggttgattatccgctaccaccaaccggaagccgactggttgggcaaaatcaaacgtatacggtgcaagaaggggataaaaaccttcaggctattgcccgacgttttgatactgcggcaatgttgatccttgaagccaatacactatcgccccggtgccaaaacctggtacgacgataa

SEQ ID NO: 459594 - DNA, 237 bp, Shigella boydii; identical to SEQ ID NO: 1349

SEQ ID NO: 459595 - DNA, 1413 bp, Shigella boydii
atgaaaaagaccaaaattgtttgcaccatcggaccgaaaaccgaatctgaagagatgttagctaaaatgctggacgctggcatgaacgttatgcgtctgaacttctctcatggtgactatgcagaacacggtcagcgcattcagaatctgcgcaacgtgatgagcaaaactggtaaaaccgccgctatcctgcttgataccaaaggtccggaaatccgcaccatgaaactggaaggcggtaacgacgtttctctgaaagctggtcagacctttactttcaccactgataaatctgttatcggcaacagcgaaatggttgcggtaacgtatgaaggtttcactactgacctgtcagttggcaacaccgtactggttgacgatggtctgatcggtatggaagttaccgccattgaaggtaacaaagttatctgtaaagtgctgaacaacggtgacctgggcgaaaacaaaggtgtgaacctgcctggcgtttccattgctctgccagcactggctgaaaaagacaaacaggacctgatctttggttgcgaacaaggcgtagactttgttgctgcttcctttattcgtaagcgttctgacgttatcgaaatccgtgagcacctgaaagcgcacggcggcgaaaacatccacatcatctccaaaatcgaaaaccaggaaggcctcaacaacttcgacgaaatcctcgaagcctctgacggcatcatggttgcgcgtggcgacctgggtgtagaaatcccggtagaagaagttatcttcgcccagaagatgatgatcgaaaaatgtatccgtgcacgtaaagtcgttatcactgcgacccagatgctggattccatgatcaaaaacccacgcccgactcgcgcagaagccggtgacgttgcaaacgccatcctcgacggtactgatgcagtgatgctgtctggtgaatccgcaaaaggtaaatacccgctggaagcggtttctatcatggcgaccatctgcgaacgtaccgaccgcgtgatgaacagccgtctcgagttcaacaatgacaaccgtaaactgcgcattaccgaagcggtatgccgtggtgccgttgaaactgctgaaaaactggatgctccgctgatcgtggttgctactcagggcggtaaatctgctcgcgcagtacgtaaatacttcccggatgccaccatcctggcactgaccaccaacgaaaaaacggctcatcagttggtactgagcaaaggcgttgtgccgcagctggttaaagagatcacttctactgatgatttctaccgtctgggtaaagaactggctctgcagagcggtctggcacacaaaggtgacgttgtagttatggtttctggtgcactggtaccgagcggcactactaacaccgcatctgttcacgtcctgtaa

SEQ ID NO: 459596 - DNA, 210 bp, Shigella boydii
atgggaaatcggacaaaagaggatgaactgtaccgagaaatgtgcagagttgtcggtaaagttgtgctggaaatgcgcgatctggggcaggaaccaaagcatattgttatcgcaggcgtattacgtacagcattagccaataaacgcattcagcgcagtgagctggataagcaggcgatggaaaccgtcattaacgcactggtaaaatga

SEQ ID NO: 459597 - DNA, 951 bp, Shigella boydii
atgaacgagttagacggcatcaaacagttcaccactgtcgtggcagacagcggcgatattcagtccattcgccattatcatccccaggatgccaccaccaatccttcgctgttgctcaaggctgccggattatcacaatatgagcatttaatagacgatgctatcgcctggggtaaaaaaaatggcaagacccaggaacaacaggtggtcgcagcgtgtgacaaactggcggtcaatttcggtgctgaaattctcaaaatcgtacccggtcgcgtgtcaacagaagttgatgcacgcctctcttttgataaagaaaagagtattgagaaggcgcgccatctggtggacttgtatcagcaacaaggcgttgagaaatcacgcattctgatcaaactggcttcgacctgggaaggaattagcgcggcagaagagctggaaaaagaaggtattaactgcaacctgacgctgctgttttcttttgcccaggcgcgggcctgtgcggaagcaggcgtttttctgatttcgccgtttgtcgggcgtatttatgactggtatcaggcacgcaagccgatggacccgtatgtggtggaagaagatccgggcgttaaatcggtgcgcaatatctacgactactataagcaacaccactatgaaaccattgtgatgggcgcgagcttccgtcgcaccgaacaaatcctcgccttaaccggctgcgatcgactgactatcgcaccgaatttgctgaaggagctgcaggaaaaagtttcgccagtggtacgtaaattaatcccaccttctcagacgttcccacgcccagctcccatgagcgaagcggagttccgttgggagcacaatcaggatgcgatggcggtagaaaaactgtctgaaggcattcgtctgttcgccgttgatcaacgcaaactggaagatcttcttgccgccaaactataa

SEQ ID NO: 459598 - DNA, 2280 bp, Shigella boydii
atggatgaccagttaaaacaaagtgcacttgatttccatgaatttccagttccagggaaaatccaggtttctccaaccaagcctctggcaacgcagcgcgatctggcgctggcctactcaccaggcgttgccgcaccttgtcttgaaatcgaaaaagacccgttaaaagcctacaaatataccgcgcgcggtaacctggtggcggtgatctctaacggtacggcggtgctggggttaggcaacattggcgcgctggctggcaaaccggtgatggaaggcaagggcgttctgtttaagaaattcgccgggattgatgtatttgacattgaagttgatgaactcgacccggacaaatttattgaagttgtcgctgcgctcgaaccgaccttcggcggaatcaacctcgaagacattaaagcgccagaatgtttctatattgaacagaaactgcgcgagcggatgaatattccggtattccacgacgatcagcacggcacggcaatcatcagcactgccgccatcctcaacggcttgcgcgtggtggagaaaaacatctccgacgtgcggatggtggtttccggcgcgggtgccgcagcaatcgcctgtatgaacctgctggtagcgctgggtctgcaaaaacataacatcgtggtttgcgattcaaaaggcgttatctatcagggccgtgagccaaacatggcggaaaccaaagccgcatatgcggtggtggatgacggcaaacgtaccctcgatgatgtgattgaaggcgcggatattttcctcggatgttccggcccgaaagtgctgacccaggaaatggtgaagaaaatggctcgtgcgccaatgatcctggcgctggcgaacccggaaccggaaattctgccgccgctggcgaaagaagtgcgtccggatgccatcatttgcaccggtcgttctgactatccgaaccaggtgaacaacgtcctgtgcttcccgttcatcttccgtggcgcgctggacgttggcgcaaccgccatcaacgaagagatgaaactggcggcggtacgtgcgattgcagaactcgcccatgcggaacagagcgaagtggtggcttcagcgtatggcgatcaggatctgagctttggtccggaatacatcattccaaaaccgtttgatccgcgcttgatcgttaagatcgctcctgcggtcgctaaagccgcgatggagtcgggcgtggcgacgcgtccgattgctgatttcgacgtctacatcgacaagctgactgagttcgtttacaaaaccaacctgtttatgaagccgattttctcccaggctcgcaaagcgccgaagcgcgttgttctgccagaaggggaagaggcgcgcgttctgcatgccactcaggaactggtaacgcagggactggcgaaaccgatccttatcggtcgtccgaacgtgatcgaaatgcgcattcagaaactgggcttgcagatcaaagcgggcgttgattttgagatcgtcaataacgaatccgatccgcgctttaaagagtactggaccgaatacttccagatcatgaagcgtcgcggtgtcactcaggaacaggcgcagcgggcgctgatcagtaacccgacagtgatcggcgcgatcatggttcagcgtggggaagccgatgcaatgatctgcggtacggtgggcgattatcatgaacattttagcgtggtgaaaaatgtctttggttatcgcgatggcgttcacaccgcaggtgcaatgaacgcgttgctgctgccgagtggtaacacctttattgccgatacctacgtcaatgacgaaccagacgcagaagagctggcggagatcaccttgatggcggcagaaactgtccgtcgttttggtattgagccgcgcgttgctctgttgtcgcactccaactttggttcttctgactgcccgtcgtcgagcaaaatgcgtcaggcgctggaactggtcagggatcgtgcgccagatctgatgattgatggtgaaatgcacggcgatgcagcgctggtggaagcgattcgcaacgaccgtatgccggacagccctttgaaaggttctgccaatattctggtgatgccgaacatggaagctgcccgcattagttacaacttactgcgcgtttccagctcggaaggtgtgactgtcggtccggtgctgatgggcgtggcgaaaccggttcacgtgttaacgccgatcgcatcggtgcgtcgtatcgtcaacatggtggcgctggccgtggttgaagcgcaaacccaaccgctgtaa

SEQ ID NO: 459599 - DNA, 336 bp, Shigella boydii
atggataaagaacgcatcattcaggaatttgtgcccggcaaacaggtcacacaggcgcatctcatcgcgcatcccggtgaggaactggcgaagaaaatcggcgttccggatgcgggcgcaattggcattatgacgctaactcccggcgaaacggcgatgatcgccggtgatttagcgctgaaagccgctgatgtgcatatcggttttctcgaccgcttcagcggtgcattggtgatttattgctcggtgggcgcagtagaagaagcgttatcacaaaccgtcagcggtttaggtcgcttattaaattatacgctttgtgaaatgaccaaaagttaa

SEQ ID NO: 459600 - DNA, 480 bp, Shigella boydii
atgaaacgaattgcgtttgtgggtagcgtcggggcaggaaaaacaacgttatttaatgcgttgcaggggaattataccctcgccagaaaaacacaggccgtggaatttaatgataagggcgatattgatacgccgggtgaatattttagccatccccgctggtatcacgccttaattaccacgctacaggatgtagacatgctgatctatgtccatggcgcaaatgacccggaaagtcggttgcctgccgggttgctggatattggcgtcagcaaacggcaaatcgccgtcatcagtaaaacggacatgccagatgctgacgtcgccgcaacgcgaaagttattgcttgagacgggtttcgaagagccgattttcgagctaaacagccacgacccgcaaagcgtgcagcaactggtggattatctggcatctctcaccaaacaggaggaagcaggtgaaaaaactcatcacagcgaatga

SEQ ID NO: 459601 - DNA, 702 bp, Shigella boydii
gtgaaaaaactcatcacagcgaatgatattcgtgaagcacacgcgcgcggcgaacaggcaatgtccgtggttctgcgcgccagcattattaccccggaagcccgtgaagtggcggatctactgggttttaccatcaccgaatgtgatgaatcgatcccggtaacggcgtccgtgcccgccagcgtgccagccgacaaaaccgaaagccagcgcatccgcgaaaccatcattgcccagctgccggaaggccagtttaccgaaagcctggtcgcacagctgatggaaaaagtgatgaaggaaaaacagtcgctggagcagggcgcaatgcagccgagcttcaaatcggtgaccggcaaaggcggcatcaaagtgattgatggcagcagcgtcaagtttggtcgtttcgacggcgcagagccgcattgcgtgggcttgactgatcttgtgaccggagacgacggcagcagcatggccgccggttttatgcagtgggagaacgcattcttcccgtggaccctgaactacgacgaaatcgacatggtgctggaagaggagctgcatgttcgccacgaaggccaaaccatgatcgccaaagcaggcgacgtgatgtttatcccgaaaggctccagcatcgaatttggtatgacatccagcgtgaaattcctgtatgtcgcctggccggctaactggcaatccctatga

SEQ ID NO: 459602 - DNA, 810 bp, Shigella boydii
atgaaagatttcatcaccgaagcatggctaagagcgaaccatacgctcagcgaaggcgcagagatccatctccctgcggacagtcgcctgacgccctctgcccgggagttgctggaaagccgccatctgcgcatcaagtttattgacgagcagggccgcctgtttgttgacgatgaacagcagcagccgcagcccgttcatgggctgaccagtagcgatgaacatccgcaggcgtgctgcgaactgtgccgccagccggtggcaaaaaagccggatacgctgactcacctgtcggcggaaaaaatggtcgccaaaagcgatccgcgtctgggttttcgcgcggttctcgacagcaccattgcgctggcagtgtggctgcaaattgaactggcggaaccgtggcagccgtggctggcggatatccgttcgcgtcttggcaacattatgcgcgccgatgcgctgggggaaccgctgggctgccaggcgattgtcgggctttctgacgaagatctgcatcggctttctcatcagccgctgcgctatctcgaccacgatcatctggtgccggaagccagccacgggcgcgatgctgcgttgctcaatctgctacgcaccaaagtgcgggaaaccgaaaccgtagcggcgcaggtctttatcacccgcagctttgaagtattacgcccggacattttgcaggcgctgaaccgcctttccagcacggtctacgtgatgatgatcctgagcgtaacgaagcagccgctaacggtgaagcagatccaacaacgactgggggaacgcaatgattattga

SEQ ID NO: 459603 - DNA, 1017 bp, Shigella boydii
atgattattgaacgttgtcgtgaactggcgttgcgagcgcccgccagagtggtttttccggatgcgttagaccaacgtgtgctgaaagccgcgcaatatttacatcaacaaggtctggcaacgcccattctggtcgccaatccgtttgaacttcgtcagtttgcgctcagtcacggcgtggcgatggacgggctacaggtgattgatccgcatggcaacctcgcaatgcgggaagaatttgctcatcgctggctggcccgcgcgggcgaaaaaacgccgccggatgcgctggaaaaacttaccgaccctctgatgttcgccgcagcaatggtcagcgccggtaaagcggatgtctgtatcgcgggcaacctctcttccacggcaaatgtgctgcgtgccggattacgcattatcggcttgcagccaggctgtaaaacgctctctttcattttcctgatgttgccacagtacagcggcccggcgttgggctttgccgattgcagcgtggtgccacagccgacggcggcgcagctggcggatatcgcgcttgccagtgccgaaacctggcgcgccatcaccggagaagagccgcgcgtggcgatgctgtcgttttccagcaatggtagcgcccgtcacccctgtgttgctaacgtccagcaggcgacagaaatcgtccgtgagcgcgcaccaaagctggtggtggatggcgagttacagtttgacgccgccttcgtgccggaagtggcggcgcaaaaagcgcctgccagcccgctacagggcaaggccaatgtgatggtttttccgtcgctggaagccggaaatattggttacaacatcgcacaacgactcggcggatatcgtgccgtcgggccactgatacaaggacttgccgtgccgatgcacgatctctctcgtggttgtagcgtgcaggacattatcgagctggcgctggtggcagctgtgccgcgtcagacagaagtgaaccgcgaaagcagtttacaaacactggttgaatga

SEQ ID NO: 459604 - DNA, 336 bp, Shigella boydii
atgaacggtcccgttctggaccctgataaagaggaaagcacaatggaagcattaggaatgatcgaaacccggggcctggttgcactgattgaggcttctgacgcgatggtgaaagctgcgcgcgtcaagctggttggtgttaagcagattggcggcggcctgtgtactgccatggttcgtggtgatgttgcagcctgtaaagccgcgaccgatgcaggtgccgcagcggcacagcgtatcggcgagctggtatctgtacacgttatcccgcgtccgcacggcgacctggaagaagtcttcccgatcggcctgaaaggcgatagcagcaacctgtaa

SEQ ID NO: 459605 - DNA, 288 bp, Shigella boydii
atgaaactggcagtcgtcactggacaaattgtttgtaccgtacgccatcacggactggcgcatgacaaattgctgatggtggaaatgattgatccacaaggtaatcctgacgggcaatgcgccgtcgccatcgacaatattggtgcgggaaccggggagtgggtgttactggtgagtggcagttccgcccgccaggcgcataaaagcgaaacgtcaccggtcgatctgtgcgtgattggcattgtcgatgaggtggtgtctggcggtcaggtaattttccacaaataa

SEQ ID NO: 459606 - DNA, 1404 bp, Shigella boydii
atgaatcaacaggatattgaacaggtggtgaaagcggtactgctgaaaatgcaaagcagtgacacgccgcccgccgccgttcatgagatgggcgttttcgcgtccctggatgacgccgttgcggcagccaaagtcgcccagcaagggttaaaaagcgtggcaatgcgccagttagccattgctgccattcgtgaggcaggcgaaaaacacgccagagatttagcggaacttgccgtcagtgaaaccggcatgggccgcgttgaagataaatttgccaaaaacgtcgctcaggcgcgcggcacgccaggcgttgagtgtctctctccgcaggtgctgaccggcgacaacggcctgactttaattgaaaacgcgccctggggcatggtggcttcggtaactccgtccactaacccggcggcaaccgtaattaataacgccatcagcctgattgccgcgggcaacagcgtcatttttgccccgcatccggcggcgaaaaaagtctcccagcgggcgatcacgctgctcaaccaggcgattgttgccgcaggcgggccggaaaacttactggttactgtggcaaatccggatatcgaaaccgcgcagcgtttgttcaagtttccgggcatcggccttctggtggtgaccggcggcgaagcggtagtagaagcggcgcgtaaacacaccaataaacgtctgattgccgcaggcgctggcaacccgccggtagtggtggatgaaaccgccgacctcgcccgtgccgctcagtccatcgtcaaaggcgcttctttcgataacaacatcatttgtgccgacgaaaaggtactgattgttgttgatagcgtagccgatgaactgatgcgtctgatggaaggccagcacgcggtgaaactgaccgcagaacaggcgcagcagctgcaaccggtgttgctgaaaaatatcgacgagcgcggaaaaggcaccgtcagccgtgactgggttggtcgcgatgcggcgaaaatcgcggcggcaatcggcctgaacgtgccgcaagaaacgcgtttgctgtttgtggaaaccactgcagaacatccgtttgccgtgaccgaactgatgatgccggtgctgcccgtcgtgcgcgtcgccaacgtggcggatgccattgcgctggcggtgaaactggaaggcggttgccaccacacggcggcaatgcactcgcgcaacatcgaaaacatgaaccagatggcgaatgctattgataccagcattttcgttaagaacggaccgtgcattgccgggctggggctgggcggggaaggctggaccaccatgaccatcaccacgccaaccggtgaaggggtaaccagcgcgcgtacgtttgtccgtctgcgtcgctgtgtattagtcgatgcgtttcgcattgtttaa

SEQ ID NO: 459607 - DNA, 837 bp, Shigella boydii
atggcgcacgacgaacaatggctcaccccacgtctgcaaacggcggcaacgctgtgtaaccagacgcccgccgcgacggaatctccgctgtggctgggggtggatctgggcacctgcgatgtggtgtcgatggttgtcgaccgcgacggtcagccggtggcggtatgcctcgactgggccgatgtggtccgcgacggcatcgtctgggatttcttcggcgctgtcaccattgttcgtcgccatctcgacacgctcgagcagcaattcggtcgccgttttagccatgcggcgacttcatttcctccaggtacggacccgcgtatttccatcaacgtgctggagtctgctggactggaagtgagccatgtgctggatgagccaaccgcagttgcggatctgctgcaactggacaacgccggtgtagtggatatcggcggcggcactaccggcattgccatcgtgaaaaagggcaaggtgacgtactcggcggatgaagcaaccggcggacatcacatctctctgactctcgccggaaatcgccgtatttcgctggaagaggcggagcagtacaagcgcggtcacggtgaagagatttggcctacggtgaaaccggtgtacgaaaaaatggcggacattgtcgcccggcatattgaagggcagggcattactgatttatggctggcgggcggctcttgtatgcaaccgggcgtggcggaactgtttcgcaaacaattcccggcgttacaggtgcatttaccgcagcacagtttgtttatgaccccgctggcgatcgccagtagtgggcgagagaaagcggaggggctatatgcaaaatga

SEQ ID NO: 459608 - DNA, 1188 bp, Shigella boydii
atgcaaaatgaattgcagaccgcgctctttcaggcgttcgataccctgaatctgcaacgggtaaaaacatttagcgttccaccggtgacgctttgcggtccgggctcggtgagcagttgcggacagcaagcgcaaacgcgtgggctgaaacatctgttcgtgatggcagacagctttttgcatcaggcagggatgaccgccgggctgacgcgcagcctggctgttaaaggcatcgccatgacgctctggccatgtccggtgggcgaaccgtgcatcaccgacgtgtgtgcagccgtggcgcagttgcgtgagtcaggctgtgatggggtgatcgcatttggcggcggctcggtgctggatgcggcgaaagccgtggcgttgctggtgacgaacccggatagcacgctggcagagatgtcagaaaccagcgttctgcaaccgcgcttgccgctgattgccattccaacgaccgccggaaccggctctgaaaccaccaatgtaacggtgattatcgacgcggtgagcgggcgcaagcaggtgttagcccatgcctcgctgatgccggatgtggcgatcctcgacgccgcattgaccgaagatgtgccgtcgcatgtcacggcgatgaccggcattgatgcgttaacccatgccattgaagcatacagcgccctgaacgctataccgcttaccgacagcctggcgattggcgctattgcgatgattggcaaatcgctgccgaaagcggtgggctacggtcacgaccttgccgcgcgcgagagcatgttgctggcttcatgtatggcgggaatggcgttttccagtgcgggtcttgggttgtgccacgcgatggcgcatcagccgggcgcggcgctgcatattccacacggtctggcgaacgccatgttgctgccaacggtgatggaatttaaccggatggtttgtcgtgaacgctttagtcagattggtcgggcactgcgaactaaaaaatccgacgatcgtgacgctattaacgcggtaagtgagctgattgcggaagttgggattggtaaacgactgggcgatgttggtgcgacatctgcgcattacggcgcatgggcgcaggccgcgctggaagatatttgtctgcgcagtaacccgcgtaccgccagcctggagcagattgtcggcctgtacgcagcggcgcaataa

SEQ ID NO: 459609 - DNA, 1236 bp, Shigella boydii
atgggaattaacgaaatcatcatgtacatcatgtacatcatgatgttctttatgctgatagctgccgtagacaggatcctgtcgcagttcggcggttctgctagtttcctcggtaagttcggtaaaagtatcgaaggatcaggcggtcagttcgaagaaggctttatggcaatgggcgctctgggtctggcgatggtcggtatgaccgcgctggcaccggtactggctcacgtactcgggccggtaattatcccggtttacgaaatgctcggcgcaaacccgtcaatgttcgccggaacgctgctggcgtgcgatatgggcggcttcttcctcgccaaagagctggcgggcggcgacgtagcagcgtggctatactctgggttaattcttgggtcgatgatggggccaacgattgtgttttccattccggtggcgctcggcattatcgaaccttctgaccgtcgttatctggcgctcggcgtgctggcgggcattgtgaccattccgattggctgtattgttggtggtctggttgctatgtactccggtgtgcagatcaacggtcagccggtggaattcactttcgccctgatcctgatgaacatgatcccggtgatcattgttgcgattctggtggcgctggggctgaaattcatcccggaaaaaatgatcaacggcttccagatcttcgccaaattcctcgttgcattgatcaccctcggtcttgccgctgcggtagtgaaattcctgcttggctgggaactgatccccggtctggatcctatctttatggcccctggcgataaacccggtgaggtgatgcgcgccattgaagttatcggttctatctcctgcgttctgttaggggcgtatccgatggtgctgctgctgactcgctggtttgaaaaaacgctgatgagcgtcggtaaagtgctgaatatgaacaacatcgcggcagccggcatggtggcaacgcttgccaacaacatcccgatgttcggcatgatgaagcagatggatacccgcggcaaagtcatcaactgcgccttcgccgtttctgctgctttcgccctgggcgaccacttagggttcgccgctgccaacatgaatgccatgatcttcccgatgattgtcggcaagttgatcggcggcgtaacggcgattggcgtggcgatgatgctggtgccaaaagatgacgcgaccgcagctaaaaccgaagcggaggcacaatcgtga

SEQ ID NO: 459610 - DNA, 1404 bp, Shigella boydii
gtgaacactcgccagctactgagcgtcggtatcgatatcggcaccaccaccacccaggtgattttctcccacctggaactggttaaccgtgcggcggtgtcgcaggtgccgcgctacgaattcatcaaacgcgaaattagctggcaaagcccggtgttctttacccctgtcgataaacagggtggtttagaagaagcggaactgaagtcgctgattttagagcaatatcaggctgcgggcattgcgccggaaagcgttgattctggtgccatcatcatcaccggtgaaagcgcgaaaacccgcaatgctcgcccggcggtgatggcgctctctcagtcgctgggcgattttgtcgtcgccagcgccgggtcgcacctcgaatccgtgatcgccggtcacggtgccggggcgcaaaccctttctgaacaacggctgtgtcgggtactgaatatcgacatcggcggtggcaccgcgaactacgccctgttcgatgccggaaaaatcagcggcactgcctgcctcaacgtcggtggtcgcctgctggaaaccgacagccaggggcgcgtggtttacgctcataaaccggggcagatgattgtggatgagtgcttcggtgcaggcactgacgtccgttcgctgaccggcgcgcagctggtgcaggttacccggcggatggcagaactgattgtcgaagtgattgacggaacgctttcgccgctcgcgcaggcattaatgcaaaccggtttgctgcccgcaggtgttacgcccgaaatcattacgctttctggcggcgtgggcgaatgttatcgccaccagcccgccgatccgttctgttttgccgatattggcccgctgctggcaacggcgctgcatgaccatccgcgcctgcgtgagatgaatgtgcagtttccggcgcaaaccgtacgcgccacggtgattggcgcgggcgcacataccctttcgctctctggcagcacaatctggctggagggcgtacaactgccgctgcgcaatttgccggtggcgatcccaattgatgaaacggatctggtgagtgcctggcaacaggcgctgcttcagctggatcttgatcccaaaactgacgcgtacgtgctggcgcttcccgcctcgctgcctgtgcgttacgccgcggtactgacggtcatcaacgcgctggtcgatttcgtcgcgcgttttccgaatccgcatcccctgctggtggtggccgggcaggactttggtaaagctctgggcatgttgttgcgcccacagctacaacaactcccgttggcagtcattgacgaagtgattgtccgcgcgggggactatatcgacattggtacgcctctttttggcggatcggttgtgccggtgacggtgaaatcactcgcatttccttcctga

SEQ ID NO: 459611 - DNA, 1362 bp, Shigella boydii
atgaaactaaagaccacattgttcggcaatgtatatcagtttaaggatgtaaaagaggtgctggctaaagccaacgaactgcgttcgggggatgtgctggcaggcgttgcagcggcaagttcacaggagcgcgtggcggcaaagcaggtgttgtcggaaatgaccgtagcggacatccgcaataatccggtgattgcctatgaagatgactgcgtgacgcggctgattcaggacgatgttaacgaaacggcctacaaccagattaaaaactggagcatcagcgaactgcgtgagtatgtgctgagcgatgaaactagcgtggacgacattgcctttacccgcaaagggctgacctcggaagtggtcgcggcggtagcgaagatttgctccaacgcggacctgatctacggcgcgaagaaaatgccggtaatcaaaaaggccaataccaccatcggtattccgggcaccttcagcgcccgtttgcagccaaatgacactcgtgacgacgtgcaaagtatcgccgcgcaaatctacgaagggctttccttcggggtgggcgatgcggtgatcggcgtcaacccggtaactgacgacgtggaaaacttaagccgcgtgctggataccatttatggcgtgatcgacaaattcaacatcccaactcagggctgcgtactggcgcacgtcaccacccagatcgaagcgattcgtcgcggcgcgcctggcggactgattttccagagtatctgtggcagcgaaaaagggctgaaagagtttggcgtggaactggcgatgctcgacgaagcgcgcgcagtgggtgcagagttcaaccgtatcgccggggaaaactgcctctatttcgaaaccggacaaggctctgcgctatccgctggcgctaacttcggcgctgaccaggtgacgatggaagcacgtaactatgggctggcgcgtcattacgatccgtttatcgtcaacaccgtggtcggctttattgggccggagtatctctacaacgaccgccagattatccgtgctggcttagaagatcactttatgggcaagctgagcggcatctctatgggctgtgactgctgctacaccaaccacgctgacgctgaccagaacctcaacgaaaacctgatgatcctgctcgccaccgcaggctgcaactacatcatggggatgccgctgggtgatgacatcatgctcaactaccagaccaccgcattccacgataccgccactgtgcgtcagttactcaacctgcgcccgtcaccagagtttgaacgctggctggaaagcatgggcattatggcaaacggtcgcctgaccaaacgggcgggcgatccgtcactgttcttctga

SEQ ID NO: 459612 - DNA, 1005 bp, Shigella boydii
atggtcagctcaacgactccgtcctccggggaatacttgttggaaatgagcggtatcaacaagtcctttcctggtgttaaggcacttgataacgttaatttaaaagtccggccacattctatccatgcattaatgggggaaaacggcgcaggaaaatcaacattattaaaatgcttgtttggtatttatcaaaaagactccggcaccattttattccagggtaaagagatcgatttccattcggccaaagaagcactggaaaatggtatttcgatggtacaccaggagttaaacctggtattacaacgttcggtgatggacaacatgtggcttgggcgataccccaccaaaggcatgtttgtcgatcaggacaaaatgtaccgcgaaaccaaagcgatttttgatgaactggatattgatatcgatccgcgtgcgcgcgtcggcacattatctgtttcgcaaatgcagatgatcgaaatcgccaaagcgttttcctataacgcgaaaattgtgattatggatgaaccgacttcttcgttaaccgaaaaagaggtcaatcatctgttcactattattcgtaaattaaaagagcgcggctgcggtattgtttatatctcgcataaaatggaggaaatcttccagttatgtgatgaagttaccgtattgcgcgacggtcagtggatcgccaccgaaccgctggcaggactgacgatggacaagatcatcgccatgatggttgggcgttctcttaaccagcgtttccctgacaaagaaaacaagccgggcgaagtcatcctcgaggtgcgtaacctgacgtcactgcgccagccgtcgatccgtgatgtctcgtttgatctgcataaaggggagatcctcggtattgccgggctgatgggggcgaaacgtaccgatattgttgagacgttatttggtattcgcgagaaatcggccggcaccattacgttgcacggcaaaaagatcaataaccataatgccaatgggtaa

SEQ ID NO: 459613 - DNA, 999 bp, Shigella boydii
atgaataagaaggtgttaaccctgtctgctgtgatggccagcatgttattcggtgccgctgcacacgctgctgatactcgcattggtgtaacaatctataagtacgacgataactttatgtctgtagtgcgcaaggctattgagcaagatgcgaaagccgcgccagatgttcagctgctgatgaatgattctcagaatgaccagtccaagcagaacgatcagatcgacgtattgctggcgaaaggggtgaaggcactggcaatcaacctggttgacccggcagctgcgggtacggtgattgagaaagcgcgtgggcaaaacgtgccggtggttttcttcaacaaagaaccgtctcgtaaggcgctggatagctacgacaaagcctactacgttggcactgactccaaagagtccggcattattcagggcgatttgattgctaaacactgggcggcgaatcagggttgggatctgaacaaagacggtcagattcagtccgtactgctgaaaggtgaaccgggccatccggatgcagaagcacgtaccacttacgtgattaaagaattgaacgataaaggcatcaaaactgaacagttacagttagataccgcaatgtgggataccgctcaggcgaaagataagatggacgcctggctgtctggcccgaacgccaacaaaatcgaagtggttatcgccaacaacgatgcgatggcaatgggcgcggtagaagcactgaaagcacacaacaagtccagcattccggtgtttggcgtcgatgctctgccagaagcgctggcgctggtgaaatccggtgcactggcgggcaccgtactgaacgatgctaacaaccaggcgaaagcgacctttgatctggcgaaaaacctggccgatggtaaaggtgcggctgatggcaccaactggaaaatcgacaacaaagtggtccgcgtaccttatgttggcgtagataaagacaacctggctgaattcagcaagaaataa

SEQ ID NO: 459614 - DNA, 855 bp, Shigella boydii
atgatcaccattcgtgatgtagcgcgtcaggctggcgtctctgtggcaacggtttcccgggtgctcaataacagcacgctggtcagtgccgacacgcgtgaagcagtaatgaaagccgtgagtgagctggattatcggccaaacgccaatgcccaggcgctggcaactcaggttagcgacaccattggcgtggtggtgatggacgtttctgatgcgtttttcggcgcgctggtaaaagcggtggatctagtcgctcagcagcatcagaaatacgtgctaatcggcaatagctatcatgaagcggaaaaagagcgtcacgccattgaggtgttaattcgccagcgttgtaatgcgttgattgttcactcaaaagcattgagtgacgatgaactggcgcaatttatggataacattcccggtatggtgttaatcaaccgcgttgtgccggggtacgcccatcgttgcgtttgcctggataatctcagcggtgcccgaatggcgacgcgcatgttgctgaataacggtcatcaacgtattggttatctttcttccagtcacggcattgaagatgacgccatgcgtaaagcaggctggatgagtgcgttgaaagagcaggatattattccgccggaaagctggattggcactggtacgccggacatgccgggcggtgaggcggcgatggttgaactgctggggcgcaatctacaacttaccgctatatttgcttataacgacaatatggccgctggcgcactgacagcattaaaagataatggcattgcgattccgttacatctctcaatcatcggtttcgatgatattcccatcgcccgttacaccgcccgcaattaa

SEQ ID NO: 459615 - DNA, 1158 bp, Shigella boydii
atggagcgcaacgtaacgctcgattttgttcgcggcgtcgccattctggggatcctgctattaaacatcagcgcctttgggctaccaaaggcggcttatctcaatcccgcttggtacggcgctattacgccgcaggatgcatggacctgggcatttctcgatctcatcggccaggtgaaattcctcacgctttttgcgctgctgtttggtgcgggcctgcaaatgttgctgccccgtggcagacgctggatccagtcgcggttaacgctgttagtcttgctgggttttattcacggtttattgttctgggacggcgatattctgctggcttacgggctggtgggcttaatctgctggcggctggtgcgcgatgcgccatcggtaaaaagcctgtttaatacaggcgtcatgctttatctggtggggcttggcgttttgctgttattggggctgatttccgacagccagaccagccgcgcctggacgccggatgcatcggctattttgtatgaaaaatactggaagcttcacggcggcgttgaagcaatcagtaatcgtgccgatggtgttggcaacagtttactggcactgggcgcacagtatggctggcaactggcagggattatgctcattggtgcggcgctgatgcgcagcggctggctgaaagggcagttcagcttacgtcactatcgtcgtactggttttgtgctggtggcgattggggtgactattaaccttcctgccatcgccctgcaatggcagctggactgggcgtatcgctggtgtgccttcttacttcaaatgccgcgggaactgagtgcgccgtttcaggcgattggctatgcgtcgctgttttatggcttctggccgcaattgagccgctttaagctggtgcttgcgatcgcctgcgtcggacggatggcgctgaccaactatctattgcaaacgctgatttgtaccatgcttttttaccacctcggtttgtttatgcattttgaccgcctggagctgctggcgtttgttattccggtatggctggcgaatatcctcttctctgttatctggctgcgttacttccgccaggggccggtggaatggctctggcgtcagttaactttgcgtgctgccggaacggcaatatctaaaacatcaagataa

SEQ ID NO: 459616 - DNA, 669 bp, Shigella boydii
atgccatcactcagtaaagaagcggccctggttcatgaagcgttagttgcgcgaggactggaaacaccgctgcgcccgcccgtgcatgaaatggataacgaaacgcgcaaaagccttattgctggtcatatgaccgaaatcatgcagctgctgaatctcgacctggctgatgacagtttgatggaaacgccgcatcgcatcgctaaaatgtatgtcgatgaaattttctccggtctggattacgccaacttcccgaaaatcaccctcattgaaaacaaaatgaaggtcgatgaaatggtcaccgtgcgcgatatcactctgaccagtacctgtgaacaccattttgttaccatcgatggcaaagcgacggtggcttatatcccgaaagattcggtgatcggtctgtcaaaaattaaccgtatcgtgcagttctttgcccagcgtccgcaggtgcaggaacgtctgacgcagcaaattcttattgcgctacaaacgctgctgggcaccaataacgtggctgtctccattgatgcggtgcattactgcgtgaaagcgcgtggcatccgcgatgcaaccagtgccacaacaacgacctctcttggtggattgttcaaatccagtcagaatacgcgccacgagtttctgcgcgctgtgcgtcatcacaactga

SEQ ID NO: 459617 - DNA, 837 bp, Shigella boydii
atggaaatgctcgaagagcaccgctgttttgaaggctggcagcaacgctggcgacacgactccagtaccttaaactgcccgatgacgttcagtatctttctcccaccccctcgtgatcacaccccgccaccagtgctgtactggctttccggattaacctgcaatgacgagaacttcaccaccaaggcgggtgcccagcgcgtggcggcagaactggggattgtactggtgatgccagacaccagcccgcgcggcgaaaaggttgccaacgacgatggctacgatttaggccagggcgcaggcttttatcttaatgccacgcaaccgccgtgggcgacgcattaccggatgtatgattatctgcgcgatgaattaccggcgctggttcaatcgcaatttaatgtcagcgaccgctgcgccattagcggtcactcaatgggtggtcacggtgcgctgattatggcgctgaaaaatccgggtaaatacaccagcgtttcggcctttgcgccaattgtgaatccgtgcagcgtcccgtggggaatcaaagcgtttagcagctatttaggtgaggacaaaaatgcatggctggaatgggacagttgcgcgctgatgtatgccagtaacgcgcaggatgcgatcccgacgcttatcgatcagggcgataatgatcagtttcttgccgaccagttgcaacctgcggtactggcagaagccgcgcgccagaaagcgtggccgatgacgctgcgtattcagccgggatatgatcacagttactacttcatcgcctcttttatagaggatcacctgcgcttccatgcgcagtatttactgaagtga

SEQ ID NO: 459618 - DNA, 1026 bp, Shigella boydii
ttgccgctgacggcgattaatcagtttctcacggttggcggtgaatggcgtcacgacaaacttagcgatgcggtgaacctgaccgggggaaccagctccaaaacgtctgccagccagtacgcgctgtttgtggaagatgaatggcggatcttcgagccgctggcgctgacgaccggcgtgcgtatggacgatcacgaaacctacggtgaacactggagtccgcgtgcctacctggtttataacgccaccgacaccgtaacggtgaaagggggctgggcgacggcatttaaagcaccttctctgttgcaacttagccctgactggacgagcaattcctgccgtggcgcatgtaagattgtgggtagcccggatctgaaaccagaaaccagcgaaagttgggagctggggctttactacatgggtgaagaaggctggctggaaggggttgaatccagcgttaccgttttccgtaacgatgtgaaagatcgtatcagcatcagccgtacgtctgacgtcaacgctgcaccgggctaccaaaactttgttggttttgagacgggcgctaacggacggcgcataccggtatttagctactacaacgttaacaaagctcgtattcagggcgtggaaaccgaactgaaaattccgttcaacgatgaatggaaactgtcgatcaactacacctacaacgatggtcgtgatgtcagcaacggcgaaaacaaaccgctatccgatctgccgttccatactgctaacggtacgctggactggaaaccgctggcgctggaagactggtcattctatgtttctggtcactataccgggcagaaacgcgccgacagcgcgacggctaaaacaccgggcggttataccatctggaataccggcgcggcctggcaggtgactaaagacgtcaaactgcgcgcaggcgtgctgaaccttggcgacaaggatctcagtcgtgacgactacagctataacgaagacggacgtcgttactttatggcagtggattatcgcttctga

SEQ ID NO: 459619 - DNA, 834 bp, Shigella boydii
atgtttaggttgaaccctttcgtacgggtcgggctgtgtttgtccgctatttcttgtgcatggcctgtgttagcggtcgatgatgatggcgaaacgatggttgtcactgcatcttccgttgaacaaaacctcaaagatgcacccgccagtatcagcgtcattacccaggaagacctgcagcgaaaaccggtacagaatctgaaggatgtcctcaaagaagtgcctggcgtacaactgacgaacgaaggggataaccgtaagggcgttagtattcgtggtctggacagcagctacaccctgattctcgtcgacggtaaacgcgttaactcccgcaatgccgtcttccgccacaatgatttcgatctgaactggatcccggtcgattccatcgaacgtattgaagtggttcgtggcccgatgtcgtcgctatacggctccgatgcgctcggcggtgtagtgaatatcatcaccaaaaaaatcggtcagaaatggtcgggtaccgttaccgtcgataccaccattcaggaacatcgcgatcgcggtgatacctataacggtcagttctttaccagtggaccattaattgatggtgtgctgggaatgaaagcttacggcagcctggcaaaacgtgaaaaggatgacccgcaaaactcaacgaccaccgataccggagaaacgccgcgtattgaaggattctccagccgcgacggcaatgttgaatttgcctggacaccgaatcaaaatcacgattttactgccggatacggtttcgaccgtcaggaactcgctggacaaaaaccgcctggaacgccagaactactccgtcagccataa

SEQ ID NO: 459620 - DNA, 1470 bp, Shigella boydii
atggtttccgaaactaaaaccacagaagcgccgggcttacgccgtgaattaaaggcgcgtcacctgacgatgattgccattggcggttccatcggtacaggtctttttgttgcctctggcgcaacgatttctcaggcaggtccgggcggggcattgctctcgtatatgctgattggcctgatggtttacttcctgatgaccagtctcggtgaactggctgcatatatgccggtttccggttcgtttgccacttacggtcagaactatgttgaagaaggctttggcttcgcgctgggctggaactactggtacaactgggcggtgactatcgccgttgacctggttgcagctcagctggtcatgagctggtggttcccggatacaccgggctggatctggagtgcgttgttcctcggcgttatcttcctgctgaactacatctcagttcgtggctttggtgaagcggaatactggttctcactgatcaaagtcacgacagttattgtctttatcatcgttggcgtgctgatgattatcggtatcttcaaaggcgcgcagcctgcgggctggagcaactggacaatcggcgaagcgccgtttgctggtggttttgcggcgatgatcggcgtagctatgattgtcggcttctctttccagggaaccgagctgatcggtattgctgcaggcgagtccgaagatccggcgaaaaacattccacgcgcggtacgtcaggtgttctggcgaatcctgttgttctatgtgttcgcgatcctgattatcagcctgattattccgtacaccgatccgagcctgctgcgtaacgatgttaaagacatcagcgttagtccgttcaccctggtgttccagcacgcgggtctgctctctgcggcggcggtgatgaacgcagttattctgacggcggtgctgtcagccggtaactccggtatgtatgcgtctactcgtatgctgtacaccctggcgtgtgacggtaaagcgccgcgcattttcgctaaactgtcgcgtggtggcgtgccgcgtaatgcgctgtatgcgacgacggtgattgccggtctgtgcttcctgacctccatgtttggcaaccagacggtatacctgtggctgctgaacacctccgggatgacgggttttatcgcctggctggggattgccattagccactatcgcttccgtcgcggttacgtattgcagggacacgacattaacgatctgccgtaccgttcaggtttcttcccactggggccgatcttcgcattcattctgtgtctgattatcactttgggccagaactacgaagcgttcctgaaagataccattgactggggcggcgtagcggcaacgtatattggtatcccgctgttcctgattatttggttcggctacaagctgattaaaggaactcacttcgtacgctacagcgaaatgaagttcccgcagaacgataagaaataa

SEQ ID NO: 459621 - DNA, 882 bp, Shigella boydii
atgcacatcaccctccggcagttggaagtttttgcagaagtattgaaaagtggatcaaccacccaggcgtcggtgatgctggcgttgtcgcaatcagcagtgagcgcagccttgaccgacctggaagggcagcttggcgtgcaactgtttgatcgcgtggggaaaagactggttgttaatgaacacgggcggctgctctatccgcgtgcgttggcattgcttgaacaggcggttgaaatcgaacaactgtttcgcgaagacaacggcgcgattcgtatctatgccagtagtaccatcggtaactacattctgcctgcagttatcgcccgttatcgccatgattatccgcagttgccgattgaacttagcgttgggaacagccaggacgtgatgcaagcggtgctggatttccgcgttgatattggctttattgaaggaccgtgccacagcactgaaatcatttctgaaccgtggctggaagacgagctggtggttttcgccgcgccgacttcgccgttggctcgtggtccgatcaccttagaacagctggccgctgcgccgtggatcctgcgtgaacgcggttccggcacgcgggagattgtcgattatctattgctgtcacatttaccgaagtttgagatggcgatggaattaggtaactccgaggcaatcaaacatgcggtgcgtcatgggttgggaattagttgcctgtcgcgacgggtgattgaagatcaattgcaggcaggcacattaagtgaagttgcggtccctctgccgcgcctgatgcgtacgttgtggcgtatacatcatcggcaaaaacacctttccaacgcgctacggcgctttctggactattgcgatcccgcgaatgtaccgcgttaa

SEQ ID NO: 459622 - DNA, 1050 bp, Shigella boydii
atgacgaatatcaccttacagaaacaacatcgtacactgtggcattttattccggggttagccctgagtgcagttatcaccggggtcgccctgtggggtggttccattcccgcggttgcgggtgccgggtttagtgccctcaccctcgcaatcttgttggggatggttttaggcaacaccatctatccgcacatctggaaaagctgtgacggtggtgtgctgtttgccaagcaatatttattacgtctgggtatcattctttatggcttccgtctgacgttctcgcaaattgccgatgtcggtatcagtgggatcatcattgacgtgttgacgctgtccagtaccttcctgctggcttgcttcctggggcagaaagtgtttggtctggataagcacaccagctggttgatcggtgccggtagcagtatctgtggtgctgccgcggtactggcgactgagccggtagtgaaagcggaagccagtaaagtaaccgtggctgttgcaaccgttgttatcttcgggaccgtcgcgattttcctctacccggcgatatatccgctgatgtctcaatggtttagtccggaaactttcggtatctacattggttctactgtgcacgaagtggcgcaggtggtggcggcaggtcatgccatcagcccggatgcggaaaacgcagcagttatttccaaaatgctgcgcgtgatgatgctggctccgttcctcatcctgctggcggcgcgtgttaaacagctgtctggggcgaacagcggcgagaaaagcaaaatcactattccgtggtttgccatcttgttcatcgtcgttgccatctttaactcgttccacctgttaccgcagagcgtggtgaacatgctggtaacgctggataccttcctgctggcaatggcgatggcggcgctgggtctgaccactcacgtcagcgcgctgaaaaaagccggggcgaaacctctgctgatggcactggtactgtttgcctggctgattgttggtggtggtgcgattaactatgtgattcaaagcatcatcgcataa

SEQ ID NO: 459623 - DNA, 858 bp, Shigella boydii
atgaaatacattggagcgcacgttagtgctgctggcggtctggcaaatgccgcaattcgcgccgccgaaatcgacgcaaccgcgtttgccttgttcaccaaaaaccaacgtcagtggcgtgccgcaccgctcacgacgcaaaccatcgatgaattcaaagcggcctgtgaaaaatatcactacacatcggcgcaaattcttccccacgacagctatctgattaacctcggacatccggtcactgaagctctggaaaaatcgcgcgatgcctttatagatgaaatgcagcgttgcgaacaactggggctttctttgctcaacttccaccctggcagccatctgatgcagatttcagaagaggattgccttgcgcgtattgccgaatccatcaacattgcgctggataaaactcaaggtgtaacagcggtgattgaaaacaccgccggtcagggcagtaacttagggtttaaattcgaacatctcgcggcgattatcgacggcgtggaagataaatcccgtgtcggcgtctgcattgatacctgccatgctttcgctgccgggtatgatttgcgtactccagccgaatgcgagaaaacgttcgcggattttgcccgtattgttggctttaagtatctgcgcgggatgcaccttaacgatgcgaaaagcacctttggcagccgcgttgaccgccatcatagcctcggtgaagacaatatcggtcatgatgcgttccgctggatcatgcaggacgaccgtttcgacggcattccgctgatccttgaaaccatcaacccggatatctgggcagaagagatcgcctggctgaaagcgcaacaaactgaaaaagcggtagcctga

SEQ ID NO: 459624 - DNA, 1089 bp, Shigella boydii
atgaataaccgggaaaaggagatccttgcaattttacggcgtaacccgctgattcagcagaacgaaattgcggacatgctgcaaatcagtcgttcgcgcgttgcggcgcatattatggatttaatgcgcaaagggcggattaaaggcaaaggttacattctcaccgagcaggaatactgcgtagtggtggggacaatcaatatggatattcgcgggatggcggatatccgttacccgcaagcggcttctcatcccggaacaattcattgctcggcgggcggcgtgggacgcaacatcgcccacaatctggcgctgttaggccgtgacgtccatttgctttcagtgattggcgatgacttttatggcgaaatgctcctggaagaaacgcgccgtgccggcgtgaatgtctccggctgcgttcgtttgcatggtcaaagcacatcgacgtatctggcaattgccaatcgagacgatcaaaccgtgctggcgattaacgatacccatctgctggaacagttgacaccgcaactactgaacgggtcgcgcgatttacttcgtcatgcgggcgtggtactggctgattgcaacctgacagccgaggcgctggaatgggtctttaccctcgctgatgaaatcccggtgtttgtcgataccgtttcagaattcaaagcgggcaaaatcaaacactggctggcgcatattcacaccctgaaacccactttaccggagctggaaattttatggggacaggcgatcaccagcgatgctgaccgtaatgccgcagtgaatgcattgcatcagcaaggtgttcagcaactgtttgtttatttgcccgatgagtcagtttattgcagcgaaaaggatggagaacaatttttgctgaccgcgccagcgcatacgacagtagacagttttggtgctgacgatggttttatggcgggcctagtatatagctttcttgaaggatacagtttccgcgacagcgcccgttttgcggtagcctgcgcggcaatttcgcgcgccagcggcagcttaaacaaccctaccctgtctgccgataacgcgctttcattagtgccaatggtgtaa

SEQ ID NO: 459625 - DNA, 1248 bp, Shigella boydii
atggatgtcatgagaagtgttctgggaatggtggtattgctgacgattgcgtttttgctgtcagtaaacaagaagaagatcagcctgcgtaccgttggcgcggcgttagtgttacaggtcgtgattggcgggattatgctttggttaccggcagggcgttggatcgctgaaaaagtcgcttttggcgtgcataaagtgatggcgtacagcgacgcgggtagcgcatttatcttcggttcgctggtcgggccgaaaatggacacgctgtttgatggcgcaggatttatctttggtttcagggtattaccggcaattatcttcgtcactgcactggtgagtattctctactacatcggtgtgatggggattttaattcgcattctcggcggtatattccagaaagcattaaatatcagcaagattgagtcattcgtcgcggtcaccaccattttcctcgggcaaaacgaaattccggcgatcgtcaaaccctttatcgatcatctgaatcgcaatgaattatttacagcgatttgtagtggcatggcctcgattgctggttcgacaatgattggttacgccgccctgggcgtacctgtggaatatttgctggcggcatcgttaatggcgatcccaggcgggatcttgtttgcccgcctgttaagcccggctacggaatcttcgcaggtttcctttaataacctctctttcaccgaaacaccgccaaaaagcattattgaagccgctgcgacaggggcaatgaccgggctgaaaatcgccgccggtgtagcgacagttgttatggcagtcgccatcattgcgttaattaatggtattatcggcggcgttggcggctggtttggttttgcacatgcctcgctggagtccattttaggttacctgttggccccattggcgtgggtgatgggggttgactggagtgatgcaaatcttgccgggagtttgattgggcagaagctggcgatcaatgaatttgtcgcttatctcaatttctcgccatatctgcaaacgggtggcactctggatgctaaaaccgtggcgattatttctttcgcgttgtgcggtttcgctaactttggttctatcggggtggtggtgggggcgttttctgcggttgcgccacaccgtgcgccggaaatcgcccaacttggtttacgcgcgctggcggcggcgacactttctaacctgatgagtgctactattgcaggattctttattggtttagcgtag

SEQ ID NO: 459626 - DNA, 729 bp, Shigella boydii
atgcgtaaacaaatcgttgccgataatattcacggtgaaaccggactggatggtccggtattcgagtcgctgacccgccaggcagaaagtacccacgcggtgaaatacatcattgataccctgatggcaagcgatggcgatatcactctggtgccggttggtccgctttcaaatatcgcggtggcaatgcgtatgcaacccgcgatcctgcccaaaatccgtgaaattgtgctaatgggcggcgcttacggtacaggcaacttcacgccatctgccgagttcaacatctttgctgatccggaagcagcccgcgtggtgttcacctccggcgttccattagtgatgatgggcctcgatctcaccaaccagactgtttgcaccccggacgtgattgcacggatggaaagggcaggcggccctgccggagagctgttcagcgacatcatgaacttcactctcaaaacgcagttcgaaaactacggcctggctggcggcccggtgcacgacgccacctgcatcggttatctgattaaccctgatggcattaaaacccaggagatgtacgtcgaagtggacgtcaacagtggcccttgctatgggcgtaccgtctgcgacgagctgggcgttcttggcaagcccgctaataccaaagtcggcatcactattgataccgactggttctggggcttagtcgaagagtgcgtgcgcggctacatcaaaacccattaa

SEQ ID NO: 459627 - DNA, 642 bp, Shigella boydii
ttgtatcaggataaaattcttgtccgccagctcggtcttcagccttacgagccaatctcccaggctatgcatgaattcaccgatacccgcgatgatagtacccttgatgaaatctggctggtcgagcactatccggtattcacccaaggtcaggcaggaaaagcggagcacattttaatgccgggtgatattccggtgatccagagcgatcgcggtgggcaggtgacttatcacgggccgggacaacaggtgatgtatgtgttgcttaacctgaaacgccgtaaactcggtgtgcgtgaactggtgaccttgcttgagcaaacagtggtgaataccctggctgaactgggtatagaagcgcatcctcgggctgacgcgcctggtgtctatgtcggggaaaagaaaatttgctcactgggtttacgaattcgacgcggttgttcattccacggtctggcattaaacgtcaatatggatctttcaccatttttacgtattaatccttgtgggtatgccggaatggaaatggctaaaatatcacaatggaaacccgaagcgacgactaataatattgctccacgtttactggaaaatattttagcgctactaaacaatccggacttcgaatatattaccgcttaa

SEQ ID NO: 459628 - DNA, 264 bp, Shigella boydii; identical to SEQ ID NO: 299

SEQ ID NO: 459629 - DNA, 1212 bp, Shigella boydii
atgaataccattttttccgctcgtatcatgaagcgcctggcgctcaccacggctctttgcacagcctttatctctgctgcacatgccgatgacctgaatatcaaaactatgatcccgagtgtaccgcagatcgatgcggagtcctacatcctgattgactataactccggcaaagtgctcgccgaacagaacgcagatgtccgccgcgatcctgccagcctgaccaaaatgatgaccagttacgttatcggccaaacaatgaaagccggtaaatttaaagaaactgatttagtcactatcggcaacgacgcatgggccaccggtaacccggtgtttaaaggttcttcgctgatgttcctcaaaccgggcatgcaggttccggtttctcagctgatccgcggtattaacctgcaatcgggtaacgatgcttgtgtcgccatggctgattttgccgctggtagccaggacgcttttgttggcttgatgaacagctacgttaacgccctgggcctgaaaaacacccacttccagacggtacatggtctggatgctgatggtcagtacagctccgcgcgcgatatggcgctgatcggccaggcgttgatccgtgacgtaccgaatgaatactcgatctataaagaaaaagaatttacgtttaacggtattcgccagctgaaccgtaacggcctgttatgggataacagcctgaatgtcgacggcatcaaaaccggacacactgacaaagcaggttacaaccttgttgcttctgcgactgaaggccagatgcgcttgatctctgcggtgatgggcggacgtacttttaaaggccgtgaagccgaaagtaaaaaactgctgacctggggcttccgtttcttcgaaaccgttaacccactgaaagtaggtaaagagttcgcctctgaaccggtttggtttggtgattctgatcgcgcttcgttaggggttgataaagacatgtacctgaccattccgcgtggtcgcatgaaagatctgaaagccagctatgtgctgaacagcagtgaattgcatgcgccgctgcaaaagaatcaggtcgtcggaactatcaacttccagcttgatggcaaaacgatcgagcaacgcccgctggttgtgttgcaagaaatcccggaaggtaacttcttcggcaaaatcattgattacattaaattaatgttccatcactggtttggttaa

SEQ ID NO: 459630 - DNA, 1089 bp, Shigella boydii
atgcgtaagcagtggctcgggatctgcatcgcggcaggaatgctcgcggcatgtacaagcgatgatggtcagcaacagacggtaagtgtaccgcagcctgcggtatgtaacggccccatagttgaaattagcggggcggacccgcgtttcgaaccactgaacgcgacggcaaatcaggattaccagcgcgacggtaaaagctacaaaatcgtgcaggatccgtctcgatttagccaggcgggactggcggcaatctatgatgccgaaccaggcagtaacctgacggcctctggcgaagctttcgatccgacacagctgacggcggcccatccaacgcttccgctccccagctacgccagaatcactaacctggctaacgggcgaatgatcgtggtgcgcattaatgatcgcggcccttacggcaacgaccgcgttatttcgctttctcgcgcggcagctgaccgtcttaacacgtcaaacaacaccaaagttcgtatcgatccgattattgtcgcccaggatggttcgctttctggtcctggtatggcttgtaccacagtcgccaaacagacttacgccctgcctgcacctcccgatttaagcggtggcgcgggaacaagttcagtgtctggcccgcagggtgacattcttccggtcagtaattcgacgctaaaaagcgaagatccgaccggcgcgccggtaaccagtagcggtttcctcggcgcaccaacgaccttagcgcctggtgtactggaaggcagcgaaccgacgcctgcgccacagcccgttgttacagctccgtcgacaacgcctgcaacctcgcctgcaatggtgacaccgcaagccgcctcgcaaagcgccagcggcaactttatggtgcaagtcggggccgttagcgatcaggctcgtgcgcaacagtaccaacagcaactgggacagaagttcggcgtccccggtcgcgtaactcaaaatggcgcggtctggcggatccagcttggccccttcgccagcaaagccgaagccagtaccttgcagcaacgtttgcaaaccgaagcccaattacagtcatttattaccaccgcgcagtag

SEQ ID NO: 459631 - DNA, 1113 bp, Shigella boydii
atgacggataatccgaataaaaaaacattctgggataaagtccatctcgatcccacaatgctgctgatcttactggcattgctggtttacagcgccctggttatctggagcgccagcggtcaggatattggcatgatggagcgtaaaatcggccaaatcgcaatgggtctggtcatcatggtggtgatggcgcaaattcctccacgcgtttatgaaggctgggccccctatctctatatcatctgtattattttgctggtggcggtagatgctttcggtgccatctctaaaggtgctcaacgctggctggacctcggtattgttcgttttcagccgtcggaaattgccaaaatagccgtaccactgatggttgcgcgctttatcaaccgcgatgtttgcccaccgtcgttgaagaacacaggcatcgcgctggtgctgatatttatgcccacgctgctggtggctgcacagcctgacctgggaacatcaatcctcgttgcgctttccggtctgtttgtactgttcctctctggccttagctggcgtctgattggcgtcgcagtagtgctggtggcggcgttcattcctattctgtggttcttcctgatgcatgattaccagcgccagcgcgtaatgatgctcctggacccggaatcagacccactcggcgcgggctatcacattattcagtctaaaattgctattggctccggcggattacgcggcaaaggctggctgcatggcactcagtcacaacttgaatttctacccgaacgccataccgactttatcttcgcggtactggcggaagagctgggattagtgggcattttgattctgctcgctctctacattctgctgatcatgcgcgggctgtggatagccgccagagcgcaaaccacctttggtcgcgtcatggctggcggcttaatgctgatattattcgtttatgtcttcgtaaatattggtatggtaagcggtattctgccggttgtaggggttccgctcccactggtcagttatggaggatcagcgctaattgtgctgatggctgggttcgggattgtaatgtcaatccacacccacaggaaaatgttgtcgaaaagcgtgtaa

SEQ ID NO: 459632 - DNA, 1902 bp, Shigella boydii
atgaaactacagaactcttttcgcgactatacggcagagtccgcgctgtttgtgcgccgggcgctggtcgcctttttggggattttgctgctgaccggcgtgcttatcgccaacctgtataatctgcaaattgttcgctttaccgactaccagacccgctctaatgaaaaccgcattaagctggtgcctatcgcgcccagccgcggcattatttacgaccgtaatggtatccctctggccctcaaccgcactatctaccagatagaaatgatgccagagaaagtcgataacgtgcagcaaacgctggacgctttgcgcagcgtggttgatctgaccgatgacgatattgctgcattccgaaaagagcgcgcacgttcacaccgtttcacctctattcccgtgaaaactaacctgaccgaagtacaagtagctcgctttgccgtcaatcagtaccgttttccgggggttgaagttaaaggctataaacgtcgttactatccttacggttcggcgttgacccacgtcatcggctatgtgtcgaaaatcaacgataaagacgtcgaacgcctgaataatgacggcaaactggccaactatgcggcaacgcatgatatcggtaagctgggcattgagcgttactatgaagacgtgctgcacggtcagaccggttatgaagaggttgaagttaacaaccgtgggcgtgttatccgccagttaaaagaagtaccaccgcaagccggatacgatatttacctgacgctggatctcaaactccagcaatatattgaaacgctgctggcgggtagccgcgcagctgtggtagtcaccgatccgcgtacaggtggggtgctggcgctggtttccacgcctagttatgacccaaacttgtttgttgacggtatctccagcaaagattattccgccttgttgaacgacccgaatacaccgctggtgaaccgcgccacacagggggtttatcctcccgcgtctacagttaaaccctatgtggcggtttcggcattgagcgccggggtgatcacgcgcaatacgacgctgtttgacccaggctggtggcaactgccaggttcggaaaaacgttatcgtgactggaaaaaatggggccacgggcgtctgaatgtcacaagatcgctggaagaatctgcggataccttcttctatcaggtggcctacgatatggggatcgatcgcctctccgaatggatgggtaaattcggttatggtcattacaccggtatcgacctggcggaagaacgttccggcaacatgcctacccgcgaatggaaacagaaacgctttaaaaaaccgtggtatcagggtgacaccattccggttggtatcggtcagggttactggacagcgaccccaatccagatgagtaaggcactgatgatcctgattaatgacggtatcgtgaaggttccgcatttgctgatgagcaccgccgaagacggcaaacaggtgccatgggtacaaccgcatgaaccgcccgtcggcgatattcattccggttactgggagctggcgaaagacggtatgtacggtgttgctaaccgccctaacggtacggcgcataaatactttgccagcgcaccgtacaaaattgcggcgaaatctggtaccgctcaggtcttcggtctgaaagcgaacgaaacctataatgcgcacaaaattgccgagcgtttacgtgaccacaaactgatgaccgcctttgcgccatacaacaatccgcaagtggctgtcgccattattctggagaacggcggcgcgggtccggcggttggtacgctgatgcgtcagatcctcgaccacattatgctgggtgataacaacaccgatctgcctgcggaaaatccagcggttgccgcagcggaggaccattaa

SEQ ID NO: 459633 - DNA, 468 bp, Shigella boydii; identical to SEQ ID NO: 26948

SEQ ID NO: 459634 - DNA, 318 bp, Shigella boydii
ttgcagggtaaagcactccaggattttgttatcgacaaaattgatgacctcaaaggtcaggacatcatcgccttagacgttcaaggcaaatccagcatcaccgactgcatgatcatctgtacgggtacgtccagccgtcatgttatgtccattgctgaccacgttgtgcaggagtctcgcgcagcgggcctgttaccgctcggcgtagaaggtgaaaacagcgccgactggattgtcgtggatttgggcgatgtgattgtccatgtcatgcaggaagagagccgtcgcctgtatgaactggaaaaactctggagttaa

SEQ ID NO: 459635 - DNA, 480 bp, Shigella boydii
atggtctttacagcggtcatgcgccccccccccctgaccgcgcgcggtattgagcaagcgcaaaatctgcatacgctgctacatggtgtttcctttgatctggttttatgcagtgaactggaacgagcacagcataccgcgcgactggttctcagtgaccgccagctccccgtgcaaatcatccctgaactcaacgaaatgttttttggcgactgggagatgcgacatcatcgcgacctcatgcaagaagatgccgaaaactatagcgcgtggtgcaatgactggcagcatgcaatccccacgaacggtgaaggatttcaggcattttcgcaacgtgtggaacgctttatcgcaaggcttagtgaatttcagcactatcagaatattttagtcgtcagccatcagggtgtactgagtctgttaatcgcccgtttaattggcatgcctgccgaggctatgtggcattttcgcgttgactag

SEQ ID NO: 459636 - DNA, 642 bp, Shigella boydii
atgaaatctttacaggctctgtttggcggcacctttgatccggtgcactatggtcatctaaaccccgtggaaacgctggcgaatttgattggtctgacgcgggtcacaatcatccctaataatgttcctccgcatcgtccccagccggaagcgaacagcgtgcagcgtaaacacatgcttgaactggcgattgccgacaagccattatttactcttgatgaacgcgagctaaagcgcaatgccccctcttacactgcgcaaacactgaaagagtggcggcaggaacaaggaccggacgtgccgctggcgtttattattggtcaggattcactgctgacctttccgacctggtacgaatacgaaacgatactcgacaatgcacatttgatcgtctgtcggcgtccaggttacccacttgaaatggcgcaaccgcaataccagcaatggctggaagatcatttgacacataaccaggaagatcttcaccttcagcctgccggtaaaatttatctggctgaaacgccgtggtttaacatctcggcgaccatcatccgcgaacgtttgcaaaacggtgaatcgtgtgaggatttattgccggaaccggtactgacttacattaaccaacaaggcttgtatcgctga

SEQ ID NO: 459637 - DNA, 1032 bp, Shigella boydii
atgattcggttgtacccggaacaactccgcgcgcagctcaatgaagggctgcgcgcggcgtatcttttacttggtaacgatcctctgttattgcaggaaagccaggacgctgttcgtcaggtagctgcggcacaaggattcgaagaacaccacactttttccattgatcccaacactgactggaatgcgatcttttcgttatgccaggctatgagtctgtttgccagtcgacaaacgctattgctgttgttaccagaaaacggaccgaatgcggcgatcaatgaacaacttctcacactcaccggacttctgcatgacgacctgctgttgatcgtccgcggtaataaattaagcaaagcgcaagaaaatgccgcctggtttactgcgcttgcgaatcgcagcgtgcaggtgacctgtcagacaccggagcaggctcagcttccccgctgggttgctgcgcgcgcaaaacagctcaacttagaactggatgacgcggcaaatcaggtgctctgctactgttatgaaggtaacctgctggcgctggctcaggcactggagcgtttatcgctgctctggccagacggcaaattgacattaccgcgcgttgaacaggcggtgaatgatgccgcgcatttcaccccttttcattgggttgatgctttgttgatgggaaaaagtaagcgcacattgcatattcttcagcaactgcgtctggaaggcagcgaaccggttattttgttgcgcacattacaacgtgaactgttgttactggttaacctgaaacgccagtctgcccatacgccactgcgtgcgttgtttgataagcatcgggtatggcagaaccgccggggcatgatgggcgaggcgttaaatcgcttaagtcagatgcagttacgtcaggccgtgcaactcctgacacgaacggaactcaccctcaaacaagattacggtcagttagtgtgggcagagctggaagggttatctcttctgttgtgccataaacccctggcggacgtatttatcgacggttga

SEQ ID NO: 459638 - DNA, 582 bp, Shigella boydii
gtgcgatatctggcaacattgttgttatctctggcggtgttaatcaccgccgggtgtggctggcatctgcgtgataccacgcaggttccttccactatgaaggtcatgatcctggactcaggcgatccgaacgggccattaagccgtgcggtgcgtaaccagttacgtctgaatggtgtcgagttgcttgataaagaaaccacgcgtaaggacgttccatccctgcgtttgggtaaagtgagcatcgcgaaagataccgcatcggtattccgtaacggtcaaacagcagagtatcagatgatcatgacggtgaatgcgaccgtgttgatccccggccgtgatatctacccgattagcgccaaagtcttccgttcgttctttgataacccgcaaatggcgttagcgaaagataacgaacaagacatgatcgtaaaagagatgtacgaccgtgctgccgaacagctgattcgtaagctgccaagcatccgtgctgcggatattcgttccgacgaagaacagacgtcgaccacaacggatactccggcaacgcctgcacgcgtctccaccacgctgggtaactga

SEQ ID NO: 459639 - DNA, 2583 bp, Shigella boydii
atgcaagagcaataccgcccggaagagatagaatccaaagtacagcttcattgggatgagaagcgcacatttgaagtaaccgaagacgagagcaaagagaagtattactgcctgtctatgcttccctatccttctggtcgactacacatgggccacgtacgtaactacaccatcggtgacgtgatcgcccgctaccagcgtatgctgggcaaaaacgtcctgcagccgatcggctgggacgcgtttggtctgcctgcggaaggcgcggcggtgaaaaacaacaccgctccggcaccgtggacgtacgacaacatcgcgtatatgaaaaaccagctcaaaatgctgggctttggttatgactggagccgcgagctggcaacctgtacgccggaatactaccgttgggaacagaaattcttcaccgagctgtataaaaaaggcctggtatataagaagacttctgcggtcaactggtgcccgaacgaccagaccgtactggcgaacgaacaagttatcgacggctgctgctggcgctgcgataccaaagttgaacgtaaagagatcccgcagtggtttatcaaaatcactgcttacgctgacgagctgctcaacgatctggataaactggatcactggccagacaccgttaaaagcatgcagcgtaactggatcggtcgttccgaaggagtggagatcaccttcaacgttaacgactatgacaacacgctgaccgtttacactacccgcccggacacctttatgggttgtacctacttggcggtagctgcgggtcatccgctggcgcagaaagcggcggaaaataatcctgaactggcggcctttattgacgaatgccgtaacaccaaagttgccgaagctgaaatggcgacgatggagaaaaaaggcgtcgatactggctttaaagctgttcacccattaacgggcgaagaaattcccgtttgggcagcaaacttcgtattgatggagtacggcacgggcgcagttatggcggttccgggtcacgaccagcgcgactacgagtttgcctctaaatacggcctgaacatcaaaccagttatcctggctgctgacggctctgagccagatctttctcagcaagccctgactgaaaaaggcgtgctgttcaactctggcgaattcaacggtcttgaccatgaagcggccttcaacgccatcgccgataaactgactgcgatgggcgttggcgagcgtaaagtgaactaccgcctgcgcgactggggtgtttctcgtcagcgttactggggcgcgccgattccgatggtgacgctggaagacggtaccgtaatgccgaccccggacgaccagctgccggtgatcctgccggaagatgtggtgatggacggcattaccagcccgattaaagcagatccggagtgggcaaaaactaccgttaacggtatgccagcgctgcgtgaaaccgacactttcgacacctttatggagtcctcctggtactatgcgcgctacacttgcccagagtacaaagaaggtatgctggattccgaagcggctaactactggctgccggtggatatctacattggtggtatcgaacacgccattatgcacctgctctacttccgcttcttccacaaactgatgcgtgatgcaggcatggtgaactctgacgaaccagcgaaacagttgctgtgtcagggtatggtgctggcagatgccttctactatgttggcgaaaacggcgaacgtaactgggtttccccggttgatgctatcgttgaacgtgacgagaaaggccgtatcgtgaaagcgaaagatgcggcaggccatgaactggtttataccggcatgagcaaaatgtccaagtcgaagaacaacggtatcgacccacaggtgatggttgaacgttacggcgcggacaccgttcgtctgtttatgatgtttgcttctccggctgatatgactctagaatggcaggaatccggtgtggaaggggctaaccgcttcctgaaacgtgtctggaaactggtttacgagcacacagcaaaaggtgatgttgcggcactgaacgttgatgcgctgactgaagatcagaaagcgctgcgtcgcgatgtgcataaaacgatcgctaaagtgaccgatgatatcggccgtcgtcagaccttcaacaccgcaattgcggcgattatggagctgatgaacaaactggcgaaagcaccaaccgatggcgagcaggatcgcgctctgatgcaggaagcgctgctggccgttgtccgtatgcttaacccgttcaccccgcacatctgcttcacgctgtggcaggaactgaaaggcgaaggcgatatcgacaacgcgccgtggccggttgctgacgaaaaagcgatggtggaagactccacgctggtcgtggtgcaggttaacggtaaagtccgtgccaaaatcaccgttccggtggacgcaacggaagaacaggttcgcgaacgtgctggccaggaacatctggtagcaaaatatcttgatggcgttaccgtgcgtaaagtgatttacgtaccaggtaaactcctcaatctggtcgttggctaa

SEQ ID NO: 459640 - DNA, 483 bp, Shigella boydii
atgaacaaggttgctcaatattaccgtgaactggtcgcgtcactgagcgaacgcctgcgcaatggcgaacgtgatatcgacgcactggtggaacaggcgcgcgagcgcgtaataaaaacaggggagttaacgcgaaccgaggtcgatgagctgacgcgagctgtaagacgtgacctggaagagttcgccatgagctatgaagagagcctgaaagaagaatctgacagcgtctttatgcgggtgattaaagaaagcttatggcaggagctggcagatatcaccgataaaacgcagcttgaatggcgcgaagttttcccggacctcaatcatcatggggtttatcacagcggagaagtggtcgggctgggaaatctggtctgcgagaaatgtcacttccatctcccgatctacacaccggaagtgctgacgctatgcccgaaatgtggtcatgaccagttccagagacgcccgtttgagccgtaa

SEQ ID NO: 459641 - DNA, 978 bp, Shigella boydii
atgatttttacgtcaagttgctgcgataatttatcaatagatgagattatcgaacgtgctgaaaaaggcgattgcgaggctcaatatattgttgggttttattataatcgcgatagcgcaattgactctccggacgacgaaaaggccttttactggctgaagctggccgccgagcaaggtcattgtgaagcacaatattccttaggacaaaagtatactgaggataaaagccgtcataaagataatgagcatgccatcttttggctgaaaaaaactgccctacaaggccatactttcgcttccaacgcccttggctggatactggatcgtggagaagaccccaattataaagaagcggttgtctggtatcagatagccgcggagagcggaatgtcttatgcgcaaaataatcttgggtggatgtacagaaatggcaacggagtcgcaaaagactatgcgctggcatttttctggtacaaacaagctgcattacaaggccatagtgacgcgcaaaacaatctggccgatctttatgaagacggaaaaggcgttgctcaaaacaagacactcgccgcattctggtatttgaaaagcgcacagcagagtaatcggcacgcccagtttcaaattgcatgggattataacgctggcgaaggggtggaccaggactataagcaagcgatgtactggtatctgaaggctgccgctcaggaaagcgtcggcgcttacgtcaacatcggttatatgtataaacacggacaaggcgttgagaaagattatcaggctgcctttgaatggtttacgaaagccgctgaatgcaatgacgccactgcctggtataacctggccattatgtatcactacggagaaggaagacctgtcgatctccgacaggctctcgacctgtatcgtaaagttcagtcatccggaaccagagatgtcagtcaggaaattcgtgagactgaagatttactgtag

SEQ ID NO: 459642 - DNA, 597 bp, Shigella boydii
atggacatggggtcgcaaaaaatattgtttgcactttccactccgatggaaatacgcaatgaatgctgtttaccttcgcattcatcccccaaaatgtatttaggtacatgcttttttgacctttcttcctcatggggaattgatgaccgtgatgacctgctacgcacaattcaccgaatgatcgagaacggtcatgccgctcggttggcagggttttatcaccgctggtttcgttattctccatgtgaatggcgtgactatcttgctgaattaaatgagcaaggtcaggcttatgcgcaatttgtcgccagcacagccgaatgctgtggtgagggaggaattaaagcatgggattatgtccggatgggttttttaagtcgaatgggcgtacttaataactggttgagtgaagaagaaagtctatggatccagtcgcgtattcatctacgggctctacgttattatagtaactggcggcaatactttgccggttatacctttggtcggcaatattggcagtctcccgaagatgatcatctgcctttattacgcgaattcttagcgcgtaaagaatacgacgattccggcaatgggtaa

SEQ ID NO: 459643 - DNA, 861 bp, Shigella boydii
gtgcgtaaaaatggcactaactgggagctttacgcttccgggacagttccggaaccgactcctaatcctgaacccacaccagctcccgctcagcctcccatagtcaaccccgatcctacgcctgaacccgctcccacgcctaaacccaccacgaccgcagatgctggcggcaattatctcaatgtcggttacttattgaactatgttgaaaaccgtacgctgatgcaacggatgggtgacctgcgaaatcagagtaaagacggtaatatctggttgcacagttatgggggaagcctggactcctttgccagtggcaaactgagcggctttgacatgggttacagcggtatccagtttggtggggataaacgtctctctgatgaaatgccgttgtatgtcggtctgtatattggctcaacacatgcatcgccggactatagcggaggcgacggtaccgcacgttcagactacatgggaatgtacgccagttacatggcacaaaacggtttttacagcgatctcgttataaaagcatcgcgccagaaaaatagtttccacgtactggacagtcataacaacggcgttaacgccaacggcactgcgaatggaatgagcatctccctggaagccgggcagaggttcaacctgtcccctactggttatgggttctatatagagccgcaaacccagcttacatacagccaccagaatgagatggctatgaaggcgagtaatggcctcaatatacatctgaatcactacgaatcgctgctggggcgtgccagcatgatactggggtatgacatcaccgcaggcaacagccagctgaatgtctatgtgaatgaggtgtactggcaatag

SEQ ID NO: 459644 - DNA, 1821 bp, Shigella boydii
atgggcatcaaacaacacaatgggaataccaaagcagatcgtctcgctgaattaaaaatccgttcgccctcaattcaactgataaaatttggcgctattggtttgaatgcaattatcttttcccccctgctgatagctgctgatacaggaagtcaatatggcaccaatattactattaatgatggtgacagaattacaggagataccgccgatccatcaggaaacctctatggtgtaatgaccccagcaggaaacacgcctggcaatatcaacctgggtaatgatgtcaccgtcaatgtcaacgacgcctctggatatgcaaaaggaatcattattcagggcaaaaacagctccctgacagctaaccgactcacagtagatgttgttggtcaaacctctgccatcggcattaacttaattggtgactatacccatgctgacttaggcacaggcagcaccattaagagtaacgatgacggcatcattattgggcatagctcaacactaacagccactcaattcaccattgaaaactcgaacggtataggcctaaccatcaatgactatggcaccagtgtcgatcttggaagcggaagtaaaatcacgaccgatggaagtacaggtgtttatatcggtggtctcaacggcaataacgccaatggtgctgcgcgttttacggctacagacctgacaatcgatgttcagggctacagcgccatggggataagcgtacagaaaaactctgttgtcgatctcggaacaaacagttccattaaaaccaatggcgataatgcacacggcctctggagctttggccaggttagcgcgaatgcactcactgttgatgtaactggagccgcggccaatggcgtcgaagctcgtggtggtacaaccactatcggtgcagatagccatatttcttccgcgcagggcggtggcctcgtcaccagtggttcagacgcgacaatcaatttttctggcacggcagcgcaacgaaacagcatcttttccggcggttcttatggtgcctcggcccagacggcaacggctgttgtcaacatgcaaaataccgatattacagttgatcgtaatggcagtctggcgctgggtttgtgggcgctcagcggcggtagaataaccggagacagtttggctatcaccggcgcggcaggagccaggggaatttatgccatgaccaacagccagatcgacctcacgagcgatctggtcattgatatgagtacacccgaccagatggccattgcaatgcaacatgacgatggttatgccgccagccgcatcaacgcctcgggtcgtatgcttatcaacggtagcgttttttccaaaggtgggctaatcaatctggatatgcaccctgggtcggtttggacaggttcctccctcagcgataatgtcaatggcggaaaactggacgttgcaatgaataacagcgtctggaacgtaacaagtaattctaatctcgacacgctggcgctgagccattcaactgtcgattttgccagccacgggtcaactgccggcacatttgccacattaaacgtagagaacctgagcggtaacagtacctttattatgcgtgctgatgttgttggcgagggtaatggcgttaataataaaggggatttattgaatatcagcgggagtagtgctggtaatcacgtattggctatccgcaaccagggcagcgaggccacaacgggaaatgaagttctgacagtggtaaaaaccactgacggcgcggcctcgttcagcgcgtcttctcaggttgagttgggggggatatctgtacgatgtgcgtaa

SEQ ID NO: 459645 - DNA, 180 bp, Shigella boydii
atgtatctgcataacaaaaacaatatgcgccatttttgcattactaataagaaaaagcaaaaaacatcgatattcatttttggtcaatgggttttctggcctatcgttgttattgtgctactggttatcattttcatcttgccagcatattggagcgtgatcaattttgatcagctgtga

SEQ ID NO: 459646 - DNA, 1092 bp, Shigella boydii
atgggattcaaatgcggtatcgtcggtttgcccaacgtcgggaaatctaccctgttcaacgcgctgaccaaagccggtattgaagcggccaactttccattctgcaccattgagccgaacacaggtgtcgtaccaatgcctgatcctcgcctggatcaactggctgaaatcgtaaaaccgcagcgtacgcttcccacgaccatggaatttgtcgatatcgccggtctggtaaaaggcgcatcgaaaggcgaaggtctgggtaaccagttcctgaccaacatccgtgaaaccgaagcgatcggtcacgttgttcgctgctttgaaaatgacaacatcattcacgtttccggcaaagttaacccggctgacgatattgaagttatcaacaccgaactggcgctggcagacctcgacacctgcgaacgtgcgattcatcgcgtacagaagaaagccaaaggtggcgataaagacgcgaaagctgagctggcggtcctggaaaaatgcctgccccagttggaaaatgcaggtatgctgcgcgcgctggatttaagcgctgaagagaaagcggctattcgttacctgagcttcctgacgctgaaaccaacaatgtacatcgccaacgtcaacgaagacggttttgaaaacaacccatatcttgaccaggtgcgtgaaatcgcggcgaaagaaggttctgttgtggttccggtttgtgctgctgttgaagcagacattgccgaactggacgacgaagaacgtgacgagtttatgcaggagcttgggctggaagagccgggcctgaaccgtgtgatccgtgccggttataagctgctgaacctgcaaacttacttcaccgctggggtgaaagaagtgcgtgcatggaccattccggttggagcaaccgcgccgcaggcagcgggcaaaatccatactgattttgaaaaaggctttatccgtgcacaaaccatctcgtttgaagatttcatcacttacaaaggtgaacaaggcgcgaaagaagcaggcaaaatgcgtgcagaaggtaaagattacatcgtgaaagatggcgatgtgatgaacttccttttcaacgtctaa

SEQ ID NO: 459647 - DNA, 585 bp, Shigella boydii
gtgacgattaaattgattgtcggcctggcgaaccccggtgctgaatacgccgcaacgcgacataatgctggtgcctggttcgttgacttactggcagagcgtttgcgcgctccgctgcgcgaagaggctaaattctttggttatacttcgcgagtcactcttggaggcgaagatgtccgcctgttagtcccgactacatttatgaatctcagcggcaaagccgttgcggcgatggccagttttttccgcattaatccggacgaaattctggtggcccacgacgaactggatctgcctcctggcgtcgccaaattaaaattgggcggtggccatggtggtcacaatggactgaaagacatcatcagtaaattgggtaataaccctaactttcaccgtttacgcatcggaatcggtcatccgggcgataaaaataaagttgtcggttttgtgttaggcaaaccgcctgttagtgaacagaagttaattgatgaagccattgacgaagcggcgcgttgtactgaaatgtggtttacagatggcttgaccaaagcaacgaaccgattgcacgcctttaaagcgcaataa

SEQ ID NO: 459648 - DNA, 279 bp, Shigella boydii
atgaaacgcaaaaacgcttcgttactcggtaacgtgctcatggggttgggtctggtggtaatggtggtcggcgtggggtattcaatcctcaaccagttaccacagtttaatatgccccagtatttcgcacatggtgcagtgctaagtattttcgtcggtgccattctctggctggcgggtgcccgtgttggcgggcatgaacaggtgtgcgaccgttactggtgggttcgccactatgacaaacgttgccgccgtagcgataatcgccgtcatagctaa

SEQ ID NO: 459649 - DNA, 1653 bp, Shigella boydii
atgcctttccgcgctctgatcgacgcttgctggaaagaaaaatatactgccgcacggtttacccgtgacctgattgccgggataaccgtcgggattattgctatcccgctggcgatggcgttggctattggtagtggtgtggcaccccagtacggtttatataccgcagctgttgcggggattgtcattgctctgacgggtgggtcacgctttagcgtttccggtccgactgcggcatttgtggtaattctctatcccgtgtcgcaacagtttggactggcaggactgctggttgcggccttgctgtcggggatctttttgattctgatgggtctggcacgctttggtcgcctgattgagtatattccggtttccgtcaccttaggtttcacctcgggtatcgggatcaccatcggtaccatgcagattaaagattttctcggtctgcaaatggtccatgtcccggaacattatctacaaaaagtcggcgcattatttatggcgctgccgaccattaatgtgggtgatgctgccattggcattgtgacgctaggtattcttgttttttggccgcgtctgggcattcgtttacccggtcaccttccggccttgctggctggttgcgcggtgatggggattgttaacctgctcggcggacatgttgctaccatcggttcgcaattccactacgtcctggccgatggttctcagggtaacggtattccgcaactgctgccgcaactggtgctgccgtgggatctgcctaattcagaattcacgctaacctgggattctattcgcacactgctgcctgcggcattctcaatggcaatgctcggcgcaatcgaatctctgctctgcgccgtggtactggatggtatgaccgggacgaaacacaaggcgaacagcgaactggttggacagggactggggaatattatcgctccattctttggtggtattaccgctacagctgccatcgcgcgttctgccgctaacgtccgtgccggggcaacttcccctatctcagcggtgatccactctattctggttattcttgccctgctggtactggcaccgctgctctcctggctgccgctttccgctatggcagccctgctgttgatggtggcgtggaacatgagtgaagcgcataaagtggtcgacttgctgcgtcatgcaccgaaagatgacatcattgtcatgctgctgtgcatgtcgctgaccgtgctgtttgatatggttattgccatcagcgtggggatcgtgctggcatcgctgctgtttatgcgtcgtatcgcacgtatgactcgcctggcaccggtagtcgtagatgttccagacgatgttctggtactgcgcgttattggcccgctgttttttgctgctgctgaaggcttgttcacggacctggagtcacgtcttgaaggcaaacggattgtgattctgaagtgggatgccgttccggtacttgatgctggtggtcttgatgcgttccagcgttttgtgaagcgtctgcccgaaggatgtgaactgcgcgtgtgcaacgtggaattccagccactgcgcactatggctcgcgcaggcattcaaccgatcccgggacgcctcgcgttcttcccgaatcgtcgcgcggcgatggcggatttataa

SEQ ID NO: 459650 - DNA, 1014 bp, Shigella boydii
atgcctggcccgcacagttttcggcagattctttccaccaatggacgcatgcctgaggttcttctcgtgcctgatatgaagctttttgctggtaacgccaccccggaactagcacaacgtattgccaaccgcctgtacacttcactcggcgacgccgctgtaggtcgctttagcgatggcgaagtcagcgtacaaattaatgaaaatgtacgcggtggtgatattttcatcatccagtccacttgtgcccctactaacgacaacctgatggaattagtcgttatggttgattccctgcgtcgtgcttccgcaggtcgtatcaccgctgttatcccctactttggctatgcgcgccaggaccgtcgcgtccgttccgctcgtgtaccaatcactgcgaaagtggttgcagacttcctctccagcgtcggtgttgaccgtgtgctgacagtggatctgcacgctgaacagattcagggtttcttcgacgttccggttgataacgtatttggtagcccgatcctgctggaagacatgctgcagctgaatctggataacccaattgtggtttctccggacatcggcggcgttgtgcgtgcccgcgctatcgctaagctgctgaacgataccgatatggcaatcatcgacaaacgtcgtccgcgtgcgaacgtttcccaggtgatgcatatcatcggtgacgttgcaggtcgtgactgcgtactggtcgatgatatgatcgacactggcggtacgctgtgtaaagctgctgaagctctgaaagaacgtggtgctaaacgtgtatttgcgtacgcgactcacccgatcttctctggcaacgcggcgaacaacctgcgtaactctgtaattgatgaagtcgttgtctgcgataccattccgctgagcgatgaaatcaaatcactgccgaacgtgcgtactctgaccctgtcaggtatgctggccgaagcgattcgtcgtatcagcaacgaagaatcgatctctgccatgttcgaacactaa

SEQ ID NO: 459651 - DNA, 852 bp, Shigella boydii
atgcggacacagtggccctctccggcaaaacttaatctgtttttatacattaccggtcagcgtgcggatggttaccacacgctgcaaacgctgtttcagtttcttgattacggcgacaccatcagcattgagcttcgtgacgatggggatattcgtctgttaacgcccgttgaaggcgtggaacatgaagataacctgatcgttcgcgcagcgcgattgttgatgaaaactgcggcagacagcgggcgtcttccgacgggaagcggtgcgaatatcagcattgacaagcgtttgccgatgggcggcggtctcggcggtggttcatccaatgccgcgacggtcctggtggcattaaatcatctctggcaatgcgggctaagcatggatgagctggcggaaatggggctgacgctgggcgcagatgttcctgtctttgttcgggggcatgccgcgtttgccgaaggcgttggtgaaatactaacgccggtggatccgccagagaagtggtatctggtggcgcaccctggtgtaagtattccgactccggtgatttttaaagatcctgaactcccgcgcaatacgccaaaaaggtcaatagaaacgttgctaaaatgtgaattcagcaatgattgcgaggttatcgcaagaaaacgttttcgcgaggttgatgcggtgctttcctggctgttagaatacgccccgtcgcgcctgactgggacaggggcctgtgtctttgctgaatttgatacagagtctgaagcccgccaggtgctagagcaagccccggaatggctcaatggctttgtggcgaaaggcgttaatctttccccattgcacagagccatgctttaa

SEQ ID NO: 459652 - DNA, 624 bp, Shigella boydii
atgcccctgcccgattttcgtcttatccgcctgctaccgctggctgctcttgtgctcactgcctgttccgttaccacgcccaaaggtcctggcaaaagcccggattcgccacaatggcgtcagcatcagcaagacgtgcgcaatcttaatcagtatcagactcgcggcgcgttcgcttatatttctgaccaacaaaaagtgtacgcccgctttttctggcagcaaaccggccaggatcgctaccgtctgctgctcactaacccattgggcagcacggaactggagctgaatgctcaaccgggtaacgtgcagttagtcgacaataaaggtcagcgttataccgccgatgacgccgaagagatgattggcaaattgaccggaatgccaattccgctcaacagcttgcgccagtggattttaggtttaccgggtgatgcaaccgactacaaactggacgaccagtaccgcctgagcgaaattacctacagccagaatggcaaaaactggaaggttgtttatggtggttatgacaccaaaacgcatcctgcgatgccagccaatatggaactcaccgacggtggtcaacgcatcaagttaaaaatggataactggatagtgaaataa

SEQ ID NO: 459653 - DNA, 1326 bp, Shigella boydii
ttgatcttacgcatcctgtatgatgcaagcagactaaccctatcaacgttggtattatttcccgcagacatgacccttttagcactcggtatcaaccataaaacggcacctgtatcgctgcgagaacgtgtatcgttttcgccggataagctcgatcaggcgcttgacagcctgcttgcgcagccgatggtgcagggcggcgtggtgctgtcgacgtgcaaccgcacggaactttatcttagcgttgaagagcaggataacctgcaagaggcgttaatccgctggctttgcgattatcacaatcttaatgaagaagatctgcgtaaaagcctctactggcatcaggataacgacgcggttagccatttaatgcgtgttgccagcggcctggattcactggttcttggggagccgcagatcctcggtcaggttaaaaaagcgtttgccgattcgcaaaaaggtcatatgaaggccagcgaactggaacgcatgttccagaaatctttctctgtagcgaaacgcgttcgcactgaaacagatatcggtgccagtgctgtgtctgtcgcttttgcggcttgtacgctggcgcggcagatctttgaatcgctctctacggtcacagtgttgctggtaggcgcgggcgaaaccatcgagctggtagcgcgtcatctgcgcgaacataaagtacagaagatgattatcgccaaccgcactcgcgaacgtgcccaaattctggcagatgaagttggcgcggaagtgattgccctgagtgagatcgacgaacgtctgcgcgaagccgatatcatcatcagttccaccgccagcccgttaccgattatcgggaaaggcatggtggagcgcgcattaaaaagtcgtcgtaaccaaccaatgctgttggtggatattgccgttccgcgcgatgttgagccggaagttggcaaactggcgaatgcttatctttatagtgtggacgatctgcaaagcatcatttcgcacaacctggcgcagcgtaaagccgcagcggttgaggcggaaactattgtcgctcaggaaaccagcgaatttatggcgtggctgcgagcacaaagcgccagcgaaaccattcgcgagtatcgcagccaggcagagcacgttcgcgatgagttaaccgccaaagcgttagcggcccttgagcagggcggcgacgcgcaagccattatgcaggatctggcatggaaactgactaaccgcttgatccatgcgccaacgaaatcacttcaacaggccgcccgtgacggggataacgaacgcctgaatattctgcgcgacagcctcgggctggagtag

SEQ ID NO: 459654 - DNA, 1083 bp, Shigella boydii
atgaagccttctatcgttgccaaactggaagccctgcatgaacgccatgaagaagttcaggcgttgctgggtgacgcgcaaactatcgccgaccaggaacgttttcgcgcattatcacgcgaatatgcgcagttaagtgatgtttcgcgctgttttaccgactggcaacaggttcaggaagatatcgaaaccgcacagatgatgctcgatgatcctgaaatgcgtgagatggcgcaggatgaactgcgcaaagctaaagaaaaaagcgagcaactggaacagcaattacaggttctgttactgccaaaagatcctgatgacgaacgtaacgccttcctcgaagtccgagccggaaccggcggcgacgaagcggcgctgttcgcaggcgatctgttccgtatgtacagccgttacgccgaagcccgccgctggcgggtagaaatcatgagcgccagcgagggtgaacatggtggttataaagagatcatcgccaaaattagcggtgatggtgtgtatggtcgtctgaaatttgaatctggcggtcatcgcgtgcagcgtgttcctgctacggaatcgcagggtcgtattcatacttctgcttgtaccgttgcggtaatgccagaactgcctgacgcagaactgccggacatcaacccagcagatttacgcattgatactttccgctcgtcaggggcgggtggtcagcacgttaataccaccgattcggcaattcgtattactcacttgccgaccgggattgttgttgaatgtcaggatgaacgttcacaacataaaaacaaagcgaaggcgctttcagtgctcggtgctcgcatccacgctgctgaaatggcaaaacgccaacaggccgaagcgtctacccgtcgtaacctgctggggagtggcgatcgcagcgaccgtaaccgtacttacaatttcccgcaggggcgcgttaccgatcaccgcatcaacctgacgctctaccgcctggatgaagtgatggaaggtaagctggatatgctgattgaaccgattatccaggaacatcaggccgaccaactggcggcgttgtccgagcaggaataa

SEQ ID NO: 459655 - DNA, 834 bp, Shigella boydii
atggaatatcaacactggttacgtgaagcaataagccaacttcaggcgagcgaaagcccgcggcgtgatgctgaaatcctgctggagcatgttaccggcagagggcgtacttttattctcgcctttggtgaaacgcagctgactgacgaacaatgtcagcaacttgatgcgctactgacacgtcgtcgcgatggtgaacccattgctcatttaaccggggtgcgagaattctggtcgttgccgttatttgtttcgccagcgaccttaattccgcgcccggatacggagtgtctggtggagcaggcactggcgcggttgcctgaacaaccttgccgtattcttgatctcgggacgggtaccggggcgattgcgcttgcgctggctagcgagcgcccggactgcgaaattatcgctgtagatcgtatgcctgatgctgtctccctggcacaacgtaatgcccagcatctggcgatcaaaaatatccacattctgcaaagcgactggtttagcgcgctagccgggcagcagtttgcgatgattgtcagcaatccgccgtatattgacgagcaggacccacatcttcaacaaggcgatgtccgctttgagccgctcactgcgctggttgcggcagacagtggaatggcagacatcgtgcatatcatcgaacagtcgcgtaacgcgctggtatccggcggctttctgcttctggaacatggctggcagcagggcgaagcggtgcgacaagcatttatcctcgcggggtatcatgacgtcgaaacctgccgtgactatggtgataacgagcgcgtaacgctcggccgctattatcaatga

SEQ ID NO: 459656 - DNA, 393 bp, Shigella boydii
atgacaagtttttctacactgcttagtgttcatcttattagtatcgcgctttctgttgggctattaaccttacgtttctggctacgttatcagaagcatccacaggcatttgctcgctggacgcgcattgtgccgccggttgtcgatacggtgttattgttaagcggcattgcgttgatggctaaagcgcacatcctgccattttccgggcaggcacagtggctgactgaaaagctgtttggagttatcatttatatcgttttgggttttattgcactcgattatcgtcgtatgcacagtcagcaggcgcgcattattgccttcccgctggcgttggtggtgctgtacatcatcattaaactcgccaccacaaaagtaccgttactggggtaa

SEQ ID NO: 459657 - DNA, 810 bp, Shigella boydii
atgagatcgttagctgatttcgaatttaataaagcgccattgtgcgaaggcatgatcctggcttgcgaagcaatccgccgcgattttccctcgcaagatgtttacgacgaactggagcgtctcgttagtctggcgaaggaagaaatcagccagcttctgcctttagaagagcagctggaaaaactgatcgcgctgttttacggcgactggggatttaaagcctcacgcggcgtttatcgtctttccgatgcattatggctggaccaggtgttaaagaatcgacagggcagtgcggtatcattaggtgcggttttattatgggtcgcgaatcgtctcgatttgccgctgctgccggtgattttccctacgcagctgatattgcgcattgaatgtccggatggcgaaatttggctgattaatccttttaacggtgaatcgttaagcgaacatatgctggacgtatggttaaagggaaatatcagcccgtcggcggaactgttttatgaagaccttgatgaagctgataacattgaggtaatccgcaaattgctggatacactcaaagcctcgttgatggaagaaaatcagatggagctggcgttacgcaccagcgaagctttattacaattcaaccctgaagatccctatgaaattcgcgatcgcgggttgatttatgcgcaactggattgcgaacacgttgcgttgaacgatttaagttatttcgttgaacagtgtccggaagacccgatcagcgaaatgatccgtgcgcaaataaataacatcgcgcataaacatattgtgctgcattaa

SEQ ID NO: 459658 - DNA, 855 bp, Shigella boydii
atgaaacaaaaagtggttagcattggcgacatcaacgtagcaaatgacctgccgttcgtactgtttggcggtatgaacgtgctggaatctcgcgatctggcgatgcgcatttgcgagcactacgtaactgtgacccagaaactgggtatcccttacgtgttcaaagcctcttttgacaaagccaaccgctcctccatccactcttatcgtggaccgggcctggaagaagggatgaaaatcttccaggagttgaagcagacttttggcgtgaaaattatcaccgacgttcacgaaccaagtcaggcacagcccgttgctgatgtcgtggatgtgattcagttgccggcgtttcttgctcgccagactgacctggttgaagccatggcgaaaaccggtgcggtaattaacgtcaagaaaccacagtttgtcagcccgggacagatgggtaatatcgttgataaattcaaagaaggcggcaacgaaaaagtgattctttgcgatcgtggtgctaacttcggctatgacaacctggttgtcgatatgctgggcttcagcattatgaagaaagtgtctggtaactcgccggtgattttcgacgtgacccacgcactgcaatgccgcgatccgtttggcgcagcttccggtggtcgtcgtgctcaggtggctgagctggcacgagccggtatggcggtaggtctggcggggctgtttattgaagcgcatccggatccggaacatgcgaaatgtgatggtccatccgcgctgccgctggctaaactggaaccgttcctcaagcagatgaaagcgattgatgatctggtgaaaggtttcgaagaactggataccagcaagtaa

SEQ ID NO: 459659 - DNA, 1239 bp, Shigella boydii
atgttaaagtggtcggcttttcccctgaaacatgccacgggtaacaccatgagtgaatttattgccgaaaaccgcggcgcggatgccatcacccgaccgaactggtcagccgttttctcggtggcgttttgtgtcgcctgtctgattatcgttgagtttttgcccgtcagtttgttgacgccaatggcccaggatttaggcatttcggaaggggttgccgggcaatcggtgaccgtgaccgcctttgtggcaatgtttgccagtttgtttattacccagacaattcaggctactgaccgctgctacgttgttattttgtttgccgttttgctgacgctctcctgcttgctggtttcctttgctaactcattcagtttgcttttaatcggtcgagcctgtctggggctggcgctgggcgggttctgggcgatgtcggcgtcgctgaccatgcgtctggtggcgccgcgtacggtgccgaaggcgctgtcggtgatcttcggcgcggtttctattgcgctggtgattgccgcgccgttgggcagttttttaggcgagcttatcggttggcgcaatgtctttaatgcggcggcggtgatgggcgtgctgtgtattttctggattatcaaatcattgccttcactgccaggcgaaccctcgcatcagaaacaaaatactttccgcttattacaacgtccgggtgtgatggcagggatgatcgccatcttcatgtctttcgccgggcagtttgctttcttcacgtatattcgcccggtgtatatgaacctggcgggattcggcgtggatggcttaacgctggtgctgttgagttttggtatcgccagctttattggtacgtcgctttcgtcgttcattcttaaacgttcggtaaaactggccttagcaggcgcgccgttaatactggctgtgagtgcgttggtactgacgttgtggggaagcgataaaatcgttgctaccggcgtggcgattatctgggggctaacttttgcattggttcccgtcggctggtcaacgtggatcacccgctcgctggccgatcaggcagaaaaagccgggtctattcaggtggcggttattcagcttgctaatacctgtggcgcggcaatcggcggttatgcgctggataatattggtttgacttcgccgttgatgttgtccggcacattgatgttgctgactgcattgttggttactgcaaaggtgaaaatgaagaaatcctga

SEQ ID NO: 459660 - DNA, 453 bp, Shigella boydii
atgatctggataatgctcgccacgctggcggtagtgtttgtggttggttttcgggtgctgacatccggggccagaaaagcgattcgccgtctcagtgatcggctgaatatcgatgtcgtacccgtggagtcgatggtcgatcaaatgggaaagtcagccggtgacgaatttttacgttatttgcatcgcccggatgagtcgcacctgcaaaacgccgcgcaggtgttgctcatctggcaaattgtcattgtcgatggtagcgaacagaacctgctgcaatggcatcggattttacaaaaagcccgtcttgccgcgccgattaccgatgctcaggtcaggctggcgctgggttttctgcgcgaaaccgaacctgaaatgcaggatattaatgcttttcagatgcgctataacgcgttctttcagcctgccgagggcgttcactggctgcattaa

SEQ ID NO: 459661 - DNA, 1335 bp, Shigella boydii
atgaataatgacaataccgattacgtgagtaatgaatcagggacgctttcgcgattatttaaactacctcagcatgggaccaccgtccgcacagaattgattgcggggatgaccacttttttaaccatggtgtacatcgtttttgtgaacccgcaaatcctcggcgcggcacaaatggacccgaaagtggtgtttgttaccacctgtttgattgccggtatcggcagtattgcgatggggatatttgctaacttacccgtggcgctggctccggcaatggggctgaacgccttctttgccttcgtggtcgtgggggcgatgggcatctcctggcagaccgggatgggcgcaatattctggggcgcagttggactatttttgctcacgctgtttcgtatccggtactggatgatctccaacattcccttaagtttacgtattggtatcaccagcggaattggattatttatcgccttaatgggattaaaaaatactggcgttattgtcgccaataaagacacgctggtgatgattggcgatttaagttctcacggcgtgttgttaggtattttagggttttttattataaccgtgttgtcatcacgtcattttcatgccgcggtgctggtttctattgtggtgacgtcttgctgtggattatttttcggtgatgttcattttagcggcgtctattccattccgcctgatattagcggcgtcattggtgaagtagatttgagcggcgcgttaacacttgaactcgccggtatcattttctcctttatgctgatcaacctatttgattcatcaggaacattaattggtgtaactgataaagcgggcttaatagatggtaacggtaaattccccaatatgaataaggcgctgtatgttgatagcgtcagttcggtggcgggtgcgtttatcggcacctcgtctgttactgcctatattgaaagtacttctggtgtggcagtcggtggccgcacggggctgactgcggttgtggttggcgttatgttcctgttggttatgttcttctcaccgctggtggcgatggttcctccttacgcaaccgccggagcgttaatctttgttggcgtgctgatgacttcgagcctggcgcgcgttaactgggatgattttaccgaatcggtgcctgcgtttattaccacggtgatgatgccctttactttctcgatcaccgaagggattgcactcggctttatgtcgtactgcatcatgaaagtgtgcaccgggcgctggcgcgatctgaacctgtgtgtggtggtggtcgcagctctgtttgcactgaagattattctggtggattag

SEQ ID NO: 459662 - DNA, 1767 bp, Shigella boydii
atgaataattccattaaccataaatttcatcacattagccgggctgaataccaggaattgttagccgtttcccgtggcgacgctgttgccgattatattattgataatgtctctattctcgacctgatcaatggcggagaaatttccggcccaattgtgattaaaggacgttacattgccggtgttggcgcagaatacgctgatgctccggctttgcagcggattgatgctcgcggcgcaacggcggtgccagggtttattgatgctcacctgcatattgaatccagcatgatgacgccggtcacctttgaaaccgctaccctgccgcgcggcctgacgaccgttatttgcgaccctcatgaaatcgtcaacgtgatgggagaagccggattcgcctggtttgcccgctgtgccgaacaggcaaggcaaaaccagtacttacaggtcagctcttgcgtacccgccctggaaggctgcgatgttaacggtgccagttttacccttgaacagatgctcgcctggcgggaccatccgcaggttaccggccttgcagaaatgatggactaccctggcgtaattagcgggcagaatgcgctgctcgataaactggatgcatttcgccacctgacgctggacggtcactgcccgggtttgggtggtaaagaacttaacgcctatattactgcgggtattgaaaactgccacgaaagttatcagctggaagaaggacgccggaaattacaactcggcatgtcgttgatgatccgcgaagggtccgctgcccgcaatctcaacgcgctggcaccgttgatcaacgaatttaacagcccgcaatgcatgctctgtaccgatgaccgtaacccgtgggagatcgcccatgaaggacacatcgatgccttaattcgccgcctgatcgaacaacacaatgtgccgctgcatgtggcatatcgcgtcgccagctggtcgacggcgcgccactttggtctgaatcacctcggcttactggcacccggcaagcaggccgatatcgtcctgttgagcgatgcgcgtaaggtcacggtgcagcaggtactggtgaaaggcgagccgattgatgcgcaaaccttacaggcggaagagtcggcgagactggcacaatccgctccgccatatggcaacaccattgcccgccagccagtttccgccagcgactttgccctgcaatttacgcccggaaaacgctatcgggtcattgacgtcatccataacgaattgattacgcactcccactccagcgtctacagcgaaaatggttttgatcgcgatgatgtgtgctttattgccgtacttgagcgttacgggcaacggctggctccggcttgtggtttgcttggcggctttggactgaatgaaggtgcgctggctgcgacggtcagccatgacagccataatattgtggtgatcggtcgcagtgccgaagagatggcgctggcggtctatcaggtgattcaggatggcggcgggctgtgcgtggtacgtaacggccaggtccaaagtcatctgccgttgcccattgccggcctgatgagcaccgacacggcgcagtcgctggcggaacaaattgacgccttgaaagccgccgcccgtgaatgcggtccgttacccgatgagccgtttattcagatggcgtttctttctctgccagtgatccccgcgctaaaactaaccagtcaggggctatttgatggcgagaagtttgccttcactacgctggaagtcacggaataa

SEQ ID NO: 459663 - DNA, 1392 bp, Shigella boydii
atgctggctttcctaaaccaggttcgcaagccgaccctggaccttccgctcgaagtgcggcgcaaaatgtggttcaaaccgttcatgcaatcctacctggtggtctttatcggctacctgacgatgtacctgattcgcaagaactttaacatcgcgcagaacgatatgatttcgacctacgggttgagcatgacgcagctggggatgatcggcctgggtttctccatcacttatggcgtgggtaaaacgttggtttcatactacgccgacggcaaaaacaccaaacaattcctgccgttcatgctgatcctgtctgccatttgtatgctgggcttcagtgccagtatgggcagcggctcggttagcctgttcctgatgattgccttctactccttaagcggctttttccagagtaccggcggttcgtgcagttactccaccatcaccaaatggacgccgcgtcgtaaacgcgggacattcctcggtttctggaatatttctcacaaccttggcggtgcaggcgcagcaggtgtggcgctgttcggggcaaattacctgttcgatggccatgtcatcggcatgtttatcttcccgtcgattatcgcgctgattgtcggttttatcggcctgcgttacggcagcgactccccagaatcttatggcctcggcaaagctgaagaactgttcggcgaggagatcagcgaagaggacaaagagacagaatctaccgatatgaccaagtggcagatctttgttgagtatgtgctgaaaaacaaagtgatctggctgctgtgcttcgccaacattttcctctatgtggtacgtattggtatcgaccagtggtcaaccgtatacgcgttccaggaactgaaactctctaaagcggtggcgattcagggctttacgctgtttgaagctggtgcgctggtcggtacgctgctgtggggctggctctctgacctggcgaacggtcgccgtggcctggtggcctgcatcgcgctggcgctgattatcgccacgctcggtgtgtatcaacatgccagcaacgaatatatctatctggcttctctctttgcgttgggtttcctggtctttggcccgcaattgttgattggtgtggctgctgttggctttgtacctaaaaaagcgattggcgctgccgatggtattaaaggcacctttgcttacctgattggtgacagctttgccaagttaggtctgggaatgattgccgatgggacgccggtattcggccttaccggctgggcaggcaccttcgccgcacttgatatcgccgcgattggttgtatctgcctgatggcgatagtggcggtgatggaagaacgcaaaatccgccgcgagaaaaaaattcagcagttgacagtggcataa

SEQ ID NO: 459664 - DNA, 1320 bp, Shigella boydii
atgttgccgtttctgaaagcgcctgccgatgcgccattaatgactgataaatatgaaattgatgcccgctatcgctactggcgtcggcatattctgctgaccatctggctgggttacgcgctgttttacttcacgcggaaaagttttaacgccgccgtaccagaaatccttgctaacggcgtgctcagccgtagcgatatcggcctgttagcgaccctgttttacattacctatggcgtgtcgaagtttgtctccggcattgtcagcgatcgctcaaatgcccgttattttatggggatagggcttatcgccacgggcattatcaacattctgtttggcttctcgacgtctctatgggcgtttgccgtactctgggtgctgaacgcctttttccagggctggggttcaccggtgtgtgcgcgtctgttaacggcctggtattcacgtaccgagcgcggtggttggtgggcattatggaacacggcgcataacgtcggcggcgcactcattcccattgtgatggcagcggttgcactacattacggctggcgtgccgggatgatgattgctggttgtatggcgatcgtcgtgggaatttttctctgctggcggctgcgcgatcgcccgcaggcgttaggtttaccggcggtcggtgaatggcgacacgacgcgctggagatagctcaacaacaagaaggggcagggctgacgcgtaaagagatcctcaccaaatatgtgttgctgaatccgtatatctggctgctttcgttttgctatgtgctggtctatgtggtccgggcggcgatcaacgactggggcaatttgtatatgtccgagacgctgggcgtcgatctggtcacggcgaatacggcagtgacgatgtttgaactgggtggatttatcggtgcgctggtagcgggttggggctcggacaaattgtttaacggcaaccgagggccgatgaatttgattttcgccgccggaattttgctttcagtcggctccctgtggctgatgccatttgccagctacgtgatgcaggcaacctgcttcttcaccattggtttttttgtctttggcccacagatgttaatcggtatggcggcggcagagtgttcccacaaagaggcggcaggggcggcgacggggtttgtcggcttgtttgcttatctgggggcgtcgcttgctggttggccgctggcgaaagtactcgatacctggcactggagcggattttttgtggttatctctatcgccgccgggatttccgcactgctgttactgccctttttgaacgcccagacaccgcgcgaagcgtga

SEQ ID NO: 459665 - DNA, 1503 bp, Shigella boydii
atgaagacgttgttctcccgcttaattaccgttattgcctgcttttttatcttctctgccgcatggttttgcctgtggagtatcagcctgcatctggttgagcgccctgatatggcggtgctgttatttccgtttggtctgcgtctggggctaatgctgcaatgcccgcgcggatactggccggtgctgctgggcgcggagtggctgctgatttactggctaacgcaggcggtcggtttaacccattttccgttattgatgatcggtagtttactgacgttactgcccgtagcgctgatctcgcgctatcgccatcagcgtgactggcgcaccttgctgttacagggggcggcgttaacggcggcggcgttgttgcagtcgctgccctggctttggcacggcaaagagtcgtggaatgcgctgttgctgactttaactggcggcctgacgctggccccgatatgtctggtgttctggcactatctcgccaataacacctggctgccgctcggcccgtcactggtttctcagccaatcaactggcgcgggcgacatctggtctggtacttgctgctgtttgttatcagtctctggctccagttgggattgccggacgaactgtcgcgctttacgccattctgtctggcgctgccgattatcgcgctggcctggcactatggttggcaaggggcgctgattgcgacgttgatgaacgccatcgcgctgatcgccagtcaaacctggcgcgatcatccggtggatttattgctctcgctgctggtgcaaagtctgacagggttgttgcttggcgctggcatccagcggttgcgtgaacttaaccagtcgctgcaaaaggaactggcgcgcaatcagcatctggctgaacggttgctggaaaccgaagagagcgtgcgccgtgatgtggcgcgtgagctgcatgatgatatcggtcagaccatcactgctattcgtactcaggcgggcattgttcagcggctggcggcagataacgccagcgtgaagcagagcgggcagctcatcgaacaactatcgctgggcgtttacgacgcggtgcgccgtttgttgggtcggttacgtccgcgccagttggatgatctcaccctggagcaggccatccgctcactgatgcgggaaatggagctggaagggcgcggtattgtcagccatctcgaatggcgaatcgatgaatcagcgttaagcgaaaaccagcgcgtgacgctgtttcgtgtctgccaggaagggctgaacaacattgtgaaacatgctgatgccagcgcggtcaccctgcaaggctggcagcaggatgaacggttgatgctggttattgaagacgatggcagcggtttgccgccgggttccgggcaacaaggttttggcctcaccggaatgcgcgagcgcgtaacggcgctgggtggcacattacacatttcctgtctgcacggcacgcgtgtcagcgtttctctacctcaacgctatgtctaa

SEQ ID NO: 459666 - DNA, 591 bp, Shigella boydii
atgatcaccgttgcccttatagacgatcacctcatcgtccgctccggctttgcgcagctgctggggctggaacctgatttgcaggtagttgccgagtttggttcggggcgcgaggcgctggcggggctgccggggcgcggtgtgcaggtgtgtatttgcgatatctccatgcccgatatctccggtctggagctgctaagccagctgccgaaaggtatggcgacgattatgctctccgttcacgacagtcctgcgctggttgagcaggcgcttaacgcgggggcacgcggctttctttccaaacgctgtagcccggatgaactcattgctgcggtgcatacggttgccacgggcggctgttatctgacgccggatattgccattaaactggcatccggtcgtcaggacccgctaaccaaacgtgaacgccaggtggcggaaaaactggcgcaaggaatggcggtgaaagagattgccgccgaactgggcttgtcaccgaaaacggtacacgtccatcgcgccaatctgatggaaaaactgggcgtcagtaacgacgtagagctggcgcgccgcatgtttgatggctggtga

SEQ ID NO: 459667 - DNA, 291 bp, Shigella boydii
atgcaaaacacaactcataacaacgtaattctggagctcaccgttcgcaaccatccgggcgtaatgacgcacgtttgtggccttttttcccgccgcgcttttaacgttgaaggcattctttgtctgccgattcaggacagcgacaaaagccatatctggctactggtcaatgacgaccagcgtctggagcagatgataagccaaatcgataagctggaagatgtcgtgaaagtgcagcgtaatcagtccgatccgacgatgtttaacaagatcgcggtgttttttcagtaa

SEQ ID NO: 459668 - DNA, 1689 bp, Shigella boydii
atggcaagttcgggcacaacatcgacgcgtaagcgctttaccggcgcagaatttatcgttcatttcctggaacagcagggcattaagattgtgacgggcattccaggcggttctatcctgcctgtttacgatgccttaagccaaagcacgcaaatccgccatattctggcccgtcatgaacagggcgcgggatttatcgctcaggggatggcgcgcaccgacggtaaaccggcggtctgtatggcctgtagcggaccgggtgcgactaacctggtgaccgccattgccgatgcgcggctggactccatcccgctgatttgcatcaccggtcaggttcccgcctcgatgatcggcaccgacgccttccaggaagtggacacctacggcatctctatccccatcaccaaacacaactatctggtcagacatatcgaagaactcccgcaggtcatgagcgatgccttccgcattgcgcaatcaggccgcccaggcccggtgtggatagacattcctaaggatgtgcaaacggcagtttttgagattgaaacacagcccgctatggcagaaaaagccgccgcccccgcctttagcgaagaaagcattcgtgacgcagcggcgatgattaacgctgccaaacgcccggtgctttatctgggcggcggtgtgatcaatgcgcccgcacgggtgcgtgaactggcggagaaagcgcaactgcctaccaccatgactttaatggcgctgggcatgttgccaaaagcgcatccgttgtcgctgggtatgctggggatgcacggtgtgcgcagcaccaactatattttgcaggaggcggatttgttgatagtgctcggtgcgcgttttgatgaccgggcgattggcaaaaccgagcagttctgtccgaatgccaaaattattcatgtcgatatcgatcgcgcagagctgggtaaaatcaagcagccgcatgtggcgattcaggcggatgttgatgacgtgctggcgcaattgatcccgcaggtggaagcgcaaccgcgtgcagagtggcaccagttggtagcggatttgcagcgcgaattcccgtgtccaatcccgaaagcgtgcgatccattaagccattacggcctgatcaacgccgttgccgcctgtgtcgatgacaatgcgattatcaccaccgatgtgggtcagcatcagatgtggaccgcgcaagcttatccgctcaatcgcccacgccagtggctgacctccggtgggctgggcacgatgggttttggcctgcctgcggcgattggcgcggcgctggcgaacccggatcgcaaagtgttgtgtttctccggcgacggcagcctgatgatgaatattcaggagatggcgaccgccagtgaaaatcagctggatgtcaaaatcattctgatgaacaacgaagcgctggggctggtgcatcagcaacagagtctgttctacgagcaaggcgtttttgccgccacctatccgggcaaaatcaactttatgcagattgccgccggattcggcctcgaaacctgtgatttgaataacgaagccgatccgcaggctgcattgcaggaaatcatcaatcgccctggcccggcgctgatccatgtgcgcattgatgccgaagaaaaagtttacccgatggtgccgccaggtgcggcgaatactgaaatggtgggggaataa

SEQ ID NO: 459669 - DNA, 1185 bp, Shigella boydii
atgaaaaggcaaagaaacgtcaatttgttattgatgttggtattactcgtggccgtcggtcagatggcgcaaaccatttatattccagctattgccgatatggcgcgcgatctcaacgtccgtgaaggggcggtgcagagcgtaatgggcgcttatctgctgacttacggtgtctcacagctgttttatggcccgatttccgaccgtgtgggtcgccgaccggtgatcctcgtcggaatgtccatttttatgctggcaacgctggtcgcggtcacgacctccagtttgacggtattgattgccgccagcgcgatgcaggggatgggcaccggcgttggcggcgtaatggcgcgtactttgccgcgagatttatatgaacggacacagttgcgccatgctaacagcctgttaaacatggggattctcgtcagtccgttgctcgcaccgctaatcggcggtctgctggatacgatgtggaactggcgcgcctgttatctctttttgttggttctttgtgttggtgtgaccttcagtatggcccgctggatgccggaaacgcgtccggtcgatgcaccgcgcacgcgcctgcttaccagttataaaacgcttttcggtaacagcggttttaactgttatttgctgatgctgattggcggtctggccgggattgccgcctttgaagcctgctccggcgtgctgatgggcgcggtgttagggctgagcagtatgacggtcagtattttgtttattctgccgattccggcagcgttttttggcgcatggtttgccggacgtcccaataaacgcttctccacgttaatgtggcagtcggttatctgctgcctgctggctggcttgctgatgtggatccccgactggtttggcgtgatgaatgtctggacgctgctcgttcccgccgcgctgttctttttcggtgccgggatgctgtttccgctggcgaccagcggcgcgatggagccgttccccttcctggcgggcacggctggcgcgctggtcggcggtctgcaaaacattggttccggcgtgctggcgtcgctctctgcgatgttgccgcaaaccggtcagggtagcctggggttattgatgaccttaatgggatggttgatcgtgctgtgctggctgccgctggcgacgcggatgtcgcatcaggggcagcccgtttaa

SEQ ID NO: 459670 - DNA, 498 bp, Shigella boydii
atgacaggaagtcaggtcattgatgctgaagaggacaggcataaactggttgtagagtacaaggatgctctgcaacctgccgatttttatcacaatttcaaacagcggggcatccgctccgtacagctcattccctatcttgaatttgatgaccggggcgatctgacggccgcttcggtgacagcagagctgtgggggaaatttttaattgccctgttcgagtgttgggtgcgggcagatatcagtcgtatctcgattgagctttttgacgccaccttacaaaaatggtgtggcggcgaaaacccgcaaccgcgccgtgactgccaggcgtgcgactggcatcgcctgtgcccgcacgctcggcaggagacgccagacagcgtgctttgtgcgggctatcaggcgttttattcttactccgcaccgcatatgcgggtgatgcgtgatctgataaagcagcatcgttctcccatggagctgatgacgatgctgcggtga

SEQ ID NO: 459671 - DNA, 363 bp, Shigella boydii
atgccggatagccgcaaagccagacgcattgccgacccaggactgcagccggagcgcacatcactggcgtggtttcgtaccatgctgggctacggcgcgttgatggcgttggctatcaaacacaactggcaccaggcgggcatgttattctggatttcgattggcattctcgccatcgtggcgctgatcctctggcactacacccgtaatcgcaatttaatggatgtcacgaatagcgatttttcccaatttcacgtagtccgtgacaaatttttgatctccctcgcggtgttatctctcgcaatactgtttgctgtaacgcatatacatcaacttatcgtatttattgagagagtcgcatga

SEQ ID NO: 459672 - DNA, 348 bp, Shigella boydii
atgaaaatttcccgccttggagaagcgcccgattaccgcttctcgctggctaatgagcgtacttttctggcgtggatccgtaccgcactaggatttctggcggcgggggttgggcttgatcaacttgcgccagatttcgccacgcccgtcattcgtgaactgctggcgttgttgttgtgtctgttttccggcgggttagcaatgtatggctacctgcgctggttacgcaatgaaaaagcgatgcgtctgaaagaggacctgccctacaccaacagcttattaatcattagcttaatattgatggtcgtggcggtgatcgttatgggactggtgttgtatgccggatag

SEQ ID NO: 459673 - DNA, 192 bp, Shigella boydii
atggtgatgagaatgctgatgacattgcagggcgcttcaccgggacgtataccggagctgatgcgcgatcttgcaagtatgggacaacttgtgaaattaccgacgagaaggggaagggccttcccgagagtggtaaaggagaggccctggaaataccccacagccccgaaaaagagccagtcagttgcttaa

SEQ ID NO: 459674 - DNA, 4461 bp, Shigella boydii
atgattgaacgcggtaaatttcgctcactgacgctgattaactggaacggcttttttgcccgaacttttgaccttgacgagctggtcacgacgctttctggcggtaacggggcgggtaaatccaccaccatggcggcgttcgttacggcgctgatccccgacctgaccctgctgcatttccgtaacactacggaagccggggccaccagcggttcgcgcgataaaggtctgcacggtaagctgaaagcgggtgtctgttattcgatgctcgacaccattaactcgcgccaccagcgcgtggtggtcggtgtgcgtctgcaacaggttgccggacgcgatcgtaaagtggatatcaaaccatttgccattcagggactgccgatgtcggtgcagccgacacagctggtgaccgaaaccctgaacgaacgccaggcgcgcgtgctgccgcttaacgagctgaaagacaagctcgaggcgatggaaggcgtgcagtttaaacagttcaactccattaccgattaccactcgctgatgttcgatctgggcatcatcgcgcgtcgtctgcgctccgcatctgaccgtagcaaattctatcgtctgatcgaagcttcgctgtatggcgggatctccagtgccattacccgttctctgcgcgactacctgttgccggaaaacagcggcgtgcgtaaagcgttccaggacatggaagcggcgctgcgtgaaaaccgcatgacgctggaagcgattcgtgtcacccagtcggaccgtgacctgtttaagcatctgatcagcgaagctaccaactacgtggcggcggactacatgcgtcacgccaacgagcgccgtgtccatctcgacaaagccctggagtttcgtcgcgagttacatacttcgcgtcagcaactggcggctgagcagtacaaacacgtcgatatggcgcgtgagctggcagagcacaacggtgccgaaggcgatctggaagcggattatcaggcggccagcgatcacctgaacctggtgcaaaccgcactgcgtcagcaggagaagatcgaacgctacgaagcggatctcgatgagctgcagatccgtctggaagagcaaaacgaagtggtggcagaagccatcgaacgccaggaagagaacgaggctcgcgcggaagctgccgaactggaagtggacgagctgaaaagccagcttgctgactaccagcaggcgctggacgtccagcaaacgcgcgcgatccagtataaccaggcgattgctgcgcttaatcgtgccaaagaactgtgccatctgccggacttaaccgccgacagcgccgccgaatggctggaaaccttccaggcgaaagagctggaagcgactgaaaaaatgctctctcttgagcagaaaatgagcatggcgcaaaccgcgcacagccagtttgagcaggcttatcagctggtggtggcaatcaacggcccactggcgcgtaacgaggcgtgggatgtcgctcgcgaactattgcgcgaaggggtcgatcagcgtcacctggcagagcaggttcagccgctgcggatgcgattaagcgaactggaacagcgtctacgcgagcagcaagaagctgagcgtctgctggcagatttctgcaaacgtcagggcaagaattttgatatcgacgaactggaagccctgcatcaggaactggaagcacgcattgcctctctttccgatagcgtgtctaacgcccgtgaagagcgcatggcactgcgccaggagcaggaacagctgcagtctcgcattcagagtttgatgcagcgtgcgccggtttggctggcagcgcaaaacagtctcaaccagttgagcgaacagtgcggcgaagagtttacctccagccaggacgtcaccgaatatctgcaacagttgctggagcgtgagcgagaggcgattgttgaacgcgatgaagtgggcgcgcgcaaaaacgccgtcgatgaagagatcgaacgtttaagccagcctggcggctctgaagatcagcgtctgaacgcgctggcggagcgttttggtggtgtgctgctgtcagaaatttatgacgacgttagcctggaagatgcgccgtacttctcagcgctgtatggcccgtcacgccacgccatcgtggtgccagatctgtcacaggtaactgaacacctggatggcttgaccgattgcccggaagatctctatctgatcgaaggagatccgcagtcattcgatgacagcgtgttcagcgttgatgagctggaaaaagcggtagtggtgaaaatcgccgatcgtcagtggcgttattcacgtttcccggaagtgccgctgtttggtcgtgctgcgcgtgaaagccgtattgaaagcctccatgccgagcgtgaagtgctttccgaacgcttcgccacgctctcctttgatgtacagaaaactcagcgtctgcatcaggcgttcagccgctttatcggcagtcatctggcggttgtgtttgagtctgacccggaagcagaaatccgtcaactgaacagccgtcgcgtcgaactggagcgggcgttaagtaatcatgaaaatgataaccagcagcagcgtattcagtttgagcaggcgaaagagggcgttacggcgctgaaccgcattctgccgcgtctcaacctgttggctgatgatagcctggcggatcgcgtcgatgaaatccgcgaacgtctggatgaagcccaggaagccgcgcgttttgttcagcagtttggcaatcaactggcgaaactggaaccgatcgtttcggtattgcagagcgacccggaacagttcgaacagttaaaagaagattacgcgtactctcaacagatgcagcgcgatgcccgtcagcaggcgtttgccctgacggaagtggtgcagcgtcgtgcgcactttagctactctgactcggcagaaatgcttagcggtaacagcgatctcaacgaaaaactgcgtgaacgtctggaacaggcggaagcggagcgtacccgcgctcgcgaagcgttgcgcggtcacgcagcgcagttgagtcagtacaaccaggtgctggcttcgctgaaaagttcttacgacaccaaaaaagagctactcaacgatctgcaacgtgaattgcaggatatcggcgtgcgtgctgatagcggggcagaagagcgggcgcgtattcgccgtgacgagctgcatgcgcaactgagcaataaccgttcacgccgcaatcaactggaaaaagcgcttaccttctgcgaagcggagatggacaacctgacccgcaaactgcgcaagctggagcgggattactttgagatgcgcgagcaggtagtgaccgccaaagcgggctggtgtgcggtgatgcgcatggtgaaagataacggcgttgagcgccgcttacaccgtcgtgagctggcttatctctccgctgatgatttgcgctctatgtcggataaggcattgggtgcgctgcgtctggcggtggcggataacgaacatctgcgcgacgtgctgcgcatgtcggaagatccgaaacgtccggagcgtaaaattcagttcttcgtggcggcttatcagcatctgcgtgaacgtattcgtcaggatattattcgtaccgatgatccggtggaagctatcgaacagatggagatcgaacttagccgtctgaccgaagaattaacctcccgtgaacagaaactggtgatcagttcccgcagcgtggcgaacatcattcgcaaaaccattcagcgcgagcagaaccgtatccgtatgctcaaccaggggttgcagaacgtatcgtttggtcaggtgaacagcgtgcgcctcaacgtgaacgtgcgtgaaacgcacgccatgctgctggatgtgctctctgaacagcacgagcagcatcaggatctgtttaacagcaaccgtctgaccttctcggaagcgttggcgaaattgtatcagcgtcttaatccgcagattgatatggggcagcgcacgccgcagaccattggcgaagaactgctggattaccgcaactatctggaaatggaagttgaggttaaccgtggttccgatggttggttgcgcgcagagtctggtgcattgtcgaccggtgaggcgattggtaccggtatgtcgattctggtgatggtggtacaaagctgggaagatgaatctcgccgcctgcgcggtaaagatatctctccttgccgtctgctgttcctcgatgaagcagcgcgactggatgctcgttctatcgccacgctgtttgaattgtgtgagcgtttacaaatgcagctcatcatcgcagcgccggaaaatatcagcccggagaaaggcaccacctataaactggtgcgtaaagtcttccagaataccgaacatgttcatgtcgtcggcctgcgaggatttgcgccgcaactccctgaaacgcttccaggaactgacgaagcgccttctcaggcgagttaa

SEQ ID NO: 459675 - DNA, 705 bp, Shigella boydii
atgtcatcgacaaatattgaacaagtgatgccggttaagctggcgcaggcgctggcgaatccgttatttccggcgctggacagcgccttacgttcaggccgccatattggcctcgacgaactggataatcatgcattcctgatggattttcaggaatatctggaagagttttacgcgcgttataacgttgagcttattcgcgcaccggaagggttcttctatttacgcccacgttccaccactcttatcccgcgttccgtcttgtcggaactggatatgatggtcgggaaaatcctctgttatctctatctcagcccggaacggctggcgaatgaggggattttcacccagcaggaactgtacgacgaactgctcaccctggccgatgaagcaaaactgctgaaactggtgaacaaccgttcaaccggttcagacgttgaccgtcagaagttgcaggagaaagtacgttcttcgctcaaccgtctgcgtcgtttaggcatggtgtggtttatgggccacgacagcagcaagtttcgcattaccgaatcggtgttccgcttcggagccgatgtgcgtgctggcgacgatccccgtgaagcacagcgtcgcctgattcgtgatggcgaagcaatgccgattgaaaatcatctgcaactcaacgatgaaaccgaagagaatcagccagatagcggagaggaagaataa

SEQ ID NO: 459676 - DNA, 1323 bp, Shigella boydii
atgagtgaattttcccagacagtccccgaactggttgcctgggccagaaaaaatgacttctccatctcgctgccggtagaccgactctcttttctgctggcggttgccacgctgaacggcgagcgtctggatggtgagatgagtgaaggcgagctggtggatgcattccgccatgtgagtgatgcgtttgagcaaaccagcgaaaccatcggcgtgcgcgccaataacgcgatcaacgacatggtgcgtcaacgtctgctgaaccgctttaccagcgagcaggcggaagggaacgcaatttaccgtctgacgccgctcggcatcggcattactgactactacatccgtcagcgcgagttttctacgctgcgtctttctatgcagttgtcgattgtggcgggtgagctcaaacgcgcagcagatgccgccgaagagggcggtgatgaatttcactggcaccgtaatgtctatgcgccactgaaatattcggtagcagaaattttcgacagtatcgacctgacgcaacgtctgatggacgaacagcagcagcaggtgaaggacgatatcgcccagttgctgaacaaagactggcgggcggcgatttccagctgtgaattgttgctttcggaaacttccggaacgctgcgtgaattgcaggatacgctggaagcggcaggcgacaaattgcaggctaatctgttgcgcattcaggatgcgacgatgccccatgacgatctgcatttcgtcgatcgtctggtgttcgatctgcagagcaaactcgatcgtattatcagttggggccagcaatccatcgacttgtggattggctacgaccgccacgtacacaaatttattcgtaccgcgatcgatatggataaaaaccgcgtctttgctcagcggttacgtcagtcggtacaaacctattttgatgagccgtgggcgctaacttatgccaatgccgatcgtctgctggatatgcgtgacgaagagatggcactgcgcgatgaagaagtgactggggaacttcctgaggatctggaatacgaagagtttaacgagatccgcgaacagctggcggcgatcatcgaagaacaacttgccgtgtacaaaaccagacaagtgccgctggatcttggtctggtggtacgcgaatatctgtcacagtatccgcgtgcacgtcactttgacgttgcgcgtattgttattgatcaggcggtacgtcttggcgtagcgcaagcagatttcaccggactgccagcgaaatggcagccgattaatgattacggagccaaggtacaggcgcatgtcatcgacaaatattga

SEQ ID NO: 459677 - DNA, 786 bp, Shigella boydii
atgcaggatcgcaattttgatgatattgcggaaaagttttcccgtaacatttacggcaccaccaaagggcagcttcgacaggctattctgtggcaggatctcgatcgcgtgctggcggaaatgggcccgcaaaaactgcgtgtgctggatgctggcggtggagaagggcagaccgcaatcaaaatggccgagcgtgggcatcaggtcattttatgcgatctttctgcgcagatgatcgaccgcgcaaaacaggcggcagaagcaaaaggtgtgagcgacaacatgcaatttatacattgcgccgctcaggatgttgcttcgcatttggaaacgcccgttgatctgatattgttccatgcggtgctcgagtgggtggccgatccccgcagtgtattgcagaccctgtggtcagtgttgcgtccaggcggcgtgttgtcgttaatgttctacaatgcgcatggtttgttgatgcataacatggtcgccgggaattttgattacgtgcaggcgggaatgccgaaaaagaaaaaacggacgctttcgccagattatccacgcgacccggcgcaggtttatctgtggctggaagaagctggttggcaaattatgggtaagacaggcgttcgcgtgtttcatgattatctgcgcgagaagcaccagcagcgcgactgctatgaagcattacttgaattagaaacgcgttattgccgtcaggaaccgtatattaccctggggcgttatattcatgtcaccgcgcgcaaaccgcagagcaaggataaagtatga

SEQ ID NO: 459678 - DNA, 780 bp, Shigella boydii
atgctttttacactgaaaaaagtgattggcaatatgttgctgccacttccgctgatgttgttaattattggcgctggcctggcgctgctgtggtttagccgttttcaaaaaaccgcgaagatttttattagcattgggtggctggcactcttgttattgagtttgcaaccggtagccgaccgcctgctgcgtcccatcgaaagcacctatccgacatggaataattcgcaaaaagtggactatatcgtggtgctcggaggtggttatacctggaacccgcagtgggcaccgagctctaatttaatcaataacagtctgccacgcctgaatgaaggtattcgcttatggcgcgaaaatccgggatcaaaactgatcttcacgggaggcgtagcaaaaaccaatacggtgagtacagcggaagtaggtgccagagttgcgcaatcgctgggcgtgccgcgcgagcaaattatcaccctggatttgccaaaagataccgaagaagaagctgcggcagtgaaacaggcgattggtgacgcccctttcctgctggtgacctccgcatcacatctgccgcgggcgatgatcttttttcagcaggaagggttaaatccgctaccagccccggcgaatcagttggccatcgactcgccgcttaatccgtgggaacgggcaatcccttctccggtctggctgatgcatagcgatcgtgttggctatgaaacgcttggccgcatctggcagtggctgaaaggtccgtcaggcgagccacggcaagagtga

SEQ ID NO: 459679 - DNA, 894 bp, Shigella boydii
atggaacagctgcgtgccgaattaagccatttactgggcgaaaaactcagtcgtattgagtgcgtcaatgaaaaagcggatacggcgttgtgggctttgtatgacagccagggaaacccaatgccgttaatggcaagaagctttagtacgcccggaaaagcccgacaactggcatggaaaaccaccatgctggcaagaagtgggactgtccgtatgccgactatttatggtgtgatgacgcatgaagaacaccccggccctgatgtcctgctactggagcggatgcgtggtgtttcggtggaggcaccagcccgaacaccagaacgctgggaacagctcaaagaccaaatcgttgaagccttactggcctggcaccgtcaggacagtcgcggttgcgtcggcgcggtcgacaatactcaggaaaatttctggccctcatggtaccggcaacatgttgaagtgctatggaccacgctcaatcagttcaataacaccggtctgacgatgcaggataagcggatcctgtttcgcactcgcgaatgtctcccggcattatttgaaggctttaacgacaattgtgtgttgattcacggtaacttctgtttacgcagcatgctgaaagattcgcgcagcgatcagttactggcgatggtcgggccgggactaatgctttgggcaccgcgagaatacgaactgttccgactaatggataattctctggcggaagatttgctctggagttacctgcaacgcgcgccagtggcggagtcgttcatctggcggcgttggttgtatgtgttatgggatgaagttgcgcaactggttaataccggacgatttagtcggcgcaacttcgatctggcatcaaaatcactcttgccgtggctcgcctga

SEQ ID NO: 459680 - DNA, 747 bp, Shigella boydii
atgagttttgtggtcattattcccgcgcgctacgcgtccacgcgtctgcccggtaaaccattggttgatattaacggcaaacccatgattgttcatgttcttgaacgcgcgcgtgaatcaggtgccgagcgcatcatcgtggcaaccgatcatgaggatgttgcccgcgccgttgaagccgctggcggtgaagtatgtatgacgcgcgccgatcatcagtcaggaacagaacgtctggcggaagttgtcgaaaaatgcgcattcagcgacgacacggtgatcgttaatgtgcagggtgatgaaccgatgatccctgcgacaatcattcgtcaggttgctgataacctcgctcagcgtcaggtgggtatggcgactctggcggtgccaatccacaatgcggaagaagcgtttaacccgaatgcggtgaaagtggttctcgacgctgaagggtatgcactgtacttctcacgcgccaccattccttgggatcgtgatcgttttgcagaaggccttgaaaccgttggcgataacttcctgcgtcatcttggcatttatggctaccgtgcaggctttatccgtcgttacgtcaactggcaggcaagtccgttagaacacatcgaaatgttagagcagcttcgtgttctgtggtacggcgaaaaaatccatgttgctgttgctcaggaagttcctggcacaggtgtggatacccctgaagatcttgagcgcgttcgcgctgaaatgcgctaa

SEQ ID NO: 459681 - DNA, 183 bp, Shigella boydii
atggatcatcgtttgcttgaaatcattgcctgcccggtttgcaacggaaaactttggtataaccaggaaaaacaagagcttatttgcaaactggataacctggctttcccgctccgcgatggcattccagtgttgctggaaacggaagcccgcgtgctgactgctgatgagagtaaatcatga

SEQ ID NO: 459682 - DNA, 1233 bp, Shigella boydii
atgtcgctgccgcacctctcccttgctgatgcgcgtaatcttcaccttgccgcacaaggcctgttaaacaaaccccgccgtcgagcgtcattggaggatattccggcaacgatctccagcatgtccttgctgcaaatcgataccatcaatattgttgcccgtagtccatatctggtgcttttcagtcgtctgggaaattatcctgcccagtggctggatgagtctctggcgcgtggcgaattaatggaatactgggcgcatgaagcctgctttatgccgcgtagcgactttcgtcttattcgccaccgcatgctggcacctgaaaaaatgggctggaaatacaaagacgcctggatgcaggaacatgaggcggaaattgcacagttaattcagcatattcatgataaggggccggtacgttcagccgattttgagcatcctcgtaaaggtgcaagcggctggtgggaatggaagccgcataaacggcatctggaaggtttatttactgccggaaaggtgatggtgattgaacggcgcaacttccagcgcgtttatgatttaacccaccgtgtcatgcctgactgggatgatgagcgcgatctcgtttcgcaaacagaagcagaaatcatcatgctggataacagtgcgcgtagcctgggaatattccgcgaacagtggctggcagattactatcggctgaaacgtccggcactggcggcgtggcgcgaagcgagggctgaacagcagcaaatcattgctgtgcatgttgaaaaattgggcaatctttggctgcatgctgatttgctgccgctactcgagcgtgcgctggccggaaagctcactgcaacgcacagcgcggtactttcgccttttgatcctgttgtctgggatcgcaaacgcgcagagcagctttttgattttagctaccggctggagtgctataccccagcgccgaaacgccagtatggctattttgttctgccattattacatcgtgggcaattagttgggcgaatggatgccaaaatgcatcgccagacaggcatccttgaagttatctctctgtggttacaggaaggcattaaaccaacgacaatgctgcaaaaagggttacgtcaggcgattactgatttcgcgagctggcagcaggcaacgcgggtgacattaggacgctgcccgcaaggtctctttactgattgccgcactggctgggaaatagaccccgtcgcataa

SEQ ID NO: 459683 - DNA, 987 bp, Shigella boydii
atgatcgaaaaaatctggtctggtgaatcccctttgtggcggctattgctgccactctcctggttgtatggcctggtgagtggcgcgatccgtctttgctataaactaaaactgaagcgcgcctggcgtgcccccgtaccggttgtcgtggttggtaatctcaccgcaggcggcaacggaaaaaccccggtcgttgtctggctggtggaacagttgcaacagcgcggtattcgcgtgggggtcgtatcgcggggatatggtagtaaggctgaatcttatccgctgttattgtcggcagataccacaacagcacaggcgggtgatgaacctgtgttgatttatcaacgcactgatgcgcctgttgcggtttctcccgttcgttctgatgcggtaaaagccattctggcgcaacaccctgatgtgcagatcatcgtaaccgacgacggtttacagcattaccgtctggcgcgtgatgtggaaattgtcgttattgatggtgtgcgtcgctttggcaatggctggtggttgccggcggggccaatgcgtgagcgagcggggcgcttaaagtcggttgatgcggtaatcgtcaacggcggtgtccctcgcagcggtgaaatccccatgcatctgctgccgggtcaggcggtgaatttacgtaccggtacgcgttgtgacgttgctcagcttgaacatgtagtggcgatggcggggattgggcatccgccgcgcttttttgccacgctgaagatgtgtggcgtacaaccggaaaaatgtgtaccgctggccgatcatcagtctttgaaccatgcggatgtcagtgcgttggtaagcgccgggcaaacgctggtaatgactgaaaaagatgcggtgaaatgccgggcctttgcagaagaaaattggtggtatttgcctgtagacgcacagctttcaggtgatgaaccagcgaaactgcttacgcaactaacctcgctggcttctggcaactag

SEQ ID NO: 459684 - DNA, 1749 bp, Shigella boydii
atgcataacgacaaagatctctctacgtggcagacgttccgccgactgtggccaaccattgcgccttttaaagcgggtctgatcgtggcgggcgtagcgttaatcctcaacgcagccagcgataccttcatgttatcgctccttaagccacttcttgatgatggctttggtaaaacagatcgctccgtgctggtgtggatgccgctggtggtgatcgggctgatgattttacgtggtatcaccagctatgtctccagctactgtatctcctgggtatcaggaaaggtggtaatgaccatgcgtcgccgcctgtttggtcacatgatgggaatgccggtttcattttttgacaaacagtcaacggggacgctgttgtcacgtatcacctacgattccgaacaggttgcttcttcttcttccggcgcactgataacggttgtgcgtgaaggtgcgtcaatcatcggcctgttcatcatgatgttctattacagttggcaactgtcgatcattttgattgtgctggcaccgattgtttcgattgcgattcgcgtagtatcgaagcgttttcgcaacatcagtaaaaacatgcagaacaccatggggcaggtgaccaccagcgccgaacaaatgctgaagggccacaaagaagtattgattttcggtggtcaggaagtggaaacgaaacgctttgataaagtcagcaaccgaatgcgtcttcaggggatgaaaatggtttcagcctcttccatctctgatccgatcattcagctgatcgcctctttggcgctggcgtttgttctgtatgcggcgagcttcccaagtgtcatggatagcctgactgccggtacgattaccgttgttttctcttcaatgattgcactgatgcgtccgctgaaatcactgaccaacgttaacgcccagttccagcgcggtatggcggcttgtcagacgctgtttaccattctggacagtgagcaggagaaagacgaaggtaagcgcgtgatcgagcgtgcgactggcgacgtggaattccgcaatgtcacctttacttatccgggacgtgacgtacctgcattgcgtaacatcaacctgaaaattccggcagggaagacggttgctctggttggacgctctggttcaggtaaatcaaccatcgccagcctgatcactcgtttttacgatattgatgaaggcgaaatcctgatggatggtcacgatctgcgcgagtataccctggcgtcgttacgtaaccaggttgctctggtgtcgcagaatgtccatctgtttaacgatacggttgctaacaacattgcttacgcacggactgaacagtacagccgtgagcaaattgaagaagcggcgcgtatggcctacgccatggacttcatcaataagatggataacggtctcgatacagtgattggtgaaaacggcgtgctgctctctggcggtcagcgtcagcgtattgctatcgctcgagccttgctgcgtgatagcccgattctgattctggatgaagctacctcggctctggataccgaatccgaacgtgcgattcaggcggcactggatgagttgcagaaaaaccgtacctctctggtgattgcccaccgcttgtctaccattgaaaaggcagacgaaatcgtggtcgtcgaggatggcgtcattgtggaacgcggtacgcataacgatttgcttgagcaccgcggcgtttacgcgcaacttcacaaaatgcagtttggccaatga

SEQ ID NO: 459685 - DNA, 810 bp, Shigella boydii
atgtgctggccgctgtggcaaaaacctcgacctgacgagtggcaggtgtacatgcttgatgtcgggcaagggctggcaatggtgatagccagaaacggcaaagcgattctctatgacacaggactggcctggcccgaaggggatagtgggcaacaactgattatcccctggctccactggcataatcttgaaccggaaggcgttattctgagtcatgaacatctggatcaccggggagggctggactcaatattgcacacatggccgatgttatggatcagaagtccgttaaactgggaacatcatcagccctgtgtgcgtggcgaagcgtggcaatggcaaggattgcgtttcagcgtgcactggcctttacaagctagcaacgataaaggaaataaccattcctgtgtggttaaggtttatgacgggacgaatagcattcttctaaccggtgatattgaagtccccgctgaacaaaagatgctaagccgttactggcagcaagtgcagacaacattgcttcaggtacctcaccatggcagtaatacctcatcatcgttgccattaattcagcgagtgaatggaaaagtggcactcgcatcggcatcgcgctataacgcatggcgattgccctctaataaagttaagcatcgctatcaacagcaaggatatcaatggcttgatactccacatcagggtcaagtgacggtcaatttttcagcgcaaggctggcggattagcagcctcagagagcaaattttacctcgttggtatcatcagtggtttggcgtgccagtggataacgggtag

SEQ ID NO: 459686 - DNA, 1848 bp, Shigella boydii
atgttgcttaatatgatgtgtggtcgtcggctgtcggcaatcagtttgtgcctggccgtaacattcgctccactgttcaatgcgcaggccgatgagcctgaagtaatccctggcgacagcccggtggctgtcagtgaacagggcgaggcactgccgcaggcgcaagccacggcaataatggcggggatccagccattgcctgaaggtgcggcagaaaaagcccgcacgcaaatcgaatctcaattacccgcaggttacaagccggtttatcttaaccagcttcaactgttgtatgccgcacgcgatatgcaacccatgtgggaaaaccgtgatgctgttaaagccttccagcaacagctggcagaggtggcgattgccggtttccagccgcagtttaataaatgggtagagttactgaccgatcctggtgttaacgggatggcacgcgacgtagtgctctctgatgcgatgatgggctatctccatttcattgcaaatattccggtcaaaggcactcgctggctatatagcagtaaaccttatgcacttgcaacgccgccgctctcggtgattaaccaatggcagctggcgctggataaaggtcaattgcctacgtttgttgcaggactggcaccgcagcatccgcaatatgcggcgatgcatgaatcgttactggccttactcagtgacaccaaaccgtggccccaactgaccggcaaagcaacgttgcgcctagggcagtggagtaacgacgtaccggcgttgcgcgaaatattgcaacgcacaggcatgttggacggggggccgaaaattactctacctggcgatgacacgccaactgacgcggtagtcagcccatccgctgttactgttgaaacagcagaaactaagccgatggacaagcaaacgacgtctcgtagtaaacctgcgcctgccgttcgcgccgcctacgataatgaactggtggaagccgttaaacgttttcaggcatggcaaggattgggggcagatggtgctattggcccggcaacacgtgactggttaaacgtaacgcccgcccagcgtgctggcgtgttggctctcaacatccagcgattgcgcttgctgccaacagagctttctaccgggatcatggttaacattccggcctattcgctggtctactatcagaacggcaatcaggtgctggattcgcgagtcattgtcggtcgccccgatcgcaaaacgccgatgatgagcagtgcccttaacaacgtagtggtaaacccgccgtggaacgtacctccaactctggcacgcaaagatattctgccaaaagtgcgcaacgatccgggatatctcgaaagccatggctatacggtgatgcgtggctggaacagcagagaagcgattgacccatggcaggttgactggtctacaatcacggcctcgaatttaccgttccgcttccagcaggctccaggcccacggaactcgctggggcgctataaattcaatatgccgagttcagaggccatttatttgcatgacacgccgaaccacaatctgttcaagcgtgatacacgcgcattgagctcaggctgtgtacgagtgaataaagcttccgatctggcgaatatgctgttgcaggatgcaggctggaatgacaaacgtatttctgatgcgctgaagcagggtgatacacgttacgtcaatattcggcagtcgattccggtgaatctctactacctgacggcctttgttggtgcagatggtcgtacccagtatcgtacagatatttacaattatgatctgcctgcgcgatccagctcgcaaatcgtatcgaaagcggaacaattaatcaggtaa

SEQ ID NO: 459687 - DNA, 549 bp, Shigella boydii
atggacaaattcgacgctaatcgccgcaaattgctggcgcttggtggcgttgcactcggtgccgccatcctgccaacccctgcgtttgcaacactctctaccccacgcccgcgcattttgacactcaataatcttcataccggagagtcaatcaaagcggagtttttcgatggcagaggctatattcaggaagaattggcaaaacttaaccattttttccgcgattaccgcgcgaacaaaataaagtccatcgacccaggattattcgaccagttgtatcgcctgcaagggttgttaggcacgcgcaaaccggtgcaactcatttccggttatcgttccattgataccaacaatgaactacgcgcccgcagccgtggagtagcgaagaaaagctatcacactaaaggccaggcgatggatttccatattgaaggtatcgcgttaagcaatattcgcaaagccgcgttatctatgcgcgcaggtggtgtaggatattacccacgtagtaactttgtgcatattgataccgggccagcacggcactggtag

SEQ ID NO: 459688 - DNA, 648 bp, Shigella boydii
atgaactatcgtattattccggtcaccgcattctcccagaactgttcattaatctggtgtgaacaaacccgtctggccgcactggtcgatcctggcggcgatgcggaaaaaatcaaacaggaagttgatgacagcggcctgacactgatgcagatcctgctgacgcatggtcatctggaccacgttggcgcagcggcggaactggcgcaacattacggcgtgccggtttttggcccggaaaaagaagatgagttctggctgcaaggcttgcctgtgcaaagtcgtatgtttggtctggaagagtgccagccgctgacgccagatcgttggctgaacgaaggcgataccatcagcataggaaatgtgactttacaggtgttacattgccctgggcatacgccgggtcatgtcgtgttttttgatgatcgggcaaagctgctgatttctggcgatgttattttcaaaggcggagtagggcgcagtgacttcccgcgtggcgatcataatcaactgatttcttcaatcaaagataaattgctgccactgggggatgacgtgacatttattccgggtcacggaccattatccacacttggttatgaacgcctgcataatcccttcctgcaagacgaaatgcccgtctggtaa

SEQ ID NO: 459689 - DNA, 1191 bp, Shigella boydii
atgtttgagaacattaccgccgctcctgccgacccgattctgggcctggccgatctgtttcgtgccgatgaacgtcccggcaaaattaacctcgggattggtgtctataaagatgagacgggcaaaaccccggtactgaccagcgtgaaaaaggctgaacagtatctgctcgaaaatgaaaccaccaaaaattacctcggcattgacggcatccctgaatttggtcgctgcactcaggaactgctgtttggtaaaggtagcgccctgatcaatgacaaacgtgctcgcacggcacagactccggggggcactggcgcactacgcgtagctgccgatttcctggcaaaaaataccagcgttaagcgagtgtgggtgagcaacccaagctggccgaaccataagagcgtctttaactctgcaggtctggaagttcgtgaatacgcttattatgatgcggaaaatcacactcttgacttcgatgcactgattaacagcctgaatgaagctcaggctggcgacgtagtgctgttccatggctgctgccataacccaaccggtatcgaccctacactggaacaatggcagacactggcacaactctccgttgagaaaggctggttaccgctgtttgacttcgcttaccagggttttgcccgtggtctggaagaagatgctgaaggactgcgcgctttcgcggctatgcataaagagctgattgttgccagttcctactctaaaaactttggcctgtacaacgagcgtgttggcgcttgtactctggttgctgccgacagtgaaaccgttgatcgcgcattcagccaaatgaaagcggcgattcgcgctaactactctaacccaccagcacacggcgcttctgttgttgccaccatcctgagcaacgatgcgttacgtgcgatttgggaacaagagctgactgatatgcgccagcgtattcagcgtatgcgtcagttgttcgtcaatacgctgcaggaaaaaggcgcaaaccgcgacttcagctttatcatcaaacagaacggcatgttctccttcagtggcctgacaaaagaacaagtgctgcgtctgcgcgaagagtttggcgtatatgcggttgcttctggtcgcgtaaatgtggccgggatgacaccagataacatggctccgctgtgcgaagcgattgtggcagtgctgtaa

SEQ ID NO: 459690 - DNA, 1089 bp, Shigella boydii
atgatgaagcgcaatattctggcagtgatcgtccctgctctgttagtagcaggtactgcaaacgctgcagaaatctataacaaagatggcaacaaagtagatctgtacggtaaagctgttggtctgcattatttttccaagggtaacggtgaaaacagttacggtggcaatggcgacatgacctatgcccgtcttggttttaaaggggaaactcaaatcaattccgatctgaccggttatggtcagtgggaatataacttccaaggtaacaactctgaaggcgctgacgctcaaactggtaacaaaacgcgtctggcattcgcgggtcttaaatacgctgacgttggttctttcgattacggccgtaactacggtgtggtttatgatgcactgggttacaccgatatgctgccagaatttggtggtgatactgcatacagcgatgacttcttcgttggtcgtgttggcggcgttgctacctatcgtaactccaacttctttggtctggttgatggcctgaacttcgctgttcagtacctgggtaaaaacgagcgtgacactgcacgccgttctaacggcgacggtgttggcggttctatcagctacgaatacgaaggctttggtatcgttggtgcttatggtgcagctgaccgtaccaacctgcaagaagctcaacctcttggcaacggtaaaaaagctgaacagtgggctactggtctgaagtacgacgcgaacaacatctacctggcagcgaactacggtgaaacccgtaacgctacgccgatcactaataaatttacaaacaccagcggcttcgccaacaaaacgcaagacgttctgttagttgcacaataccagttcgatttcggtctgcgtccgtccatcgcttacaccaaatctaaagcgaaagacgtagaaggtatcggtgatgttgatctggtgaactactttgaagtgggcgcaacctactacttcaacaaaaacatgtccacctatgttgactacatcatcaaccagatcgattctgacaacaaactgggcgtaggttcagacgacaccgttgctgtgggtatcgtttaccagttctaa

SEQ ID NO: 459691 - DNA, 1401 bp, Shigella boydii
atgagcgttgtgcctgtagccgacgtactccagggccgcgtagccgttgacagcgaagtcaccgtacgcggatgggtacgtacccgccgagattcaaaagctggcatctccttcctcgccgtttatgacggttcctgctttgatcctgtacaggctgtcatcaataattctctgcccaattacaatgaagacgtcctgcgtctgaccaccggctgctcggtcattgtgacgggtaaagtcgtggcgtcgccgggccaggggcaacaatttgaaattcaggccagcaaagttgaagttgctggttgggttgaagatccagacacttacccgatggcggcaaaacgccacagcattgagtatctgcgtgaagtcgctcacctgcgtccgcgcacaaacctgattggtgccgtcgcgcgcgttcgccatacgctggcgcaggcgctgcatcgcttctttaacgagcagggattcttctgggtttcaacgccactgattaccgcatctgataccgaaggtgcaggcgaaatgttccgcgtttctacgctggatctggaaaacctgccgcgtaacgatcagggcaaagtggatttcgacaaagacttctttggtaaagagtctttcctgaccgtatctggccagttgaacggcgaaacctacgcttgcgcattatccaaaatttataccttcggcccgactttccgtgctgaaaactccaacaccagccgtcacctggcggaattctggatgctggagccggaagtggcgtttgctaacctgaacgatatcgcgggtctggctgaagccatgctgaaatatgtcttcaaagcggttctcgaagaacgcgcagacgacatgaaattcttcgctgaacgcgtagataaagatgccgtttcacgtctggaacgcttcattgaggccgatttcgcgcaggtggattacaccgacgcagtgaccattctcgaaaactgcggcaggaagtttgaaaacccggtttactggggcgtcgatctctcttctgagcatgagcgttatctggcggaagaacactttaaagcaccggtagtggttaaaaactatccgaaagatattaaagcgttctatatgcgcctcaacgaagacggtaaaaccgttgcggctatggacgttctggctccgggcatcggtgagatcattggtggctcccagcgtgaagaacgtctggacgttctggacgagcgtatgctggaaatgggcctgaataaagaagattactggtggtatcgcgatctgcgtcgctacggtactgttccgcattcaggtttcggtcttggttttgaacgcctgattgcttacgtaactggcgtgcaaaacgtgcgtgatgtgattccgttcccacgtactccgcgcaacgccagcttctga

SEQ ID NO: 459692 - DNA, 1203 bp, Shigella boydii
atgacacaattcgcttctcctgttctgcactcgttgctggatacagatgcttataagttgcatatgcagcaagccgtgtttcatcactattacgatgtgcatgtcgcggcggagtttcgttgccgaggtgacgatctgctgggtatttatgccgatgctattcgtgaacagattcaggcgatgcagcacctgcgcctgcaggatgatgaatatcagtggctctctgccctgcctttctttaaggccgactatcttaactggttacgcgaattccgctttaacccggaacaagtcaccgtgtccaacgataatggcaagctggatattcgcttaagcggtccgtggcgtgaagtcatcctctgggaagttcctttgctggcggttatcagtgaaatggtacatcgctatcgctcaccgcaggccgacgttgcgcaagccctcgacacgctggaaagcaaattagtcgacttctcggcgttaaccgccggtcttgatatgtcgcgcttccatctgatggattttggcacccgtcgccgtttttctcgcgaagtacaagaaaccatcgttaagcgtctgcaacaggaatcctggttcgtgggcaccagcaactacgatctggcgcgtcggctttccctcacgccgatgggaacacaggcgcacgaatggttccaggcacatcagcaaatcagcccggacctagccaacagccagcgagctgcacttgctgcctggctggaagaatatcccgaccaacttggcattgcattaaccgactgcatcactatggatgctttcctgcgtgatttcggtgtcgagttcgccagtcggtatcagggcctgcgtcatgactctggcgacccggttgaatggggtgaaaaagccattgcacattataaaaagctgggaattgatccacagagtaaaacgctggttttctctgacaatctggatttacgcaaagcggttgagctataccgccacttctcttcccgcgtgcaattaagttttggtattgggactcgcctgacctgcgatatcccccaggtaaaacccctgaatattgtgattaagttggtagagtgtaacggtaaaccggtggcgaaactttctgacagccctggcaaaactatctgccatgataaagcgtttgttcgggcgctgcgcaaagcgttcgaccttccgcatattaaaaaagccagttaa

SEQ ID NO: 459693 - DNA, 2613 bp, Shigella boydii
atgactcaacagccacaagccaaataccgtcacgattatcgtgcgccggattaccagattactgatattgacttgacctttgacctcgacgcgcaaaagacggtcgttaccgcggtcagccaggctgtccgtcatggtgcatcagatgctccgcttcgtctcaacggcgaagacctcaaactggtttctgttcatattaatgatgagccgtggaccgcctggaaagaagaagagggcgcactggtcatcagtaatttgccggagcattttacgcttaagatcgttaatgaaataagcccggcggcgaataccgcgctggaagggctttatcagtcaggcgatgcgctttgcacccagtgtgaagccgaaggtttccgccatattacgtattatctcgaccgcccggacgtgctggcgcgttttaccaccaaaattattgccgataaaaccaaatatcccttcctgctttccaacggtaaccgcgttgcgcaaggtgaactggaaaacggacgccattgggtacagtggcaggacccgttcccgaaaccgtgctacctgtttgcgctggtggcaggcgactttgatgtactgcgcgacacctttaccacgcgttctggtcgcgaagtggcgctggagctgtacgtcgatcgcggcaaccttgatcgcgcgccgtgggcgatgacctcgctgaaaaactcaatgaaatgggatgaagaacgcttcggcctggagtatgacctcgacatctatatgatcgtcgcggtggatttcttcaatatgggcgcaatggagaataagggtttgaatatctttaactccaaatatgtgctggcccgcaccgacaccgccactgacaaagattacctcgatattgaacgcgttatcggccatgaatatttccataactggaccggtaaccgagtcacctgccgcgactggttccagctcagcctgaaagaaggtttaaccgtcttccgcgatcaggaattcagctctgaccttggttcccgtgcagttaaccgcatcaataatgtgcgcaccatgcgcggattgcagtttgcggaagacgccagcccgatggcgcacccgatccgcccggacatggtcattgagatgaacaacttctataccctgaccgtttacgagaagggcgcggaagtgatccgtatgatccacaccctgctgggcgaagaaaacttccagaaagggatgcaactctatttcgagcgccatgatggcagcgcggcaacctgcgacgactttgtgcaggcgatggaagatgcgtcgaatgtcgatctctcccatttccgccgttggtacagccagtccggcacgccgattgtgaccgtcaaagacgactacaatccggaaaccgagcagtacaccctgaccatcagccagcgcacgccagccacgccggatcaggcagaaaaacagccgctgcatattccgtttgccatcgaattgtatgacaacgaaggcaaagtgatctcgttgcagaaaggcggtcatccggtgaattccgtgctgaacgtcacccaggcggaacagacctttgtttttgataatgtctacttccagccggtgcctgcgctgctgtgcgaattctctgcgccagtgaaactggaatataagtggagcgatcagcaactgaccttcctgatgcgtcatgcgcgtaatgatttctcccgctgggatgcggcacaaagcctgctggcaacctacatcaagctgaacgtcgcccgacatcagcaagggcagccgctgtctctgccggtacatgtggctgacgctttccgcgcagtgctgctcgatgagaagattgatccggcgctggcggcagaaatcctgacgctgccttctgtcaatgaaatggctgaactgttcgatatcatcgacccgattgctattgccgaagtacgcgaagcactcactcgtactctggcgactgaactggcggatgagctgctggctatttacaacgcgaattaccagagcgagtaccgtgttgagcatgaagatattgcgaaacgcactctgcgtaatgcctgcctgcgcttccttgcttttggtgaaacgcatctggctgacgtgctggtgagcaagcagttccacgaagcgaacaatatgaccgatgcgctggcggcgctttctgcggcggttgccgcacagctgccatgccgtgatgcgctgatgcaggaatacgacgataagtggcatcaggacggtctggtgatggataaatggtttatcctgcaagccaccagcccggcggcgaatgtgctggagacggtgcgcggtctgttgcagcatcgctcatttaccatgagcaacccgaaccgtattcgttcgttgattggcgcgtttgcgggcagcaatccggcagcgttccatgccgaagatgggagcggttaccagttcctggtggaaatgcttaccgacctcaacagccgtaacccgcaggtggcttcacgtctgattgaaccgctgattcgcctgaaacgttatgatgccaaacgtcaggagaaaatgcgcgcggcgctggaacagttgaaagggctggaaaatctctctggcgatctgtacgagaagatcaccaaagcactggcttga

SEQ ID NO: 459694 - DNA, 519 bp, Shigella boydii
atgatgtttcaggatgcgcgtctgctaccgtggaaatcggtgattgataacgttgggttaggccttaaaggccagtggcgcgatgccgcgcgtcgggcgttggctgcggtaggactggagaatcgcgccggggaatggcctgccgcactttcaggcgggcagaaacagcgagtggcgctggcaagagcgttgattcatcgaccgggtttattgttgcttgatgaaccgctcggggcactggacgccttaacgcgactcgagatgcaggatttgattgtgtcactttggcaggagcacggctttaccgtactgttggtgacgcatgatgtgagcgaagcggtagcaatggctgaccgggtgttattaattgaagagggaaaaattggtctggatttgacagtggatatcccccgtccgcgtcgattagggtcggtgcgattagcggagctggaatcggaagtgttgcaaagggtgatgcagcgtggtgaatctgaaattcgcctgagaaaacaggggtaa

SEQ ID NO: 459695 - DNA, 237 bp, Shigella boydii
atgaatactgctcgtctgaaccagggcacaccattgttgctcaatgcagtaagcaaacattacgcggaaaatatcgtcctgaaccaactggatttacatattccggcaggtcagtttgtggcggtggtggcaaaagtaccctgctgcgcctgctggccgggctggaaacgccaaccgcaggcgatgtgttggcaggcaccacaccgctggctgaaattcaggaagacacgcgaatga

SEQ ID NO: 459696 - DNA, 552 bp, Shigella boydii
ttgattttgggactgattagcgggctatctcgctggggagaacggctgctggatacctcaattcagatgttgcgcaacgtgccgcatctggcgctgatcccgctggtgattttgtggtttggcattgatgaatccgcaaaaatctttctggtggcgctcggtacgctgtttcccatttatatcaacacctggcatggcatccgtaatatcgatcgcgggctggtggagatgacgcgtagctatgggttatccggcataccgctgtttatccatgtgatcctgcctggtgccctgccctcaattatggtcggcgtgcgttttgcgttgggcctgatgtggctgacgctgattgttgccgaaaccatttctgccaattccggcattggttatctggcgatgaatgcgcgagagtttttgcaaacggacgtggtggtagtcgctattattctttacgccctgctcggcaaacttgctgacgtcagcgcgcagctgttagagcgcctctggttgcgctggaacccggcttatcatttgaaggaggccacggtatga

SEQ ID NO: 459697 - DNA, 201 bp, Shigella boydii
atggcaacgccagtgaagaagtggttattgcgcgttgccccctggtttttaccggtgggcatcgtggcggtgtggcaactggcctcctcagttggctggctgtcgacgcgtattttgccctcaccggaaggggtggtgacggcgttctggacgctctccgccagcggcgaactgtggcagcatctggcgatcagttcctag

SEQ ID NO: 459698 - DNA, 720 bp, Shigella boydii
ttgctgggggaaaccgtcaatttcaacggtaaacatattcatgtgcgcggagcaaaactgctcttcccgccgattcaacagccttatcctccgctttactttggcggatcgtcagacgtcgcccaggagctggcggcagaacaagttgatctctacctcacctggggcgaaccgccagaactagtaaaagagaagatcgaacaagtgcgggcgaaagctgccgcgcatggacgcaaaattcgtttcggtattcgtctgcatgtgattgttcgtgaaactaacgacgaagcgtggcaggccgccgagcggttaatctcgcatcttgatgatgaaactatcgccaaagcacaggccgcattcgcccggacggattccgtaggacaacagcgaatggcggcgttacataacggcaagcgcgacaatctggagatcagccccaatttatgggcgggcgttggcttagtgcgcggcggtgccggaacggcgctggtgggcgatggtcctacggtcgctgcgcgaatcaacgaatacgccgcgcttggcatcgacagctttgtgctttcgggctatccgcatctggaagaagcgtatcgggtcggcgagttgctgttcccacatctggatgtcgccattccggaaattccccagccgcagccgctgaatccgcaaggcgaagcggtggcgaatgattttatcccccgtaaagtcgcgcaaagctaa

SEQ ID NO: 459699 - DNA, 411 bp, Shigella boydii
atgagtctgaatatgttctggtttttaccgacccacggtgacgggcactatctgggaacggaagaaggttcacgcccggttgatcacggttatctgcaacaaattgcgcaagcggcggatcgtctgggctataccggtgtgctgatcccaacggggcgatcgtgtgaagatgcgtggctggtggcggcgtcgatgatcccggtgacgcagcggctgaagtttcttgtcgccctgcgccccagcgtaacctcacctaccgttgccgctcgccaggccgccacgcttgaccgtctctcaaatggtcgtgcgttgtttaatctggtcacaggcagcgatccacaagagctggcaggcgacggcgtgttccttgatcatagcgagcgctacgaagcctcggcggaatttacctag

SEQ ID NO: 459700 - DNA, 843 bp, Shigella boydii
atggtactggcaaaaagccaccagttactggaaaaacgctatccgcaatcaaaaatctcctgggtggagttccccgcgggtccgcaaatgttggaagccttaaacgttggcagtattgatctcggcagtaccggggatattccgccaatctttgcccaggctgccggggctgatttggtatatgtgagcgtcgagccaccgaagcccaaagccgaagtgattctggtggcagaaaacagcccgatcaaaaccgtagccgatcttaaaggtcacaaagttgcctttcagaaaggttccagttcacacaaccttttactgcgtgcactgcgtcaggccggacttaagtttaccgatatccaacccacttacctaacgcccgctgatgcccgcgccgcgttccagcaaggtaacgttgacgcctgggctatctgggatccctactactctgctgcattattacagggcggcgtgcgggtgctgaaagacggcaccgatctcaatcaaactggatcgttttatctggcagctcgtccctatgcagaaaaaaacggcgcttttattcagggcgtactggcaacctttagtgaggccgatgcgttaacccgcagccagcgcgagcaaagcatcgctttactggcaaaaacgatgggcttaccggcaccggtgattgcctcttacttagatcatcgccctcctaccaccatcaaaccggttaacgccgaggttgccgccttacagcagcaaacggcagatctgttttatgaaaatcgtctggtgccgaaaaaagtcgatattcgccagcgcatctggcagcccactcaactggaaggaaaacaattatga

SEQ ID NO: 459701 - DNA, 1254 bp, Shigella boydii
atgaaaataacgacagtcggcgtatgcataatttgcggaatttttccgttgctgattttgccccaattgcctgggacattaacccttgcgtttctgactctcttcgcctgcgtactggcatttatccctgttaaaaccgtccgttatatcgcgctgacgttgctgtttttcgtttggggcatattatcagcaaagcaaattttgtgggcaggagaaaccttaactggcgcgacgcaggatgcaattgttgagatcactgcaactgacggcatgaccactcattacggtcaaattactcatctacaaggtcgacgtatattccctgcgccaggccttgtgctgtatggcgaatatcttccgcaagcggtttgtgctggacaacaatggtcaatgaaactcaaagttcgtgcagttcatggccaacttaatgatggcggctttgatagccagcgttatgccattgcccagcatcagccgctcatcggccgctttctgcaggcaagtgtcattgaaccgaattgtagcctgcgtgcacagtatctggcgtcactacaaacaacgctgcaaccctatatgtggaatgcggttattcttggtttaggtatgggggaacggttatccgtccccaaagaaatcaaaaatatcatgcgtgatactggaacggcgcatttaatggcgatatcgggattgcacatcgcttttgcggtgttgctggctgccggactcattcgcggtgggcaagtttttctgcctgggcgctggatccactggcaaatgccattaattggtggaatctgctgtgctgctttttatgcctggttgacgggaatgcaacctcctgcattgcgtaccgtggtggcgcttgctacgtggggaatgcttaagttaagtgggcgacagtggagtggctgggatgtatggatatgttgtctggcggcaattttgctgatggatcctgttgccattctctcgcaaagtttatggctctctgccgctgcggtcgcggcactgattttttggtaccagtggtttccctgtcctgagtggcaactgccgccggtattgcgtgcagttgtttccctcattcatttgcaactgggaatcacactcctgcttatgcctgtgcaaatcgtcatatttcatggcattagtctgacctcgtttattgcaaatctattagcaattcccttggtgacatttatcacggttccgttgatcctcgccgcgatggttgtgcgtaagcgtacagcctga

SEQ ID NO: 459702 - DNA, 285 bp, Shigella boydii
atgaccaagtcagaattgatagaaagacttgccacccagcaatcgcacattcccgccaagacggttgaagatgcagtaaaagagatgctggagcatatggcctcgactcttgcgcagggcgagcgtattgaaatccgcggtttcggcagtttctctttgcactaccgcgcaccacgtaccggacgtaatccgaagactggcgataaagtagaactggaaggaaaatacgttcctcactttaaacctggtaaagaactgcgcgatcgcgccaatatttacggttaa

SEQ ID NO: 459703 - DNA, 1674 bp, Shigella boydii
atgactgaatcttttgctcaactctttgaagagtccttaaaagaaatcgaaacccgcccgggttctatcgttcgtggcgttgttgttgctatcgacaaagacgtagtactggttgacgctggtctgaaatctgagtccgccatcccggctgagcagttcaaaaacgcccagggcgagctggaaatccaggtaggtgacgaagttgacgttgctctggacgcagtagaagacggcttcggtgaaactctgctgtcccgtgagaaagctaaacgtcacgaagcctggatcacgctggaaaaagcttacgaagatgctgaaactgttaccggtgttatcaacggcaaagttaagggcggcttcactgttgagctgaacggtattcgtgcgttcctgccaggttctctggtagacgttcgtccggtgcgtgacactctgcacctggaaggcaaagagcttgaatttaaagtaatcaagctggatcagaagcgcaacaacgttgttgtttctcgtcgtgccgttatcgaatccgaaaacagcgcagagcgcgatcagctgctggaaaacctgcaggaaggcatggaagttaaaggtatcgttaagaacctcactgactacggtgcattcgttgatctgggcggcgttgacggcctgctgcacatcactgacatggcctggaaacgcgttaagcatccgagcgaaatcgtcaacgtgggcgacgaaatcactgttaaagtgctgaagttcgaccgcgaacgtacccgtgtatccctgggcctgaaacagttgggcgaagatccgtgggtagctatcgctaaacgttatccggaaggtaccaaactgactggtcgcgtgaccaacctgaccgactacggctgcttcgttgaaatcgaagaaggcgttgaaggcctggtacacgtttccgaaatggattggaccaacaaaaacatccacccgtccaaagttgttaacgttggcgatgtagtggaagttatggttctggatatcgacgaagaacgtcgtcgtatctccctgggtctgaaacagtgcaaagctaacccgtggcagcagttcgcggaaacccacaacaagggcgaccgtgttgaaggtaaaatcaagtctatcactgacttcggtatcttcatcggcctggacggcggcatcgacggcttggttcacctgtctgacatctcctggaacgttgcaggcgaagaagcagttcgtgaatacaaaaaaggcgacgaaatcgctgcagttgttctgcaggttgacgcagaacgtgaacgtatctccctgggcgttaaacagctcgcagaagatccgttcaacaactgggttgctctgaacaagaaaggcgctatcgtaaccggtaaagtaactgcagttgacgctaaaggcgcaaccgtagaactggctgacggcgttgaaggttacctgcgtgcttctgaagcatcccgtgaccgcgttgaagacgctaccctggttctgagcgttggcgacgaagttgaagctaaattcaccggcgttgatcgtaaaaaccgcgcaatcagcctgtctgttcgtgcgaaagacgaagctgacgagaaagatgcaatcgcaactgttaacaaacaggaagatgcaaacttctccaacaacgcaatggctgaagctttcaaagcagctaaaggcgagtaa

SEQ ID NO: 459704 - DNA, 684 bp, Shigella boydii
atgacggcaattgccccggttattaccattgatggcccaagcggtgcagggaaaggcaccttgtgtaaggctatggcggaagcattgcaatggcatctgctggattcgggtgcaatttatcgcgtactggcattggcggcattacatcaccatgttgatgttgcgtcagaagatgcgctggtaccgctggcatcccatctggatgtacgttttgtgtcaaccaatggcaatctggaagtgatcctcgaaggggaagatgtcagcggcgaaattcgtactcaggaagtggcgaatgcggcttcacaagtcgcggcattcccacgcgttcgtgaagcattattgcgtcgccaacgcgcgtttcgcgaattaccaggtctgattgccgatggccgcgacatgggaacggtggtattccctgatgcaccagtgaaaattttccttgacgcctcctcggaagaacgtgcgcatcgccgcatgctacagttgcaggagaagggctttagtgttaactttgagcgccttttggccgagatcaaagaacgcgacgaccgcgatcgtaaccgagcggtagcgccactggttccggcagccgatgctttagtgttggattccaccaccttaagcattgagcaagtgattgaaaaagcgctacaatacgcgcgccagaaattggctctcgcataa

SEQ ID NO: 459705 - DNA, 678 bp, Shigella boydii
atggctatcagctccggtttaaatgcctataaagcagcaacattaagcgatgccgatgcaaaagcgattgccaatcagggctgtgccgaaatggacagcggcaatcaagtcgcaagtaaatccagcaagtacggtaaacgtctggcaaaaatcgccaaagcattgggtaacaatattaatggcacgccggtcaactataaggtttatatgaccagcgacgtcaacgcatgggcgatggcgaacggctgtgtccgtgtctacagtggcctgatggacatgatgaatgacaacgaaattgaaggtgttctgggccatgaactgggccacgtcgcgttgggtcactcgctggctgaaatgaaagcttcttatgcgatcgttgccgcacgcgatgccatttcagctaccagcggtgtggcttcccagctttcccgctcacaattgggtgatatcgcagaaggcgctattaatgctaaatactcccgtgataaagagtccgaagcagatgatttctcctttgatctgttgaagaaacgtggcatcagcacccaggggctggttggcagctttgaaaaactggctagtctggatggcggtcgcacccagtccatgtttgactctcacccaccatcaacagagcgtgcgcaacacatccgtgatcgtatcgcctctggtaagtaa

SEQ ID NO: 459706 - DNA, 1284 bp, Shigella boydii
atggaatccctgacgttacaacccatcgctcgtgtcgatggcactattaatctgcccggttccaagagcgtttctaaccgcgctttattgctggcggcattagcacacggcaaaacagtattaaccaatctgctggatagcgatgacgtgcgccatatgctgaatgcattaacagcgttaggggtaagctatacgctttcagccgatcgtacgcgttgcgaaattatcggtaacggcggtccattacacgcagaaggtgccctggagttgttcctcggtaacgccggaacggcaatgcgtccgctggcggcagctctttgtctgggtagcaatgatattgtgctgaccggtgagccgcgtatgaaagaacgcccgattggtcatctggtggatgcgctgcgcctgggcggggcgaagatcacttacctggaacaagaaaattatccgccgttgcgtttacagggcggctttactggcggcaacgttgacgttgatggctccgtttccagccaattcctcaccgcactgttaatgactgcgcctcttgcgccggaagatacggtgattcgtattaaaggcgatctggtttctaaaccttatatcgacatcacactcaatctgatgaagacgtttggtgttgaaattgaaaatcagcactatcaacaatttgtcgtaaaaggcggacagtcttatcagtctccgggtacttatttggtcgaaggcgatgcatcttcggcttcttactttctggcagcagcagcaatcaaaggcggcactgtaaaagtgaccggtattggacgtaacagtatgcagggtgatattcgctttgctgatgtgctggaaaaaatgggcgcgaccatttgctggggcgatgattatatttcctgcacgcgtggtgaactgaacgctattgatatggatatgaaccatattcccgatgcggcgatgaccattgccacggcggcgttatttgcaaaaggcaccaccacgctgcgcaatatctataactggcgtgttaaagaaaccgatcgcctgtttgcgatggcaacagaactgcgtaaagtcggtgcggaagtagaagaggggcacgattacattcgtatcactccaccggaaaaactgaactttgccgagatcgcgacatacaatgatcaccggatggcgatgtgtttctcgctggtggcgttgtcagatacaccagtgacgattcttgatcccaaatgtacggccaaaacatttccggattatttcgagcagttggcgcggattagccaggcagcctga

SEQ ID NO: 459707 - DNA, 1089 bp, Shigella boydii
atggctcaaatcttcaattttagttctggtccggcaatgctaccggcagaggtgcttaaacaggctcaacaggaactgcgcgactggaacggtcttggtacgtcggtgatggaagtgagtcaccgtggcaaagagttcattcaggttgcagaggaagccgagaaggattttcgcgatcttcttaatgtcccctccaactacaaggtattattctgccatggcggtggtcgcggtcagtttgctgcggtaccgctgaatattctcggtgataaaaccaccgcagattatgttgatgccggttactgggcggcaactgccattaaagaagcgaaaaaatactgcacgcctaatgtctttgacgccaaagtgactgttgatggtctgcgcgcggttaagccaatgcgtgaatggcaactctctgataatgctgcttatatgcattactgcccgaatgaaaccatcgacggtatcgccatcgacgaaacgccagacttcggcaaagatgtggtggtcgccgccgacttctcttcaaccattctttcccgtccgattgacgtcagccgttatggcgtgatttacgctggcgcgcagaaaaatatcggcccggctggcctgacaatcgtcatcgttcgtgaagatttgctgggcaaagcgaatatcgcgtgtccgtcgatactggattattccatcttcaacgataacggctccatgtttaacacgccgccgacatttgcctggtatctatctggtctggtctttaaatggctgaaagcgaacggcggtgtagctgaaatggataaaatcaatcagcaaaaagcagaactgctatatggggtgattgataacagcgatttctaccgcaatgacgtggcgaaagctaaccgttcgcggatgaacgtgccgttccagttggcggacagtgcgcttgacaaattgttccttgaagagtcttttgctgctggccttcatgcactgaaaggtcaccgtgtggtcggcggaatgcgcgcttctatttataacgccatgccgctggaaggcgttaaagcgctgacagacttcatggttgagttcgaacgccgtcacggttaa

SEQ ID NO: 459708 - DNA, 693 bp, Shigella boydii
atgaaggcgttcgatctccaccgtatggcatttgataaagtgccttttgatttccttggcgaagttgcactacgtagtctttatacctttgtactggtttttttgttcctcaaaatgaccggaagacgcggtgtgcgacagatgtcgctgtttgaagtgttaatcattctcacgctgggttcagcggcgggagatgtggcgttttatgatgatgtgccgatggtgccggtacttatcgtctttatcactctggcgttgttataccgcctggtaatgtggttgatggcgcacagtgaaaaactggaagatctactggaaggtaagccggttgttattattgaagatggcgagctggcctggtcgaaactcaataactccaacatgacggaatttgagttctttatggagctacgattgcgtggcgtggagcagctggggcaggtacgtctggcgattctcgaaaccaacgggcaaatcagtgtctatttctttgaagatgacaaggtgaaaccgggtttacttattttacccagtgattgtacgcagcgttacaaagtggtgccggagtcggcggactatgcctgtattcgttgtagtgaaatcattcatatgaaagcgggggaaaaacaattatgtccgcgctgtgcaaatccagaatggacgaaggcaagtcgggcaaaacgggtgacctga

SEQ ID NO: 459709 - DNA, 1761 bp, Shigella boydii
atgacgcaaacatttatccccggcaaagatgccgctctggaagattccatcgctcgcttccagcaaaaaatttcagacctcggctttcagattgaagaggcctcctggctgaatcctgtgcctaacgtctggtctgtacatattcgcgacaaagagtgcgcactgtgttttaccaacggtaaaggcgcaaccaaaaaagcggcgctggcttctgcacttggtgaatatttcgagcgtctctcaaccaactacttttttgctgatttctggctgggcgaaaccatcgccaacggtccgttcgtgcattatcccaacgaaaaatggttcccactgaccgaaaatgacgatgtgccagaaggactactcgatgaccgtctgcgcgcgttttatgatccggagaatgaactgaccggcagcatgctgattgacctacaatccggtaacgaagatcgtggtatttgcggcctgccgtttacgcgtcagtccgacaatcagaccgtttatattccgatgaatatcattggtaacctgtacgtctccaacggtatgtccgcaggtaatacccgcaacgaagcacgcgttcagggattgtctgaagttttcgaacgctacgtgaaaaaccgcattattgctgaaagcatcagcctgccagagatcccggcagacgtgctggcgcgttacccagcggtggttgaagcgatcgaaacactggaagcagaaggtttcccgatcttcgcatatgatggttcccttggcggccagtatccggtgatttgcgtggtactgttcaatcctgctaacggtacctgctttgcctctttcggtgcgcatcctgattttggcgtagcactggaacgtaccgtgaccgagctgctgcaaggtcgtggcctgaaagatttggatgtgtttactccgccaaccttcgatgatgaagaagtcgctgaacataccaacctcgaaacgcactttatcgattccagcggtttaatctcctgggacctgttcaagcaggatgccgattatccgtttgtggactggaatttctccggcaccacggaagaagagtttgctacgctgatggctatcttcaacaaagaagataaagaagtttatattgccgattacgagcatctgggcgtttatgcttgccgtattatcgtgcctggcatgtccgatatttatccggctgaagatctgtggctcgcgaataacagtatgggcagccatttacgtgaaacgattctttcgctaccaggcagcgagtgggaaaaagaagattacctgaacctcatcgagcaactggatgaagaaggttttgatgactttacccgcgtgcgtgagctgttgggtctggcgaccgggtcggataacggttggtacaccctgcgtatcggtgaattaaaagccatgctggcgctggctggtggcgatctggaacaggctctggtctggaccgaatggacgatggagtttaactcatcagtatttagtccggaacgcgccaactattatcgctgcctgcaaacgttgttattactggcacaggaagaagatcgccagccgctgcaatatctgaatgcgtttgttcgcatgtacggcgcagatgccgtggaagccgccagtgcggcaatgagcggcgaagcggcgttttacggcctgcaaccggtagatagcgatctgcacgcgtttgctgcacatcagtcgttgttgaaggcctacgaaaagctgcagcgcgccaaagcagcattctgggcaaaataa

SEQ ID NO: 459710 - DNA, 858 bp, Shigella boydii
gtgaaagctgacaacccttttgatcttttacttcctgctgcaatggccaaagtggccgaagaggcgggtgtctataaagcaacgaaacatccgcttaagactttctatctggcgattaccgccggtgttttcatctcaatcgcattcgtcttctatatcacagcaaccactggcacaggcacaatgcccttcggcatggcaaaactggttggcggcatttgcttctctctggggctgattctttgtgttgtctgcggagccgatctctttacttccaccgtgttgattgttgttgctaaggcgagtgggcgcatcacctggggtcagttggcgaaaaactggctaaatgtctattttggcaacctggtcggcgcactgctgtttgtacttttaatgtggctttccggcgagtatatgaccgcaaatggtcaatggggactaaacgtcctacaaaccgccgaccacaaagtgcaccatacttttattgaggccgtctgtcttggtatcctggcaaacctgatggtatgtctggcagtatggatgagttattctggccgcagcctgatggacaaagcgttcattatggtgctgccggtcgcgatgtttgttgccagcggttttgagcacagtatcgcaaacatgtttatgatcccgatgggtattgtaatccgcgacttcgcatctccggaattctggaccgctgtcggttctgcaccggaaaatttttctcacctgaccgtgatgaacttcatcactgataacctgatcccggttacgatcggtaatattatcggcggtggtttgttggttgggttgacatactgggtcatttacctgcgtgaaaacgatcaccattaa

SEQ ID NO: 459711 - DNA, 2283 bp, Shigella boydii
atgtccgagcttaatgaaaagttagccacagcctgggaaggttttaccaaaggtgactggcagaatgaagtaaacgtccgtgacttcattcagaaaaactacactccgtacgagggtgacgagtccttcctagctggcgctactgaagcgaccaccaccctgtgggacaaagtaatggaaggcgttaaactggaaaaccgcactcacgcgccagttgactttgacaccgctgttgcttccaccatcacctctcacgacgcaggctacatcaacaagcagcttgagaaaatcgttggtctgcagactgaagctccgctgaaacgtgctcttatcccgttcggtggtatcaaaatgatcgaaggttcctgcaaagcgtacaaccgcgaactggatccgatgatcaaaaaaatcttcactgaataccgtaaaactcacaaccagggcgtgttcgacgtttacactccggacatcctgcgttgccgtaaatctggtgttctgaccggtctgccagatgcatatggccgtggccgtatcatcggtgactaccgtcgcgttgcgctgtacggtatcgactacctgatgaaagacaaactggcacagttcacttctctgcaggctgatctggaaaacggcgtaaacctggaacagactatccgtctgcgcgaagaaatcgctgaacagcaccgcgctctgggtcagatgaaagaaatggctgcgaaatacggctacgacatctctggtccggctaccaacgctcaggaagctatccagtggacttacttcggctacctggctgctgttaagtctcagaacggtgctgcaatgtccttcggtcgtacctccaccttcctggatgtgtacatcgaacgtgacctgaaagctggcaagatcaccgaacaagaagcgcaggaaatggttgaccacctggtcatgaaactgcgtatggttcgcttcctgcgtactccggaatacgatgaactgttctctggcgacccgatctgggcaaccgaatctatcggtggtatgggcctcgacggtcgtaccctggttaccaaaaacagcttccgtttcctgaacaccctgtacaccatgggtccgtctccggaaccgaacatgaccattctgtggtctgaaaaactgccgctgaacttcaagaaattcgccgctaaagtgtccatcgacacctcttctctgcagtatgagaacgatgacctgatgcgtccggacttcaacaacgatgactatgctatcgcttgctgcgtaagcccgatgatcgttggtaaacaaatgcagttcttcggtgcgcgtgcaaacctggcgaaaaccatgctgtacgcaatcaacggcggcgttgacgaaaaactgaaaatgcaggttggtccgaagtctgaaccgatcaaaggcgatctcctgaactacgatgaagtgatggagcgcatggatcacttcatggactggctggctaaacagtacatcactgcactgaacatcatccactacatgcacgacaagtacagctacgaagcctctctgatggcgctgcacgaccgtgacgttatccgcaccatggcgtgtggtatcgctggtctgtccgttgctgctgactccctgtctgcaatcaaatatgcgaaagttaaaccgattcgtgacgaagacggtctggctatcgacttcgaaatcgaaggcgaatacccgcagtttggtaacaatgatccgcgtgtagatgacctggctgttgacctggtagaacgtttcatgaagaaaattcagaaactgcacacctaccgtgacgctatcccgactcagtctgttctgaccatcacttctaacgttgtgtatggtaagaaaactggtaacaccccagacggtcgtcgtgctggcgcgccgttcggaccgggtgctaacccgatgcacggtcgtgaccagaaaggtgctgtagcgtctctgacttccgttgctaaactgccgtttgcttacgctaaagatggtatctcctacaccttctctatcgttccgaacgcactgggtaaagacgacgaagttcgtaagaccaacctggctggtctgatggatggttacttccaccacgaagcatccatcgaaggtggtcagcacctgaacgttaacgtgatgaaccgtgaaatgctgctcgacgcgatggaaaacccggaaaaatatccgcagctgaccatccgtgtatctggctacgcagtacgtttcaactcgctgactaaagaacagcagcaggacgttattactcgtaccttcactcaatctatgtaa

SEQ ID NO: 459712 - DNA, 741 bp, Shigella boydii
atgtcagttattggtcgcattcactcctttgaatcctgtggaaccgtagacggcccgggtattcgctttatcacctttttccagggctgcctgatgcgctgcctgtattgtcataaccgcgacacctgggacacgcatggcggtaaagaagttaccgttgaagatttgatgaaggaagtggtgacctatcgccactttatgaacgcttccggcggcggcgttaccgcatccggcggtgaagcaatcctgcaagctgagtttgttcgtgactggttccgcgcctgcaaaaaagaaggcattcatacctgtctggacaccaacggttttgttcgtcgttacgatccggtgattgatgaactgctggaagtaaccgacctggtaatgctcgatctcaaacagatgaacgacgagatccaccaaaatctggttggagtttccaaccaccgcacgctggagttcgccaaatatctggcgaacaaaaatgtgaaggtgtggatccgctacgttgttgtcccaggctggtctgacgatgacgattcagcgcatcgcctcggtgaatttacccgtgatatgggcaacgttgagaaaatcgaactcctcccctaccacgagctgggcaaacacaaatgggtggcaatgggtgaagagtacaaactcgacggtgttaaaccacctaagaaagagaccatggaacgcgtgaaaggcattcttgagcagtacggtcataaggtaatgttctaa

SEQ ID NO: 459713 - DNA, 177 bp, Shigella boydii
atgggctgggaaaaaaatataagcgattatttgaaaaatatgtgcagttatcttggtattgaagatgccgatgtcactttcttgtgtaatacagtggtattcgatggggaagaacttcatgcgagctattatcagtcgttattatctcaggtacgggatatggtagatgcactataa

SEQ ID NO: 459714 - DNA, 1245 bp, Shigella boydii
atgactacgcaacgttcaccggggctattccggcgtctggctcatggcagcctggtaaaacaaatcctggtcggccttgttctggggattcttctggcatggatctcaaaacccgcggcggaagctgttggtctgttaggtactttgttcgtcggcgcactgaaagccgttgcccccatcctggtgttgatgctggtgatggcatctattgctaaccaccagcacgggcagaaaaccaatatccgccctattttgttcctctatctgctgggtaccttctctgctgctctggccgcagtcgttttcagcttcgccttcccttctaccctgcacttatccagtagcgcgggtgatatttcgccaccgtcaggcattgtagaagtgatgcgcgggctggtaatgagcatggtttccaaccccatcgacgcgctgctgaaaggtaactacatcgggatcctggtgtgggcaattggcctcggtttcgcactgcgtcacggtaacgagaccaccaaaaacctggtcaacgatctgtcgaatgccgtcacctttatggtgaaactggtcattcgcttcgcaccgattggtatttttggtctggtttcttctaccctggcaaccaccggtttctccacactgtggggctacgcgcaactgctggtcgtgctggttggctgtatgttactggtggcgctggtggttaacccattgctggtgtggtggaaaattcgtcgtaacccgttcccgctggtgctgctgtgcctgcgcgaaagcggcgtgtatgccttcttcacccgcagctctgcggcgaacattccggtgaatatggcactgtgtgaaaagctgaatctggatcgcgatacctattccgtttctattccgctgggtgccaccatcaatatggcgggcgcagcaatcaccattaccgtgttgacgctggctgcggttaatacgctgggtatcccggtcgatctgcccacggcgctgctgttgagcgtggtggcttctctgtgtgcctgtggcgcatccggcgtggcggggggttctctgctgctgatcccgctggcctgtaatatgttcggtatttcgaacgatatcgccatgcaggtggttgccgtcggctttatcatcggcgtattgcaggactcttgcgaaaccgcgctgaactcttcaactgacgtgctgttcactgcggcagcttgccaggcggaagacgatcgtctggcaaatagcgccctgcgtaattaa

SEQ ID NO: 459715 - DNA, 966 bp, Shigella boydii
atgaatactgtcggcacgccgttgctatggggcggattcgctgttgttgtcgccattatgctggctatcgacctgttgttgcaggggcgtcgtggggcacatgccatgaccatgaaacaggctgcggcctggtcgctggtttgggtgacgctgtcgttactgtttaacgccgctttctggtggtatctggtgcaaaccgaaggtcgcgccgttgccgatccacaggcactggcctttctcacgggttatctgattgagaaatcgctggcggtcgataacgtctttgtctggctgatgttgttcagctatttctctgttccggcggcattacaacgccgcgtgctggtgtatggcgtgctcggggcgattgttctgcgtaccatcatgatcttcactggcagctggctaatttcgcagttcgactggatcctgtatatcttcggtgccttcctgctgtttaccggcgtgaagatggcgctcgcccatgaagatgaatcaggcattggcaacaagccgctggtgcgctggctacgcggtcatttgcgcatgaccgacaccatcgacaacgagcatttctttgtgcgtaagaatggattgctgtacgccacaccgctgatgctggtactgattctggtggaattgagcgacgtgattttcgccgtggatagcattccggctatcttcgccgtgaccactgacccgttcattgtgctgacctcaaacctgtttgcgatcctcggcctgcgtgcgatgtatttcctgctggcgggcgtagcagagcgtttctcgatgctcaaatatggcctggcggtgatcctggtgtttatcggtatcaagatgctgattgtcgacttctaccatattccaatcgccgtctcgctgggcgtggtgtttggcattctggtgatgacgtttattatcaacgcctgggtgaattatcggcatgataagcagcggggagaatga

SEQ ID NO: 459716 - DNA, 987 bp, Shigella boydii
atgatacgtttcgctgtgattggtacgaactggatcactcgccagttcatcgaggccgcccatgagagcggtaaatacaagttaaccgccgtatattcccgcagccttgaacaggcccagcacttcgccaatgatttttctgtcgagcatctgtttacctcgctggaagcgatggcggaaagcgatgccattgacgcggtgtatattgccagcccgaatgccctgcacttttcccagacacaacttttccttagccataaaattcatgtgatttgcgagaaaccactggcgtcgaatctggcggaagtggatgccgccattgcctgtgcgcgggaaaatcaggtggtgctgtttgaggcatttaaaaccgccagcctgccgaactttcatttgctgcgccaggcgctgccgaaagtcggcaaattgcgtaaagtctttttcaactattgccagtattcctcgcggtatcaacgttacctggatggtgagaatcccaacacctttaatccggcattctctaacggttcaattatggatatcggcttttactgcctggcgtcggcggtggcattattcggtgaaccgaaaagcgtgcaggcaaccgccagtttgttggcaagcggcgtagatgcccacggcgtggtggtgatggattacggtgatttcagcgttacgttgctgcactcaaaggtcagtgattctgtcctggaaagcgagattcagggcgaagcgggatcgctggtgattgaaaaactgtctgaatgccagaaagtgtgcttcgtgccgcgtggcagccagatgcaggatctcacccagccgcagcatattaataccatgctctacgaagcagagctgtttgctaccctggtggatgagcatctggtggatcatccagggctggcggtcagtcgcatcaccgccaaactgctgactgagatccgccgccagactggggtgatttttccggcagatagcgtaaaactataa

SEQ ID NO: 459717 - DNA, 684 bp, Shigella boydii
atgcagccccgccttcttctccgtatttgtttttctcgccggactctaaagattgcctgcttactgttacttgtggcaggagcgaccatttttatcgccgatcgagtaatggtcaacgccagcaagcagctgacctggagcgatgtcaacgcagttccggcgcgtaacgtgggcttattgctgggggccaggccgggtaatcgctactttacccgacgtattgataccgcagcagcgttgtaccacgccggaaaagtgaaatggctactggtaagtggcgataacggacgtaaaaattacgatgaagcatcaggtatgcagaaggctttgatcgctaaaggcgtaccggcgaaagtgatcttctgcgactatgccggattctcaacgctggattcggtagtgcgtgccaaaaaggtttttggtgaaaaccatatcaccattatctcgcaagaatttcataaccaacgcgccatctggctggcaaaacagtacagcatcgacgctatcggttttaacgcgcctgacctcaatatgaagcacggtttttatactcaactgcgggagaaactcgctcgtgtcagcgccgtgattgacgccaaaatcctccatcgccagccgaaatatctcgggccatcggtcatgattgggccgtttagtgagcatggctgtccggcaaaagaataa

SEQ ID NO: 459718 - DNA, 504 bp, Shigella boydii
atgagcaatcttacttatcttcagggttatcccgagcagctactttcccaggtgcgaacgctgattaacgaacagcgtctgggcgatgtgctggcaaaacgctatccgggaacacacgactacgccaccgataaagccctctggcaatatactcaggatctaaaaaatcagtttctgcgcaatgccccgccgatcaataaagtgatgtatgacaataagatccatgtgctaaaaaacgcgctcgggttacataccgctgtttctcgtgtgcagggcggcaagctgaaagcaaaagcagagatccgcgtcgctactgtgtttcgcaacgcgccggaaccgtttttacgtatgatcgtggtgcacgaactggcgcacctgaaggagaaagagcataacaaagcgttttaccagttgtgctgccatatggagccgcagtaccaccagctggagttcgacacccggctgtggctaacgcagttgtcgcttgggcaggacaaaatctga

SEQ ID NO: 459719 - DNA, 1137 bp, Shigella boydii
atgagccacttagacaacggtttccgttcactgacactacaacgttttccggcgacggatgacgttaacccgctacaggcgtgggaagcggcggatgaatatttgctgcaacagttggacgacacagaaatccgcggcccggtgttgatcctgaatgatgcctttggtgcgttaagctgcgcgctggcagaacataagccgtacagcattggcgactcatacatcagtgaactggcgacgcgcgagaatttacgcctcaacgggattgatgagtcgagcgtgaagtttctcgacagcaccgccgactacccgcaacagccgggtgtggtgctgatcaaagtgccgaaaacactggcattgctggaacaacaactgcgtgcgctgcgcaaagtggtcacgtcggatacacgtattattgccggtgccaaagcccgtgacattcacacttccacgctggaactgttcgaaaaagtgctcggcccgaccaccaccacgctggcatggaaaaaagcgcgcctgattaattgcacgttcaatgaaccgccgctggccgatgcgccgcagaccgttagctggaagctggaaggtactgactggactatccataaccatgcgaatgtcttctcccgcaccgggcttgatatcggcgcgcgcttctttatgcaacatctgccagagaatctcgaaggggagattgtcgatctcggttgcggtaatggcgttattggtctgacgctgcttgataaaaacccgcaggcgaaagtggtgtttgtcgatgaatcgccgatggcggttgcttccagccgtttgaacgttgaaaccaacatgccagaggcgttggatcgcagcgagtttatgatcaacaacgcgctctccggcgtggagcctttccgctttaatgctgtgctctgcaacccgccgtttcaccaacaacatgcgctgaccgataacgtcgcctgggagatgttccaccatgcccgccgctgcctgaaaatcaacagcgagctgtatattgttgccaaccgtcacttggattacttccataaactgaagaagattttcggcaactgcaccaccatcgccacgaataataaatttgtggtgctgaaagcagtgaagctggggcgtcgtcggtaa

SEQ ID NO: 459720 - DNA, 315 bp, Shigella boydii; identical to SEQ ID NO: 261899

SEQ ID NO: 459721 - DNA, 417 bp, Shigella boydii
atgattgcgattgccgacatcttgcaagcaggagaaaagctaactgcggtggccccttttctggcgggtattcagaacgaggaacaatacacccaggcgctggaactggtagatcatctgctgctcaacgatcctgaaaaccccttgctggatctggtgtgtgccaaaataaccgcgtgggaagaatcagcgcccgaatttgcggaatttaatgccatggctcaagccatgcctggcggtatagccgtgattcgtacccttatggatcaatatggtttaacccttgccgatctgccggaaattggcagtaaatctatggtgtcacgcgttttgagcgggaagaggaaattaacgctggaacacgctaaaaaattggcaacgcgattcggcatttctcccgccttgtttattgattaa

SEQ ID NO: 459722 - DNA, 2019 bp, Shigella boydii
atgagctacccgtcgctgttcgccccgctggatttaggttttaccacgttaaaaaaccgcgtgttgatgggctcaatgcacaccgggctggaggaatacccggacggtgccgagcggctggcagcgttttatgccgaacgcgcccgtcacggcgtggcgctgattgtcagcggcggcattgcaccagatttaacaggcgttggcatggaaggtggcgcaatgctcaacgacgccagccagatcccacaccatcgcaccattaccgaagcggtacatcaggaaggcggcaaaatagccctgcaaattttgcataccgggcgctacagctaccaaccgcatctggtcgctccctccgcattgcaggcccccatcaaccgtttcgttcctcacgaactcacccatgaagagatcctgcaactgatcgacgatttcgcccactgcgcgcaactggcacgggaggcaggatacgacggtgtagaggtaatggggtccgaagggtatttgatcaacgaatttctgacgctgcacaccaatcagcgtagtgaccagtggggcggcgattaccgcaaccggatgcgatttgccgtagaagtagtgcgtgcggtgcgcgaacgcgtcggcaacgacttcattattatctaccgactgtcgatgctcgacctggtcgaagacggcgggacttttgccgaaacggtagagctggcgcaggccattgaagcggcgggcgcgaccattatcaacaccggcattggctggcatgaagcacgtattccgaccattgccacgcccgtgccgcgcggcgcatttagctgggtcacgcgcaaactgaaaggccacgtctcgctgccgctggtaaccaccaaccggattaacgatccgcaggttgccgacgatattctctcgcgcggcgatgccgatatggtatcgatggcacgaccgtttcttgctgatgcggaactgctgtcaaaagcgcaatcggggcgagccgatgagatcaacacctgcattggctgcaatcaggcctgcctcgatcagatcttcgttggcaaagtcacctcgtgcctggtgaatcctcgcgcctgccacgaaaccaaaatgccaatccttcctgccgtgcagaaaaaaaatctggcggtggtcggtgcgggacctgctgggctggcgtttgccattaacgcggcggcgcgtgggcatcaggtaacattgtttgatgcccacagcgagatcggcgggcagtttaatatcgccaaacagatccccggcaaagaggagttttacgaaacgctgcgctattaccaccggatgatcgaagtgacgggcgtgacgctgaaactcaatcacaccgtgacggcggatcagttacaggcgttcgatgaaacgatcctcgccagtgggatcgtgccgcgcgttccgcctatcgacgggatcgatcatccgaaggtattgagttatctcgatgtactgcgcgacaaagcgccggtaggcaacaaggttgccatcatcggttgtggcgggattggttttgatacggcgatgtatttaagtcagccgggcgaatccaccagccagaatatcgccaggttctgtaatgagtgggggatcgacagcagcctacaacaggctggtggcttaagcccgcagggaatgcagatcccgcgtagcccacggcaaattgtgatgctccagcgcaaagccagcaaaccgggacaggggttaggcaaaaccaccggctggatccatcgcaccaccctgctctcgcggggtgtgaaaatgatcccaggcgtaagttatcagaagattgacgatgacgggctgcatgtggtgatcaacggcgaaacgcaggtattagctgtggacaatgtggtgatctgcgcagggcaagagccaaaccgcgcgctggcgcaaccgctgattgatagcgggaaaactgtgcatttaattggcggctgcgatgtggctatggagctggacgcacgacgggcaattgcccagggaacacggctggcgctggagatttaa

SEQ ID NO: 459723 - DNA, 1290 bp, Shigella boydii
atggcgcatttcaatccggacatcgccaaagagaatatccgcgcggtcttctcctggcagatccagcctggcgaccgcgtgcgtccgcaggatgtgggctttgtccccgacctgatagcgtggaaccttagccccgagcgtggtggcgatggcggcaactggaacgaacgtaataccaaacccagccttgccgcctggtcggtgatagaagtgtacaacgtcacccaggataaagcctggttggcagagatgtacccgaaactggtggcctatcacgactggtggttacgtaaccgcgatcacaacggcaacggcgtgccggaatatggcgcgacccgcgacaaagcccacaacactgagagcggcgagatgctgtttgcggtgaagaaaggcaacaaagaagagacgcagtctgggctgaacaactacgcccgcgtggtggagaaaggccagtacgacagtctggaaattccggcacaggtcgctgcgtcgtgggaatcggggcgtgatgatgccgccgtctttggttttatcgacaaagaacagttggataaatatgtcgctaatggtggcaaacgtagcgactggacggtgaaattcgccgaaaaccgcagtcaggacggaacgttgctgggctactcgctattgcaggagtcggtggatcaggccagctatatgtacagcgataaccattatctggcggagatggcaaccatcctcggtaagccagaagaggccaaacgctatcgccagttggcacagcagctcgcggactacatcaacacctgtatgttcgacccgactacccagttctactatgacgtacgtattgaagataaaccactggcgaacggctgcgcgggcaaaccgattgttgagcgcggtaaagggccggaaggctggtcgccgctgtttaacggtgcggcaacgcaggccaatgccgacgcggtggtgaaggtgatgctcgatcctaaagagttcaacacctttgtcccgctgggaacggcggcgttaaccaatccggcttttggcgctgatatctactggcgcgggcgcgtatgggtggatcagttctggtttgctctgaaagggatggagcgttacggttatcgtgatgatgccctgaagctggcggatacgttcttccggcacgccaaaggattaaccgccgatggcccaattcaggagaattacaacccgctgactggcgcgcagcaaggcgcaccaaatttctcctggagtgccgcgcatttgtatatgttgtataacgattttttccgtaagcaataa

SEQ ID NO: 459724 - DNA, 1047 bp, Shigella boydii
atgaaaataaaaactattttaacgccagtaacctgcgctctgctgataagtttttccgcccatgccgctaacgccgacaattataaaaacgtgattaaccgtactggcgcgccgcagtacatgaaggattacgattacgacgatcaccagcgttttaatccgtttttcgatctcggagcctggcatggtcatctgttgccagacggccctaacaccatgggcggctttccgggcgttgcgctgctgacggaagagtacatcaactttatggccagcaatttcgaccgcctgaccgtctggcaggacggcaagaaagtcgactttacgctggaggcatacagtattcccggtgcgctggtgcaaaaactgacagcaaaagatgtgcaagtcgaaatgactctgcgcttcgccacgccgcgcacgtcactactggaaaccaaaatcaccagcaataaaccgctggatctggtgtgggacggcgaactgctggaaaaactggaagcgaaagaagggaaaccgctttccgataaaaccattgctggcgaataccctgactatcagcgcaaaatcagcgccacccgtgatggcctgaaagtcacctttggcaaagtgcgcgccacctgggatctgctgacctccggcgaatcggaatatcaggtgcataaatccctgccggtgcagactgaaatcaacggtaatcgctttaccagtaaggcgcatatcaacggttcgaccacgctctacaccacctattcccatctgctgaccgctcaggaagttagcaaagagcaaatgcagatccgcgatattctggcgcgtccggcgttttatctcaccgcctcgcagcaacgctgggaagaatacctgaagaaagggttaaccaatccggatgcgacgccggaacagacgcgcgtcgcggtgaaagcgatcgaaacgctcaacggtaactggcgctcaccgggcggtgcggtgaaatttaacaccgttacaccgtcggtgaccgggcgctggttctccggcaatcagacctggccgtgggatacctag

SEQ ID NO: 459725 - DNA, 1071 bp, Shigella boydii
atgaaattaatcactgcaccatgcagagcattacttgctctgccgttttgctacgccttttctgcggcaggagaagaagcacgtccggcagaacatgacgacacaaaaacacccgcaattacctcgacatcttctccttcatttcgtttttacggcgaattaggggttggtggatatatggatttagagggtgagaataaacataaatacagcgacggtacctatattgaaggtggcctggagatgaagtacggctcctggttcggcctgatttacggcgaaggctggaccgtgcaggccgaccacgacggcaatgcctgggtgccagaccatagctggggtggtttcgagggcggaattaaccgtttctatggcggttatcgtaccaatgatggcactgaaatcatgctcagtctgcgtcaggattcctcgctggatgacctgcaatggtggggcgatttcacccccgatctgggctacgtcattcccaatacccgcgacattatgactgcgctgaaggtacagaacttaagcggcaactttcgttatagcgtcaccgcgactcctgccggacatcatgatgaaagcaaagcctggctacattttggcaaatacgatcgctatgacgacaaatacacctatccggcaatgatgaacggttacatccagtatgaccttgccgaaggcatcacctggatgaacggtctggaaatcaccgacggcacaggacagctctatctcacgggcctgctaactcctaactttgccgctcgcgcctggcaccataccggacgcgccgacgggctggacgtaccgggaagtgaaagtgggatgatggtgagcgccatgtatgaagcgttaaagggcgtttatctctccaccgcttacacctacgccaaacatcgccctgaccacgctgacgatgaaaccacctctttcatgcagtttggtatctggtacgaatacggcgacggacgtttcgccacggcttttgatagccgcttctacatgaaaaatgcctctcacgatcccagcgaccaaatcttcctgatgcaatatttctactggtaa

SEQ ID NO: 459726 - DNA, 993 bp, Shigella boydii
atgttggggccaattacctccgtcacttcaacgctgatgctgctgttaacgctctcctacattttactggcaggtacggcgctggttggcggcgtacagcctgctgaccccatcaccgttgacgcgatgatcccgaacttcaactgggcgttcctcggcgttaccacctggatctttatggccgcaggtggcgcggagtccgtcgctgtgtacgttaacgacgtcaaaggcggttcgaaatcgttcgttaaagtgatcatcctcgccgggatttttatcggcgtactgtattccgtctcctcggtgctgattaacgtcttcgtcagcagcaaagagttgaaatttaccggcggatcggtgcaggtattccatggcatggcggcgtattttggtctaccggaagcgttgatgaatcgctttgtcggtctggtgtcctttaccgcgatgttcggttccctgctgatgtggaccgcaacgccggtgaaaattttcttctccgaaatcccggaaggcatctttggtaagaaaaccgtcgaactgaacgaaaacggcgttccggcgcgcgcagcgtggatccagttcctgatcgtcatcccgctgatgattatcccgatgctcggttccaataccgtgcaggatctgatgaatactattattaatatgaccgccgcagcgtccatgcttccgccgttattcatcatgctggcttacctgaatttacgcgccaaattagatcacctgccacgcgatttccgtatgagctcccgccgcaccggtattatcgttgtttcaatgcagattgcgatatttgccgtagggtttgtcgcttcgacattcccgactggcgcgaatattctgaccatcattttttataacgtcggcggtattgttatcttccttggctttgcgtggtggaaatacagtaaatatataaagggattaacggctgaagagcgccatattgaagcgacgccagccagcaatgttgattaa

SEQ ID NO: 459727 - DNA, 249 bp, Shigella boydii
gtgcattactacctgcaagggcagcaaaaaattgaatatgcgccgaaagagacattacaggtagtggaatattatcgtgatgaaactgaccgtgaatatttaaaaggctgcggagaaaccgttgaggtccacgaagggcaaatcgttatttgcgatatccatgaagcgtatcggtttatctgcaataacgcggtcaaaaaagtggttctcaaagtcaccatcgaagatggttatttccataacaaataa

SEQ ID NO: 459728 - DNA, 357 bp, Shigella boydii
atggatgttaccggaaacgcgaccaataccataatcaatggtggtacacagaatattaataatcatggtattgccacgggtaccaatatcaacagcggaacacaaaatatcaagagcggcgggaaagctgacacgacaaatatttccaccgggagccggcaggttgttgagaaagatggtacggcaactggcagcaatattagcgccggaggctcgctgattgtctataccggcggtatagcacatggggttaaccaggagacgggcagtgctttagttgccaacacgggcgcagggactgatatcgaaggatacaacaagctctctcacttcactattacccggaggggaggctaa

SEQ ID NO: 459729 - DNA, 1206 bp, Shigella boydii
gtgctggaaaataccggcgaactgacggtagtggctaaaacctcggcgaaaaatactaccgttgatgctggcggtaagctgattgtccagaaggaggctaaaacagataccaccagacttaataatggtggcgttctggaggttcaggacggtggtgaggctaagcatgttgagcaacaatccggcggcgcattaattgcttccacaacttccggaacccttatcaaaggaaccaacagttatggtgatgctttctacatcaggaattcagaagctaaaaatgtagtgctggaaaacgctggctcattaacagtcgtcactggttcccgggcagttgatacgattattaatgccaacggcaaaatggatgtttatggaaaagatgttggcactgtactcaatagtgctggcacccaaacaatatatgccagtgccacttctgataaagcaaatatcaaaggtggcaagcaaacggtatatggattagccactgaggcaaatatcgaaagtggtgaacaaattgttgatggtgggtcaacagagaaaacacacatcaatggtggcacgcaaaccgttcagaattatggtaaggcaatcaataccgatatcgtctctggcctacaacaaattatggcaaacgggacagcggaaggttccattattaatgggggttcacaggtagttaatgagggcggtctggctgaaaactcggtgcttaatgacggcggcacactcgatgtgcgggagaaaggcagcgcaacggagatacagcagagtagccagggcgctttggttgcaaccaccagggcgacgcgggtcacaggaacacgcgcggatggcgtcgcgttcagcatcgagcagggtgcggcgaacaatatcctgctggcaaatggcggcgtgttaaccgtggagtcagacacctcttctgacaaaacacaggtcaatacgggcggacgggagatcgtcaaaataaaagccactgcgacaggcacgacgctcaccggcggcgaacaaatcgtcgagggggtggcgaatgagacaacgattaacgacggcggaatacaaacagtttcagctaacggagaggcaataaaaacaaagatcaatgaaggcggtacgctgacagttaacgataatggcaaagcgacagatatcgtccagaacagcggtgccgctctccagacgagcacggctaacggtatttaa

SEQ ID NO: 459730 - DNA, 198 bp, Shigella boydii
atgttgctggaaaatggcggtaatttattggtattagcaggtaccgaagctcgcgactccacggttggcagcggtggagccgccaacggcagttatcgcagcaacgggctgggcggtcacattgaaaccgggatgcgatttaccgatggtaactggaacctgacgccgtatgcatcgttaacgggggttcaccgctga

SEQ ID NO: 459731 - DNA, 327 bp, Shigella boydii
atggaatcgaaatcagtcgatacccgcagtttatatcgtgaactgggtgcaacgctgagttacaacatgcgtctggggaacggtatggaagttgagccgtggctgaaggcggctgtgcgcaaagaatttgtcgatgataaccgggtgaaagtgaatagtgacggtaatttcgtcaatgatttgtcgggcagacgtggaatataccaggcaggtattaaagcctcattcagcagtacgttaagcgggcatcttggggtggggtatagccatggtgccggtgtggaatccccgtggaacggggtagctggtgtgaactggtcgttctga

SEQ ID NO: 459732 - DNA, 126 bp, Shigella boydii
atggcgctcataaatctggtatacttgccgttacacattggggctgattctggattcgacgggatttgcgaaacccaaggtgcatgccgaggggcggttggcctcgtaaaaagccgcaaaaaatag

SEQ ID NO: 459733 - DNA, 483 bp, Shigella boydii
atgacgaagaaaaaagcacataaacctggttcagcgaccatcgcgcttaacaagcgcgcccgtcacgaatactttatcgaagaagagttcgaagcgggacttgccctgcaaggctgggaagttaaatccctgcgcgcaggaaaagccaatatcagcgacagctacgtccttctgcgtgacggagaggcatttctgtttggcgctaacatcacgccaatggccgtagcctccacgcatgtggtgtgcgatcctacccgtacccgcaagttacttctcaaccagcgcgaactggactcattgtacggtcgcgtcaatcgagaaggctataccgtagtggcgctctccctgtactggaaaaatgcctggtgcaaagtgaaaatcggcgtcgccaaaggtaaaaaacagcacgataaacgttcagatatcaaagaacgcgaatggcaggtggataaagcacgtatcatgaaaaacgcccaccgttaa

SEQ ID NO: 459734 - DNA, 477 bp, Shigella boydii
atgatattatttgttggatttttgttgatggaaatagttatgcctcagattagccggaccgcactggtaccctacagcgcggagcaaatgtatcagttagtgaatgacgttcagtcttatcctcagtttttgccgggttgtaccggaagtcggattctggagtccactcctgggcagatgactgcggcggtagatgtctctaaggctgggatcagcaaaacgtttactacccgcaaccagttgaccagtaaccaaagtattcttatgaatctggtggatgggccgttcaagaaattgattggtggatggaagtttacgccgctgagccaggaggcgtgtcgtatcgagtttcatctcgactttgagtttaccaataagttgattgaactcgcctttggtcgcgtgtttaaagagctggcgtctaatatggtccaggcttttacggttcgtgcgaaagaggtttacagtgccaggtaa

SEQ ID NO: 459735 - DNA, 291 bp, Shigella boydii
gtgccaggtaaaattgccgttgaggtggcttatgcgctacctgagaagcagtacctgcagcgcgtgacgctgcaggagggcgcgacggttgaagaagctattcgcgccagtggcttgctggaattgcgtaccgatatcgatttaactaaaaacaaagtcggcatttacagccgtccggcaaaactaagcgatagtgtgcatgatggcgatcgggtggagatttatcgccctctcattgccgatccgaaagagcttcgcaggcaacgagcagaaaaatcagcgaataaataa

SEQ ID NO: 459736 - DNA, 342 bp, Shigella boydii
atgcgctgtaaaacgctgactgctgcagcagcagtactattgatgttgaccgcaggctgttccactctggagcgagtggtttaccgtcctgacatcaaccaggggaactatctgaccgctaacgacgtatccaaaatacgtgttggcatgacgcaacaacaagttgcgtacgcattgggtacaccgctgatgtccgatccatttggtacgaatacctggttctatgtcttccgccagcaaccaggtcataaaggtgtaacgcagcaaacgctgacgctgacctttaacagtagcggtgtgttgaccaatattgataacaaacctgcgctgagtagtaactaa

SEQ ID NO: 459737 - DNA, 1662 bp, Shigella boydii
atgttggcacaactgaccatcagcaactttgctatcgttcgtgagcttgagattgattttcatagcggcatgaccgtaataactggcgagaccggcgcgggtaaatctattgcaatagatgccctcggtctttgtctcggtggtcgcgctgaagccgacatggtgcgtaccggcgctgctcgcgctgacctgtgcgcccgtttttctctgaaagatacgccagcggctctgcgctggctggaagaaaatcagcttgaagacgggcatgaatgtttgcttcgtcgcgtgatcagcagcgatggtcgctcccgtggtttcatcaacggtacagctgttcctctgtcacaactgcgcgaactgggtcagttgctgattcagatccatggtcagcacgctcatcaattactcaccaaacctgagcaccaaaaattcctgcttgatggctatgccaatgaaacctctctactgcaggaaatgaccgcacgttatcagttgtggcatcaaagctgccgtgacctcgcgcatcatcaacagttaggtcaggaacgcgccgcccgtgcggaactgctgcaataccaattaaaagaacttaacgaatttaatccgcagcccggagagtttgaacaaatcgacgaagagtacaaacgtctggcgaacagcggtcaattgctgaccaccagccagaatgcattggcattaatggcctacggtgaagacgcaaacctgcaaagtcagctttacacggctaaacaactggtgagcgaattgattggcatggacagcaaactgtccggcgtacttgatatgctggaagaagctaccatccagattgctgaagccagcgatgaactgcgccactactgcgatcgtctggatctcgatcccaaccgactatttgaacttgaacagcgcatctcaaaacagatttcgctggcacgtaaacatcacgtcagccctgaggcattgccacagtattaccagtcgctactggaagaacagcagcaactggacgatcaggccgactcacaagaaacgcttgcgctggcggtaacgaaacatcatcagcaggcactggaaatcgcgcgcgcattacaccaacaacgccagcaatatgcagaagaacttgcacagctgatcaccgacagtatgcatgcgctctcaatgccgcatgggcagtttacgatcgatgttaaatttgacgagcatcacctgggcgctgacggtgccgatcgtattgagtttcgggtaaccaccaacccaggtcagccaatgcagcctattgccaaagtcgcatccggtggtgaattgtcccgcatcgcactggcaacccaggtcatcacggcgcgtaaaatggaaaccccggcactgatttttgatgaagtggatgtagggattagcggtccaacagcggcagttgtcggcaaactgctgcgtcaactcggcgaatcaactcaggtgatgtgtgttacccacctgccacaagtcgcgggatgtggtcatcaacactattttgtcagcaaagaaaccgatggtgcgatgacagaaacgcatatgcaatccctgaataaaaaagcgcggttacaagagctggcgcgcctgcttggtggcagtgaagtcacacgtaatacactggcgaatgcgaaagaactgcttgcagcgtaa

SEQ ID NO: 459738 - DNA, 879 bp, Shigella boydii
atgaataatcatttcaagtgtattggcattgtgggacacccacggcaccccactgcactgacaacacatgaaatgctctaccgctggctgtgcacaaaaggttacgaggtcatcgttgagcaacaaatcgctcacgaactgcaactgaagaatgtgaaaactggcacgctcgcggagattgggcaactagctgatctcgcggtagtcgttggtggcgacggtaatatgctgggcgcggcacgcacactcgcccgttacgatattaaagttattggaatcaaccgtggcaacctgggtttcctgactgaccttgaccccgataacgcccagcaacagttagccgatgtgctggaaggccactacatcagcgagaaacgttttttgctggaagcgcaagtctgtcagcaagattgccagaaacgcatcagcaccgcgataaatgaagtggtgcttcatccaggcaaagtggcacatatgattgagttcgaagtgtatatcgacgagatctttgcgttttctcagcgatctgatggactaattatttcgacgccaacaggctccaccgcctattccctctctgcaggcggtcctattctgaccccctctctggatgcgattaccctggtgcccatgttcccgcatacgttgtcagcacgaccactggtcataaacagcagcagcacgatccgtctgcgtttttcgcatcgccgtaacgacctggaaatcagttgcgacagccagatagcactgccgattcaggaaggtgaagatgtcctgattcgtcgctgtgattaccatctgaatctgattcatccgaaagattacagttatttcaacacattaagcaccaagctcggctggtcaaaaaaattattctaa

SEQ ID NO: 459739 - DNA, 594 bp, Shigella boydii
atgagtagtaaagaacagaaaacgcctgaggggcaagccccggaagaaattatcatggatcagcacgaagagattgaggcagttgagccagaagcttctgctgagcaggtggatccgcgcgatgaaaaaattgcgaatctcgaagctcagctggctgaagcccagacccgtgaacgtgacggcattttgcgtgtaaaagccgaaatggaaaacctgcgtcgacgtactgaactggatattgaaaaagcccacaaattcgcgctggagaaattcatcaacgaattgctgccggtgattgatagcctggatcgtgcgctggaagtggctgataaagctaacccggatatgtctgcgatggttgaaggcattgagctgacgctgaagtcgatgctggatgttgtgcgtaagtttggtgttgaagtgatcgccgaaactaacgtgccgctggacccgaatgtgcatcaggctatcgcaatggtggaatctgatgacgttgcgccaggtaacgtactgggcattatgcagaagggttatacgctgaatggtcgtacgattcgtgcggcgatggtaactgtagcgaaagcaaaagcgtaa

SEQ ID NO: 459740 - DNA, 1242 bp, Shigella boydii
atggtggtcatttcagcctatttttccgggtccgaaaccggaatgatgaccctcaaccgctatcgtctgcgacatatggcgaaacagggtaatcgctcggccaaacgcgtcgaaaaattgctgcgtaagccagaccgcctgataagcctggtgttaatcggcaataacctggtcaatattcttgcctccgcgctcggcactattgttgggatgcgtttgtacggcgatgcgggcgtggcaattgctactggtgtgctgacttttgtcgtactggtatttgctgaggtattgccgaaaaccattgccgcgctgtacccggaaaaagtcgcttatccgagtagttttctgctggctccgctgcaaattttgatgatgccgctggtctggttgctgaatgctatcacccgtatgctgatgcgcatgatgggtatcaaaaccgatatcgtggttagcggctctttgagcaaagaagagttgcgcactatcgtgcacgaatcacgctcacaaatttcccgtcgcaatcaggatatgctgctgtcggtgctcgatctggaaaaaatgaccgttgatgacatcatggtgccgcgcagtgaaattatcggtattgatatcaacgatgactggaaatcgattctgcgccaactctcccactcacctcacgggcgcatcgtgctctaccgtgattcgctggacgacgccatcagtatgctgcgagtacgtgaagcctggcggttgatgtcggagaaaaaagagttcaccaaagaaaccatgctgcgcgccgcggacgagatctattttgtgccggaaggtacgccgctcagcacgcagttagtaaagtttcagcgcaacaaaaagaaagtcggcctggtcgtcaacgagtatggagacattcaggggctggtgacggttgaagatattctggaagagattgtcggcgatttcactacgtcgatgtcgccaacacttgccgaagaggtcacgccgcaaaacgacggttcggtgattatcgatggcaccgccaacgtgcgggaaatcaacaaagcctttaactggcatctaccggaagatgatgcccgcacggttaatggcgtcattcttgaggcactggaagagatccctgtcgcaggcacccgcgtgcgtattggcgagtacgatatagatattctcgacgtacaggacaatatgattaagcaggtaaaagtttttcctgtgaaaccgctgcgcgagagtgtggcggagtaa

SEQ ID NO: 459741 - DNA, 867 bp, Shigella boydii
atgcaacggttggagcagcgttcacctgacgctatactgcttctctttcttattgctcaaactgtcgacatcactatgcccgtttttgctctgctcgcgcttgtcgcctactccgtcagtcttgcgctgattgttcccggtctgctgcaaaaaaacggcggctggcggcgcatggctattatttctgcggtcattgcgctggtctgccacgcaatcgctctggaagcccgcatcctacccgacggtgatagcggacaaaacctcagcctgctgaacgttggttcattggtcagtttgatgatctgtacggtaatgaccattgtggcttctcgcaatcgtggctggttgctgctacccattgtctatgcctttgcgcttatcaacctagcgctggcgaccttcatgcccaatgaatacatcacccatctggaagcaacgcctgggatgctggtgcacattggcttatcgctcttttcctatgccacgctaattatcgccgccctgtacgcgctgcaactggcgtggattgattaccaactgaagaacaagaagctggcatttaaccaggaaatgccgccattgatgagtatcgagcgtaaaatgttccacatcacgcagattggcgtggtgctgctaacgctcacgctttgcactggcctgttctacatgcacaacctatttagcatggaaaatatcgacaaggctgtgctctctatcgtggcgtggtttgtctatattgtgctgctgtggggacattaccatgaaggatggcgtggacgccgcgtcgtctggtttaacgttgcgggcgcggtaattctgacactggcctacttcggcagccgaattgtccagcagttaatcagctaa

SEQ ID NO: 459742 - DNA, 1362 bp, Shigella boydii
atgtttgataatttaaccgatcgtttgtcgcgcacgctgcgcaatatcagtggccgtggacgcctaactgaagacaacgtaaaagatacgctgcgcgaagtgcgcatggcgctgctggaggcggatgtcgctctgccggtagtgcgtgagtttatcaatcgcgtaaaagagaaagcggttggtcatgaagttaataagagcctgacgccggggcaggagttcgtcaaaatcgtccgtaacgaactggttgcggcgatgggcgaagagaaccagaccctgaacctggcggcgcaaccgcctgcggtcgtgctgatggcgggcctgcaaggtgccggtaaaacaaccagcgttggtaaactcggtaagttcctgcgcgagaagcacaagaagaaagtgctggtggtttctgccgacgtttatcgcccggcggcaatcaaacagcttgagacgctggcagagcaggtgggcgttgatttcttcccttctgatgttggtcagaagccggtagatatcgttaacgcggcgctgaaagaagccaaactgaaattctacgacgtgctgctggtggataccgctggtcgtctgcacgttgacgaagcgatgatggacgagatcaaacaagtccatgcgtcgattaacccggttgaaaccctgtttgtggttgacgccatgaccggtcaggatgcggccaatacggcaaaagcattcaatgaagcgttaccgcttaccggcgtagtgttgaccaaagtggacggcgatgcccgcggcggtgcggcgctctctattcgtcacatcactggcaaaccgatcaagttcctcggtgttggcgagaaaactgaggcgctggagccgttccatccggaccgcattgcgtcgcgtattctcggcatgggcgacgtactgtcgctgatcgaagatatcgaaagcaaagttgaccgcgcgcaggcagagaaattagccagcaagctgaaaaaaggtgacggcttcgatctcaacgactttcttgagcagctgcgccagatgaaaaatatgggcggcatggccagcctgatgggcaagctgccgggcatggggcagatcccggataacgtcaagtcacagatggacgataaagtgctggtgcgtatggaagccatcatcaactcgatgacgatgaaagagcgcgctaagccagaaatcatcaaaggttcgcgtaaacgccgtattgctgccggttgcggtatgcaggtgcaggacgttaaccgtcttctgaaacagttcgacgacatgcagcgcatgatgaagaaaatgaagaagggcggaatggcgaagatgatgagaagcatgaaggggatgatgccgccgggatttcctggtcgctaa

SEQ ID NO: 459743 - DNA, 249 bp, Shigella boydii; identical to SEQ ID NO: 4203

SEQ ID NO: 459744 - DNA, 549 bp, Shigella boydii
atgagcaaacaactcaccgcgcaagcacctgttgatcccatcgttttgggaaaaatgggttcgtcttacggtattcgtgggtggctcagagtgttttcttccaccgaagacgccgaaagcatttttgactatcagccctggtttatccagaaggcgggtcagtggcagcaagtccagctggaaagctggaagcaccacaatcaggacatgatcatcaagctgaaaggcgttgacgatcgtgatgcggcgaacctgctgacgaattgtgaaattgtcgtggattcatcgcagttgcctcagcttgaagagggtgactactactggaaagacctgatgggctgccaggtagtaaccactgaaggctacgatctcggtaaagtcatcgatatgatggaaaccggatctaatgacgttctcgtcattaaggcaaacctgaaagatgcgtttggtatcaaggaacgtctcgtaccgttcctcgatgggcaggttatcaagaaagtcgatctcactactcgttcaatcgaagtagattgggatcctggtttttaa

SEQ ID NO: 459745 - DNA, 768 bp, Shigella boydii
atgtggattggcataattagcctgtttcctgaaatgttccgcgcaattaccgattacggggtaactggccgggcagttaaaaatggcctgctgagcatccagagctggagtcctcgcgacttcacgcatgaccggcaccgtaccgtggacgatcgtccttacggcggcggaccggggatgttaatgatggtgcaacccttgcgggacgccattcatgcagcaaaagccgcggcgggtgaaggcgcaaaggtgatttatctgtcaccacagggacgcaagcttgatcaagcgggcgtcagcgaattggcaacgaatcaaaaattgattctggtgtgcggtcgctacgaaggtatagatgagcgcgtgatccaaaccgaaattgacgaagaatggtcaatcggcgattacgttctcagtggtggtgagttaccagcaatgacgctgattgactccgtttcccggtttattccgggggtactgggacatgaagcctcggcaacggaagattcctttgctgaaggattgctggattgcccgcactatacgcggcctgaggtgttagaagggatggaagttccgccagtgttactgtcgggcaaccatgccgagatacgtcgctggcgtttgaaacagtcgctgggccgtacctggcttagaagacctgaacttctggaaaacctggctctgactgaagagcaagcaaggttgctggcggagttcaaaacggaacacgcacaacagcaacataaacatgatgggatggcgtaa

SEQ ID NO: 459746 - DNA, 348 bp, Shigella boydii; identical to SEQ ID NO: 4206

SEQ ID NO: 459747 - DNA, 264 bp, Shigella boydii
atggcagccaaattggcctcgacagggctaacacatgcccgtatggatggacacaccgataactatggtgaagacagttacaacgaaggcttatcattgaaacgggcgaatgtcgtggccgatgcatgggctattggtggacaaattccacgcagcaatctcaccacacagggtttaggaaaaaaatatcccatagccagtaacaagaccgcccagggccgcgccgagaaccgccgcgtcgcagtggtgattacaaccccttaa

SEQ ID NO: 459748 - DNA, 420 bp, Shigella boydii
ttgataaacaattccgatgcccgaaaaacgtcggcgttactatttcttgatggcgataatttcaaatatatcaatgatacctggggtcatgcgacgggcgatagggtcttgattgaaatcgcaaaacggttagctgaatttggcgggctgcgacataaagcataccgcctgggcggcgatgaattcgctatggtgctctatgatgtacagtcggaatctgaagtgcaacagatatgctcagcactgacacaaatctttaatctcccgtttgatcttcataatggccatcagaccaccatgacattaagcattggttacgcgatgaccattgagcacgcctctgcggaaaaattacaagagcttgccgatcacaatatgtatcaggccaaacaccagcgtgccgaaaagctggtgagatag

SEQ ID NO: 459749 - DNA, 1284 bp, Shigella boydii
atggctgatacaaaagcaaaactcaccctcaacggggacacagctgttgaactggatgtgctgaaaggcacgctgggtcaagatgttattgatatccgtactctcggttcaaaaggtgtgttcacctttgacccaggcttcacttcaaccgcatcctgcgaatctaaaattacttttattgatggtgatgaaggtattttgctgcaccgcggtttcccgatcgatcagctggcgaccgattctaactacctggaagtttgttacatcctgctgaatggtgaaaaaccgactcaggaacagtatgacgaatttaaaactacggtgacccgtcataccatgatccacgagcagattacccgtctgttccacgctttccgtcgcgactcacatccaatggcagtcatgtgtggtattaccggcgcgctggcggcgttctatcacgactcgctggatgttaacaatcctcgtcatcgtgaaattgccgcgttccgcctgctgtcgaaaatgccgaccatggccgcgatgtgttacaagtattccattggtcagccatttgtttatccgcgcaacgatctctcctatgccggtaacttcctgaatatgatgttctccacgccgtgcgaaccgtatgaagttaatccgattctggaacgtgctatggaccgtattctgatcctgcacgctgaccatgaacagaacgcctctacctccaccgtgcgtaccgctggctcttcgggtgcgaacccgtttgcctgtatcgcagcaggtattgcttcactgtggggacctgcgcacggtggtgctaacgaagcggcgctgaaaatgctggaagaaattagctccgttaaacacattccggaatttgttcgtcgtgcgaaagataaaaatgattctttccgcctgatgggcttcggtcaccgcgtgtacaaaaattacgacccgcgcgccaccgtaatgcgtgaaacctgccatgaagttctgaaagagctgggcaccaaagatgacctgctggaagtggctatggagctggaaaacatcgcgctgaacgacccgtactttatcgagaagaaactgtacccgaacgtcgatttctactctggtatcatcctgaaagcgatgggtattccgtcttccatgttcaccgtcattttcgcaatggcacgtaccgttggctggatcgcccactggagcgaaatgcacagtgacggtatgaagattgcccgtccgcgtcagctgtatacaggatatgaaaaacgcgactttaaaagcgatatcaagcgttaa

SEQ ID NO: 459750 - DNA, 405 bp, Shigella boydii
atgtgggcgttattcatgataagaaatgtgaaaaaacaaagacctgttaatctggacctacagaccatccggttccccatcacggcgatagcgtccattctccatcgcgtttccggtgtgatcacctttgttgcagtgggcatcctgctgtggcttctgggtaccagcctctcttcccctgaaggtttcgagcaagcttccgcgattatgggcagcttcttcgtcaaatttatcatgtggggcatccttaccgctctggcgtatcacgtcgtcgtaggtattcgccacatgatgatggattttggctatctggaagaaacattcgaagcgggtaaacgctccgccaaaatctcctttgttattactgtcgtgctttcacttctcgcaggagtcctcgtatggtaa

SEQ ID NO: 459751 - DNA, 348 bp, Shigella boydii
atggtaagcaacgcctccgcattaggacgcaatggcgtacatgatttcatcctcgttcgcgctaccgctatcgtcctgacgctctacatcatttatatggtcggttttttcgccaccagtggcgaactgacatatgaagtctggatcggtttcttcgcctctgcgttcaccaaagtgttcaccctgctggcgctgttttctatcttgattcatgcctggatcggcatgtggcaggtgttgaccgactacgctaaaccgctggcattgcgcctgatgctgcaactggtgattgtcgttgcactggtggtttacgtgatttatggattcgttgtggtgtggggtgtgtga

SEQ ID NO: 459752 - DNA, 1767 bp, Shigella boydii
atgaaattgccagtcagagaatttgatgcagttgtgattggtgccggtggcgcaggtatgcgcgcggcgctgcaaatttcccagagcggccagacctgtgcgctgctctctaaagtcttcccgacccgttcccataccgtttctgcgcaaggcggcattaccgttgcgctgggtaatacccatgaagataactgggaatggcatatgtacgacaccgtaaaagggtcggactatatcggtgaccaggacgcgattgaatatatgtgtaaaaccgggccggaagcgattctggaactcgaacacatgggcctgccgttctcgcgtcttgatgatggtcgtatctatcaacgtccgtttggcggtcagtcgaaaaacttcggcggcgagcaggcggcacgcactgcggcggcggctgaccgtaccggtcacgcactgttgcacacgctttatcagcagaacctgaaaaaccacaccaccattttctccgagtggtatgcgctggatctggtgaagaaccaggatggcgcggtggtgggttgtactgcactgtgcatcgaaactggtgaagtggtttatttcaaagcccgcgctaccgtgctggcgactggcggggcagggcgtatttatcagtccaccactaacgcccacattaacactggcgacggcgtcggtatggctatccgcgcaggcgtaccggtgcaggatatggaaatgtggcagttccacccgaccggtattgccggtgcgggcgtactggtcaccgaaggttgccgtggtgaaggcggttatctgctgaacaaacatggcgaacgctttatggagcgttatgcgccgaacgccaaagacctggcgggccgtgatgtggtggcgcgttccatcatgatcgaaatccgtgaaggtcgcggctgtgatggtccgtgggggccacacgcgaaactgaaactcgaccacctgggtaaagaagttctcgaatcccgtctgccgggcatcctggaactctcccgtaccttcgctcacgtcgatccggtgaaagagccgatcccggttatcccaacctgtcattacatgatgggcggtattccgaccaaagtgaccggtcaggcgctgactgtgaatgagaaaggcgaagatgtggttgttccgggactgtttgccgttggtgaaatcgcttgtgtatcggtacacggcgctaaccgtctgggcggcaactcgctgctggacctggtggtctttggtcgtgcggcaggtctgcatctgcaagagtctatcgccgagcagggcgcattgcgcgatgccagcgagtctgatgttgaagcatctctggatcgtctgaaccgctggaacaataatcgtaatggtgaagatccggtggcgattcgtaaagcgctgcaagaatgtatgcagcataacttctcggtcttccgtgaaggtgatgcgatggcgaaagggcttgagcagttgaaagttatccgcgagcgtctgaaaaatgcccgtctggatgacacttccagcgagttcaacacccagcgcgttgagtgcctggaactggataacctgatggaaacggcgtatgcaacggctgtttctgccaacttccgtaccgaaagccgtggcgcgcatagccgcttcgacttcccggatcgtgatgatgaaaactggctgtgccactccctgtatctgccagagtcggaatccatgacgcgccgaagcgtcaacatggaaccgaaactgcgcccggcattcccgccgaagattcgtacttactaa

SEQ ID NO: 459753 - DNA, 717 bp, Shigella boydii
atgagactcgagttttcaatttatcgctataacccggatgttgatgatgctccgcgtatgcaggattacaccctggaagcggaagaaggtcgcgacatgatgctgctggatgcgcttatccagctgaaagagaaagatcccagcctgtcgttccgccgctcctgtcgtgaaggtgtgtgcggttccgacggtctgaacatgaacggcaagaatggtctggcctgtattaccccgatttcggcactcaaccagccgggcaagaagattgtgattcgcccgctgccaggtttaccggtgatccgcgatttggtggtagacatgggacaattctatgcgcaatatgagaaaattaagccttacctgttgaataatggacaaaatccgccagctcgcgagcatttacagatgccagagcagcgcgaaaaactcgacgggctgtatgaatgtattctctgcgcatgttgttcaacctcttgtccgtctttctggtggaatcccgataagtttatcggcccggcaggcttgttagcggcatatcgtttcctgatcgatagccgtgataccgagactgacagccgcctcgacggtttgagcgatgcattcagcgtattccgctgtcacagcatcatgaactgcgtcagtgtatgtccgaaggggctgaacccgacgcgcgccatcggccatatcaagtcgatgttgttgcaacgtaatgcgtaa

SEQ ID NO: 459754 - DNA, 2802 bp, Shigella boydii
atgcagaacagcgctttgaaagcctggttggactcttcttacctctctggcgcaaaccagagctggatagaacagctctatgaagacttcttaaccgatcctgactcggttgacgctaactggcgttcgacgttccagcagttacctggtacgggagtcaaaccggatcaattccactctcaaacgcgtgaatatttccgccgcctggcgaaagacgcttcacgttactcttcaacgatctccgaccctgacaccaatgtgaagcaggttaaagtcctgcagctcattaacgcataccgcttccgtggtcaccagcatgcgaatctcgatccgctgggactgtggcagcaagataaagtggccgatctggatccgtctttccacgatctgaccgaagcagacttccaggaaaccttcaacgtcggttcatttgccagcggcaaagaaaccatgaaactcggcgagctgctggaagccctcaagcaaacctactgcggcccgattggtgccgagtatatgcacatcaccagcaccgaagaaaaacgctggatccaacagcgtatcgagtctggtcgcgcgactttcaatagcgaagagaaaaaacgcttcttaagcgaactgaccgccgctgaaggccttgaacgttacctcggcgcaaaattccctggcgcaaaacgcttctcgctggaaggcggtgacgcgttaatcccgatgcttaaagagatgatccgccacgctggcaacagcggcacccgcgaagtggttctcgggatggcgcaccgtggtcgtctgaacgtgctggtgaacgtgctgggtaaaaaaccgcaagacttgttcgacgagttcgccggtaaacataaagaacacctcggcacgggtgacgtgaaataccacatgggcttctcgtctgacttccagaccgatggcggcctggtgcacctggcgctggcgtttaacccgtctcaccttgagattgtaagcccggtagttatcggttctgttcgtgcccgtctggacagacttgatgagccgagcagcaacaaagtgctgccaatcaccatccacggtgacgccgcagtgaccgggcagggcgtggttcaggaaaccctgaacatgtcgaaagcgcgtggttatgaagttggcggtacggtacgtatcgttatcaacaaccaggttggtttcaccacctctaatccgctggatgcccgttctacgccgtactgtactgatatcggtaagatggttcaggccccgattttccacgttaacgcggacgatccggaagccgttgcctttgtgacccgtctggcgctcgatttccgtaacacctttaaacgtgatgtcttcatcgacctggtgtgctaccgccgtcacggccacaacgaagccgacgagccgagcgcaacccagccgctgatgtatcagaaaatcaaaaaacatccgacaccgcgcaaaatctacgctgacaagctggagcaggaaaaagtggcgacgctggaagatgccaccgagatggttaacctgtaccgcgatgcgctggatgctggcgattgcgtagtggcagagtggcgtccgatgaacatgcactctttcacctggtcgccgtacctcaaccacgaatgggacgaagagtacccgaacaaagttgagatgaagcgcctgcaggagctggcgaaacgcatcagcacggtgccggaagcagttgaaatgcagtctcgcgttgccaagatttatggcgatcgccaggcgatggctgccggtgagaaactgttcgactggggcggtgcggaaaacctcgcttacgccacgctggttgacgaaggcattccggttcgcctgtcgggtgaagactccggtcgcggtaccttcttccaccgccacgcggtgatccacaaccagtctaacggttccacttacacgccgctgcaacacatccataacgggcagggcgcgttccgcgtctgggactccgtactgtctgaagaagcagtgctggcgtttgaatacggttatgccaccgcagaaccacgcactctgaccatctgggaagcgcagttcggtgacttcgctaacggtgctcaggtggttatcgaccagttcatctcctctggcgaacagaaatggggccggatgtgtggtctggtgatgttgctgccgcacggttatgaagggcaggggccggagcactcctccgcgcgtctggaacgttatctgcaactttgtgctgagcaaaacatgcaggtgtgcgtaccgtctaccccggcacaggtttaccacatgctgcgtcgtcaggcgctgcgcgggatgcgtcgtccgctggtcgtgatgtcgccgaaatccctgctgcgtcatccgctggcggtttccagcctcgaagaactggcgaacggcaccttcctgccagccatcggtgaaatcgacgagcttgatccgaagggcgtgaagcgcgtagtgatgtgttctggtaaggtttattacgacctgctggaacagcgtcgtaagaacaatcaacacgatgtcgccattgtgcgtatcgagcaactctacccgttcccgcataaagcgatgcaggaagtgttgcagcagtttgctcacgtcaaggattttgtctggtgccaggaagagccgctcaaccagggcgcatggtactgcagccagcatcatttccgtgaagtgattccgtttggggcttctctgcgttatgcaggccgcccggcctccgcctctccggcggtagggtatatgtccgttcaccagaaacagcaacaagatctggttaatgacgcgctgaacgtcgaataa

SEQ ID NO: 459755 - DNA, 1218 bp, Shigella boydii
atgagtagcgtagatattctggtccctgacctgcctgaatccgtagccgatgccaccgtcgcaacctggcataaaaaacccggcgacgcagtcgtacgtgatgaagtgctggtagaaatcgaaactgacaaagtggtactggaagtaccggcatcagcagacggcattctggatgcggttctggaagatgaaggtacaaccgtaacgtctcgtcagatccttggtcgcctgcgtgaaggcaacagcgccggtaaagaaaccagcgccaaatctgaagagaaagcgtccactccggcgcaacgccagcaggcgtctctggaagagcaaaacaacgatgcgttaagcccggcgatccgtcgcttgctggctgaacataacctcgacgccagcgctattaaaggcaccggcgtgggtggtcgtctgacccgtgaagatgtggaaaaacatctggcgaaatccccggcgaaagagtctgcaccggcagcggctgctccggcggcgcaaccggctctggctgcacgtagtgaaaaacgtgtcccgatgactcgcctgcgtaagcgtgtggcagagcgtctgctggaagcgaaaaactccaccgccatgctgaccacgttcaacgaagtcaacatgaagccgattatggatctgcgtaagcagtacggtgaagcgtttgaaaaacgccacggcatccgtctgggctttatgtccttctacgtgaaagcggtggttgaagccctgaaacgttacccggaagtgaatgcttctatcgacggcgatgacgtggtttaccacaactatttcgacgtcagcatggcggtttctacgccgcgcggcctggtgacgccggttctgcgtgatgtcgataccctcggcatggcagacatcgagaagaaaatcaaagagctggcagtcaaaggccgtgatggcaagctgaccgttgaagatctgaccggtggtaacttcaccatcaccaacggtggtgtgttcggttccctgatgtctacgccgatcatcaacccgccgcagagcgcaattctgggtatgcacgctatcaaagatcgtccgatggcggtgaatggtcaggttgagatcctgccgatgatgtacctggcgctgtcctacgatcaccgtctgatcgatggtcgcgaatccgtgggcttcctggtaacgatcaaagagttgctggaagatccgacgcgtctgctgctggacgtgtag

SEQ ID NO: 459756 - DNA, 1167 bp, Shigella boydii
atgaacttacatgaatatcaggcaaaacaactttttgcccgctatggcttaccagcaccggtgggttatgcctgtactactccgcgcgaagcagaagaagccgcttcaaaaatcggtgccggtccgtgggtagtgaaatgtcaggttcacgctggtggccgcggtaaagcgggcggtgtgaaagttgtaaacagcaaagaagacatccgtgcttttgcagaaaattggctcggcaagcgtctggtaacgtatcaaacagatgccaatggccaaccggttaaccagattctggttgaagcagcgaccgatattgctaaagagctgtatctcggtgccgttgtagaccgtagttcccgtcgtgtggtctttatggcctccactgaaggcggcgtggaaatcgaaaaagtggcggaagaaactccgcagctgatccataaagttgcgcttgatccgctgacaggcccgatgccgtatcagggacgcgagctggcgttcaaactgggtctggaaggtaaactggttcagcagttcaccaaaatcttcatgggtctggcgaccattttcctagagcgcgacctggcgttgatcgaaatcaacccgctggtcatcaccaaacagggtgatctgatttgcctcgacggcaaactgggcgctgatggcaacgcactgttccgccagcttgatctgcgcgaaatgcgtgaccagtcgcaggaagatccgcgtgaagcacaggctgcacagtgggaactgaactacgttgcgctggacggtaacatcggttgtatggttaacggcgcaggtctggcgatgggtacgatggacatcgttaaactgcacggcggcgaaccggctaacttccttgacgttggcggcggcgcaaccaaagaacgtgtaaccgaagcgttcaaaatcatcctctctgacgacaaagtgaaagtcgttctggttaacatcttcggcggtatcgttcgttgcgacctgatcgctgacggtatcatcggcgcggtagcagaagtgggtgttaacgtaccggtcgtggtacgtctggaaggtaacaacgccgaactcggcgcgaagaaactggctgacagcggcctgaatattattgcagcaaaaggtctgacggatgcagctcagcaggttgttgccgcagtggaggggaaataa

SEQ ID NO: 459757 - DNA, 870 bp, Shigella boydii
atgtccattttaattgataaaaacaccaaggttatctgccagggctttactggtagccaggggactttccactcagaacaggccattgcatacggcactaaaatggttggcggcgtaaccccaggtaaaggcggtactacccacctcggcctgccggtgttcaacaccgtgcgtgaagctgttgctgctactggcgctaccgcttctgttatctacgtaccagcaccgttctgcaaagactccattctggaagctattgatgcaggcatcaaactgattatcaccatcactgaaggcatcccgacgctggatatgctgactgtgaaagtgaaactggacgaagccggcgttcgtatgatcggcccgaactgcccgggcgttatcactccgggtgaatgcaaaatcggtatccagccgggtcacattcacaaaccgggtaaagtgggtatcgtttcccgttccggtacactgacctatgaagcggttaaacagaccacggattacggtttcggtcagtcgacctgtgttggtatcggcggtgacccgatcccaggctctaactttatcgacatcctcgaaatgttcgaaaaagatccgcagaccgaagcgatcgtgatgatcggtgagatcggcggtagcgctgaagaagaagcggcagcgtacatcaaagagcacgttaccaagccagttgtaggttacatcgctggtgtgactgcgccgaaaggcaaacgtatgggccacgcgggtgcgatcattgccggtgggaaagggactgcggatgagaaattcgctgctctggaagccgcaggcgtgaaaaccgttcgcagcctggcggatatcggtgaagcactgaaaactgttctgaaataa

SEQ ID NO: 459758 - DNA, 723 bp, Shigella boydii
atgggacacaagcccttataccggcagattgccgatcgcattcgtgaacaaattgcgcgtggcgagcttaaacctggcgatgcgttacccactgaatcagcgctacaaacagagtttggcgtcagccgggttacggtgcgtcaggctttgcgccagctagtcgagcagcagatcctcgaaagcattcagggcagcgggacttacgtcaaagaagagcgggtcaattacgatatttttcagttaaccagttttgatgaaaaactgtcggaccgtcacgtcgatacacacagtgaagtcctgatatttgaagtgattccggctgacgattttcttcagcaacagctacaaatcaccgcgcaggatcgtgtgtggcatgtgaagcgcgtgcgctatcgcaagcaaaagccaatggcgctggaagaaacctggatgccgcttgcgttgttcccggatctcacctggcaggtcatggaaaattcgaaatatcactttattgaagaagtgaagaagatggttatcgatcgtagcgaacaggaaatcattcctctgatgccaaccgaagagatgagccgtctgcttaatatcagccagacaaagccgattcttgaaaaaatatcgcgtggatatttagttgatggtcgggtgtttgaatatagccgcaacgcttttaataccgatgactataaatttaccctgatagcgcagcgaaaatcatcgcgataa

SEQ ID NO: 459759 - DNA, 1917 bp, Shigella boydii
atgaatctgacgactctgacccaccgcgatgcgttgcgtctgaatgcgcgctttaccagccgtgaagaggccatccacgcgttgactcaacgtcttgctgctctggggaaaatttccagtactgagcaatttctggaagaagtgtatcgccgtgaaagccttggcccgaccgccttaggtgaagggttggctgtgccgcatggcaaaactgctgcggtaaaagaagcggcgtttgcggtcgccacactcagcgagccgcttcagtgggaaggcgttgatggcccggaagcagttgatttagtggtgctgctggcgattccccccaatgaagcgggtactatgcatatgcaactgctgacagcgctgaccacgcgccttgcggatgatgagattcgggcgcgtatacagtcggcgacgacgcctgatgagttgctctcggcgctggatgacaagggaggcacgcaaccttctgcctctttttccaacgcgccaactatcgtctgcgtaacggcctgtccggcgggtattgctcacacctatatggctgcggaatatctggaaaaagccggacgcaaactcggcgtaaatgtttacgttgaaaaacaaggcgctaacggcattgaagggcgtttaacggcggatcaactcaatagtgcaaccgcctgtatttttgcggctgaagtcgccatcaaggagagtgagcgttttaatggcattcccgcgctttcagtgcctgttgccgagccgattcgccatgcagaagcgttgatccaacaagcgcttaccctcaagcgtagcgatgagacgcgtaccgtacagcaagatacgcaaccggtgaaaagtgtcaaaacggagctgaaacaggcactgttgagcggaatctcttttgccgtaccgttgattgtcgcggggggcacggtgctggcggtcgcggtattactgtcgcaaatcttcgggctacaagatctgtttaatgaagaaaactcctggctgtggatgtaccgcaagctgggcggcgggctgctcggaattttgatggtaccggtgctcgcggcctataccgcctattctctggcagataaaccggcgttagcgccaggctttgcggctggacttgccgccaacatgatcggctccgggtttctcggcgcggttgttggcggattgatagccggttacttgatgcgctgggtgaaaaatcacttgcgtcttagcagtaaattcaatggattcctgactttttatctctacccggtgctcggtacgttgggagcgggcagtctgatgctgtttgtggtgggagaacctgtcgcatggatcaataactcgcttaccgcctggctgaacggtctgtcaggaagtaacgcgctgttgctgggtgccattttcggttttatgtgttcctttgaccttggagggccagtgaacaaagccgcttatgcattctgcctgggcgcaatggcgaacggcgtttacggcccgtatgccattttcgcctccgtcaaaatggtttcggcatttaccgtaaccgcttccacgatgctcgcaccgcgcctgtttaaagagtttgaaattgagaccgggaaatccacctggctgttagggctggcaggtattaccgaaggggcgatcccgatggcgattgaagatccgctgcgggttattggttcgtttgtgctgggctctatggtaacgggcgctattgtcggtgcgatgaatatcggcctttcgacacccggtgccggcattttctcgctctttttacttcatgataatggcgcgggcggtgttatggcggcaattggctggtttggtgcggcattggtgggggctgcaatctcgactgcaattctcctgatctggcggcgtcacgcggttaagcatggcaactatctgactgatggcgtaatgccataa

SEQ ID NO: 459760 - DNA, 903 bp, Shigella boydii
atgaaaaaaacgctcgcaacgttatttttattaacgtgtctgggatcatcatccgcctatgcggataacgctttgattttacaaactgattttagcctgaaagatggtgccgtctcggcgatgaaaggggtcgcattcggcgttgaccataatcttaaaatctttgatttaacacacgaaattccaccgtataacatctgggaaggcgcttatcgcctgtatcagactgccagttactggccgcaaggttcggtgtttgttagcgtggtcgatccgggcgtaggcactgaccgtaaatcggtagtgctgaaaaccaaaaacggtcaatacttcgtttcaccagataacggtacgctcactttggtggcacaaactctgggtattgatagcgtccgggaaatcgacgaaaaagctaaccgcctgaaaggttctgaaaagtcatataccttccacggtcgtgacgtgtatgcctacaccggtgcacgtctggcttccggggcgattacgttcgaacaggtggggccagagcttccagcaaaagttgtcgaactttcttatcagaaagcaaaagcaacaaaaggtgaagtgaagggcaatatcccgattctcgatattcagtacggcaacgtctggagcaatatcagcgacgagttgctgaatcaggcagaaatcaaactcaacgacacgttgtgtgtgaccatttccgaaggttcccagcaaaaatacgcagggaaaatgccgtatgtcgcaagcttcggcgatgtgccggaaggccagccgatggtgtatctgaacagcttattgaatgtttccgtggcgctgaatatggataatttcgcgcagaaacatcaggttgcgtctggtgctgactggaatattgatgtgaagaagtgcgctaagtaa

SEQ ID NO: 459761 - DNA, 2163 bp, Shigella boydii
atggacgtttcttacctgctcgacagccttaatgacaaacagcgcgaagcggtggccgcgccacgcagcaaccttctggtgctggcgggcgcgggcagtggtaagacgcgcgtactggtgcatcgtatcgcctggctgatgagcgtggaaaactgctcgccatactcgattatggcggtgacgtttaccaacaaagcggcggcggagatgcgtcatcgtatcgggcagctaatgggcaccagccagggcggcatgtgggtcggcaccttccacgggctggcgcaccgtctgctgcgtgcgcaccatatggacgccaatctgccgcaggattttcagatcctcgacagcgaggaccagctacgcctgctcaaacgcctaatcaaggcgatgaacctcgacgagaagcagtggccgccgcgccaggcaatgtggtacatcaacagccagaaagatgaaggcctgcgtccacatcatattcaaagctacggtaatccggtggagcagacctggcagaaggtgtatcaggcgtatcaggaagcgtgtgaccgcgcgggcctggtggacttcgccgagctgctgctgcgcgctcacgagttgtggcttaacaagccgcatatcctgcaacactaccgcgaacgttttaccaatatcctagtggacgaattccaggataccaacaacattcagtacgcgtggatccgcctgctggcgggcgacaccggcaaagtgatgatcgtcggtgatgacgaccagtcaatctacggctggcgcggggcgcaggtggagaatattcagcgtttccttaatgatttccccggtgccgaaactattcgtctggagcaaaactaccgctctaccagcaatattctgagcgccgctaacgccctgattgaaaacaataacgggcgtctgggtaaaaaactgtggaccgatggcgcggacggtgagcctatttccctctattgcgcttttaacgaactcgatgaagcgcgttttgtggttaaccgcatcaaaacctggcaggacaacggcggggcgcttgccgagtgcgccattctctaccgcagtaacgcccagtcgcgtgtgctggaagaagcactgttgcaggcgagtatgccgtaccgtatttacggcgggatgcgcttcttcgaacgccaggaaatcaaagatgcgctctcgtatctgcgcctgattgccaaccgtaacgacgacgcggcctttgagcgtgtggtgaatacgccaacgcggggtattggtgaccggacgctggacgtggtacgtcagacatcgcgcgatcgccagttaacactctggcaggcatgtcgtgaactgttgcaggaaaaagccctcgccggacgtgctgccagcgccttacagcggtttatggaactgatcgacgccttagcgcaggaaactgccgatatgccgctgcatgtacagactgaccgggtaattaaagactccggcctgcgtaccatgtacgagcaggagaagggcgaaaaaggtcagacgcgtatcgaaaacttagaggaactggtgacggcaacgcgccagttcagctacaacgaagaagacgaagatttaatgccgctgcaggcgttcctatcccatgcggcgctggaagcaggcgaagggcaggcggatacctggcaggatgcggtacaactgatgaccatgcactcggcgaaaggtctggagttcccgcaggtgtttatcgtcggtatggaagagggcatgttcccaagccagatgtcgctggatgaaggcgggcgtctggaagaagaacgccgtctggcctacgttggcgtaacccgcgcgatgcagaaactgacgctgacctacgcggaaactcgccgtctgtatggcaaagaggtttaccatcgcccgtcgcgctttattggcgagctgccggaagagtgtgtggaagaggtgcgcctgcgcgccacggtaagccgcccggtcagccatcagcggatgggtacgccgatggtcgagaacgacagcggctacaagctcggccagcgtgtacgccacgctaagtttggtgaaggcaccatcgtcaatatggaaggcagcggtgaacatagccgtttgcaggtggcattccagggccagggtattaaatggctggtggcggcttatgcccggttggagacggtgtga

SEQ ID NO: 459762 - DNA, 717 bp, Shigella boydii
atgcgtttttaccggcctttggggcgcatctcggcgctcacctttgacctggatgataccctttacgataaccgtccggtgattttgcgcaccgagcgagaggcgcttacctttgtgcaaaattatcatccggcgctgcgcagcttccagaatgaagatctgcaacgcctgcgccaggcggtacgggaagcggaacccgagatttatcacgacgtgacgcgctggcgttttcgttcgattgaacaagcgatgctcgacgccgggctgagtgccgaagaagccagtgcaggcgcacacgcagcaatgatcaactttgccaaatggcgcagccgaatcgacgtcccgcagcaaactcacgacaccttaaaacagctggcgaagaaatggccgctggtggcgatcaccaacggtaacgcccagccggaactgtttggtttgggggattattttgagtttgtgctgcgcgctggcccgcacgggcgctcaaaaccgttcagcgatatgtactttctggctgcggaaaaactcaacgtgccgatcggcgagatcttacatgttggggacgatctcaccactgacgtgggtggggcaattcgcagcggaatgcaggcctgttggatcagaccggaaaatggcgatctgatgcaaacctgggacagccgtttactgccgcatctggaaatttcccggttggcatctctgacctcgctgatataa

SEQ ID NO: 459763 - DNA, 897 bp, Shigella boydii
atgaccgatttacacaccgatgtagaacgctacctacgttatctgagcgtggagcgccagcttagcccgataaccctgcttaactaccagcgtcagcttgaggcgatcatcaattttgccagcgaaaacggcctgcaaagctggcagcaatgtgatgtgacgatggtgcgcaattttgctgtacgcagtcgccgtaaagggctgggagcagcaagtctggcgttacggctttctgcgctacgtagcttttttgactggctggtcagccagaacgaactcaaagctaacccggcgaaaggtgtttcggcaccgaaagcgccgcgtcatctgccgaaaaatatcgacgtcgacgatatgaatcggctgctggatattgatatcaacgatcccctcgctgtacgcgaccgtgcaatgctggaagtgatgtacggcgctggtctgcgtctttccgagctggtggggctggatatcaaacacctcgacctggagtctggtgaagtgtgggtaatggggaaaggcagcaaagagcgccgcctgccgattggtcgcaacgctgtggcgtggattgagcactggcttgatttgcgcgacctgtttggtagcgaagacgacgcgctttttctgtcgaaactgggcaagcgtatctccgcgcgtaatgtgcagaaacgctttgccgaatggggcataaaacaagggctgaataatcacgttcacccacataaattacgtcactcgttcgctacgcatatgctggagtcgagcggcgatcttcgtggtgtgcaggagctactgggtcatgccaacctctccaccacgcaaatctatactcatcttgattttcaacaccttgcctcggtgtacgatgcggcgcatccacgcgccaaacgggggaaataa

SEQ ID NO: 459764 - DNA, 708 bp, Shigella boydii
atgaagcaaccaggggaagaactgcaggaaacactcacggagcttgatgaccgggcggttgtcgattatctgattaaaaatcctgagttttttatccgtaatgcgcgcgcagtagaagcgatacgtgtgccgcatccggtacgcggcaccgtttcgttggtcgagtggcacatggcccgcgcacgtaatcatattcatgttctggaagagaacatggcgctgttgatggaacaggctatcgccaacgaaggcctgttttatcgcctactctacctgcagcgcagtctcaccgccgccagcagtctcgacgatatgctgatgcgctttcaccgctgggcgcgcgatctcggcctggcaggtgcgagtctgcgcctgtttccggatcgctggcgcttaggtgcgccgtcgaaccacactcatctggcattaagccgtcagtctttcgaaccgctgcgtattcagcgtttggggcaggaacagcactatcttgggccgcttaacggaccagagctgctggtggtgctaccggaagcgaaagcggtgggatcggtggcgatgtcgatgctgggaagcgatgctgatttgggtgtcgtgctgtttaccagtcgcgatgccagtcactatcaacaagggcaaggaacgcagttacttcatgaaattgcgctgatgttgccggagcttctggagcgttggattgaacgcgtatga

SEQ ID NO: 459765 - DNA, 825 bp, Shigella boydii
atgcagttctcgaaaatgcatggccttggcaacgattttatggtcgtcgacgcggtaacgcagaatgtctttttttcaccggagctgattcgtcggctggcggatcggcacctgggggtagggtttgaccagctgctggtgattgagccgccgtatgatcctgaactggattttcactatcgcattttcaatgctgatggcagtgaagtggcgcagtgcggcaacggtgcgcgctgctttgcccgttttgtgcgcctgaaagggctgaccaataagcgcgatatccgcgtcagcaccgccaacgggcggatggttctgaccgtcaccgatgatgatctggtccgcgtaaatatgggcgaacccaacttcgaaccttccgctgtgccgtttcgcgctaacaaagcggaaaagacctatattatgcgcgccgccgagcagacaatcttatgcggcgtggtgtcgatgggaaatccgcattgcgtgattcaggtcgatgatgtcgataccgcggcggtagaaacgcttggtcctgttctggaaagccacgagcgttttccggagcgcgccaatatcggttttatgcaagtggttaagcgcgagcatattcgtttacgcgtttatgagcgtggggcaggagaaacccaggcctgcggcagcggcgcgtgtgcggcggttgcagtagggattcagcaaggtttgctggccgaagaagtacgcgtggaactccccggcggtcgtcttgatatcgcctggaaaggtccgggtcacccgttatatatgactggcccggcggtacatgtctatgacggatttattcatctatga

SEQ ID NO: 459766 - DNA, 204 bp, Shigella boydii
atgaaaaacgtgtttaaggtactcactgtattacttactctcttcagcctgacgggctgcggtctgaaaggtccgctctatttcccgcctgcagataaaaatgcaccgccgccgaccaaaccggtagagacgcaaacgcaatccacggtgccggataaaaacgatcgcgccactggcgatggtccatcccaggtgaattactaa

SEQ ID NO: 459767 - DNA, 321 bp, Shigella boydii
atgaacgacagtgaatttcatcgcctggctgatcaactgtggctgaccattgaagagcatctggacgactgggatggcgacagcgatatcgactgcgaaatcaacggcggcgtgctgaccattacctttgaaaacggcagcaaaatcattatcaaccgccaggaaccgctgcaccaggtatggctggcaaccaaacaaggcggctaccattttgatctgaaaggcgatgagtggatttgcgatcgcagcggcgaaaccttctgggatttgctggaacaggcggcgacgcagcaggcgggtgaaacagtcagtttccgctaa

SEQ ID NO: 459768 - DNA, 2547 bp, Shigella boydii
ttgtacctctatattgagactctgaaacagagactggatgccataaatcaattgcgtgtggatcgcgcgcttgctgctatggggcctgcattccaacaggtctacagtctactgccgacattgttgcactatcaccatccgctaatgccgggttaccttgatggtaacgttcccaaaggcatttgcctttacacgcctgatgaaactcaacgccactacctgaacgagcttgaactgtatcgtggaatgtcagtacaggatccaccgaaaggtgagcttccaattactggtgtatacaccatgggcagcacctcgtccgtagggcaaagttgttcctctgacctggatatctgggtctgtcatcaatcctggctcgatagcgaagagcgccagttactacaacgtaaatgtagtctgctggaaagctgggccgcctcgctgggtgtggaagtcagcttcttcctgattgatgaaaaccgcttccgtcataatgaaagcggcagcctggggggcgaagattgtggctccacccagcatatactgctgcttgacgaattttatcgtaccgccgtgcgtctcgccggtaagcgtattctgtggaatatggtgccgtgcgacgaagaagagcattacgacgactatgtgatgacgctttacgcgcagggcgtgctgacgccaaatgaatggctggatctcggtggcttaagctcgctttctgctgaagagtactttggtgccagcctttggcagctctacaagagtatcgattccccatacaaagcggtactgaaaacactgctgctggaagcctattcctgggaatacccgaacccacgtctgctggcgaaagatatcaaacagcgtttgcacgacggtgagattgtatcgtttggtctcgatccatactgcatgatgctggagcgtgttactgaatacctgacggcgattgaagattttacccgtctggatttagtacgtcgctgcttctatttaaaagtgtgcgaaaagctcagccgtgaacgcgcctgcgtaggctggcgtcgcgcagtgttgagccagttagtgagcgagtggggttgggacgaagctcgtctggcaatgctcgataaccgcgctaactggaagattgatcaggtgcgtgaggcgcacaacgagttgctcgacgcgatgatgcagagctaccgtaatctgatccgctttgcgcgtcgcaataaccttagcgtctccgccagtccgcaggatatcggcgtgctgacgcgtaagctgtatgccgcgtttgaagcattaccaggtaaagtgacgctggtaaacccgcagatttcacccgatctctcggaaccgaatctgacctttatttatgtgccgccgggccgtgctaaccgttcaggttggtatctgtataaccgcgcgccaaatattgagtcgatcatcagccatcagccgctggaatataaccgttacctgaacaaactggtggcgtgggcatggtttaacggcctgctgacctcgcgcacccgtttgtatattaaaggtaacggcattgtcgatttgcctaagttgcaggagatggtcgccgacgtgtcgcaccatttcccgctgcgcttacctgcaccgacaccgaaggcgctctacagcccgtgtgagatccgccatctggcgattatcgttaacctggaatatgacccgacagcggcgttccgcaatcaggtggtgcattttgatttccgtaagctggatgtcttcagctttggcgagaatcaaaattgcctggtaggtagcgttgacctgctgtaccgcaactcgtggaacgaagtgcgtacgctgcacttcaacggcgagcaatcgatgatcgaagccctgaaaactattctcggcaaaatgcatcaggacgccgcaccgccagatagcgtggaagtcttctgttatagccagcatctgcgcgggttaatccgtactcgcgtgcagcaactggtttctgagtgtattgaactgcgcctttccagcacccgccaggaaaccgggcgtttcaaggcgctgcgcgtttctggtcaaacctggggcttgttcttcgaacgcctgaatgtatcggtacagaagctggagaacgccatcgagttttatggcgctatttcgcataacaaactgcacggcctgtcagtgcaggttgaaaccaatcacgtcaaattaccggcggtggtggacggctttgctagtgaagggatcatccagttcttcttcgaagaaacgcaagacgagaatggctttaatatctacattcttgacgaaagcaaccgggttgaggtgtatcaccactgcgaaggcagcaaagaggaactggtgcgtgacgtcagtcgcttctactcgtcatcgcacgaccgcttcacctacggctcaagcttcatcaacttcaacctgccgcagttctatcagattgtgaaggttgatggtcgtgaacaggtgattccgttccgcacaaaatctatcggtaacatgccgcctgccaatcaggatcacgatacgccgctattacagcaatatttttcgtga

SEQ ID NO: 459769 - DNA, 963 bp, Shigella boydii
atgataatgacggtaacaagcatgttagacaatgttttaagaattgccacacgccaaagcccacttgcactctggcaggcacactatgtcaaagacaagttgatgacgagccatccgggcctggtcgttgaactggtaccgatggtgacgcgcggcgatgtgattcttgatacgccgctggcgaaagtaggcggaaaaggcttatttgtaaaagagctggaagtcgcgctcctcgaaaatcgcgccgatatcgccgtacattcaatgaaagatgtgccggttgaattcccgcaaggtctgggactggtcactatttgtgagcgtgaagatcctcgcgatgcctttgtgtccaataactatgacagtctggatgcgttaccagcaggcagtatcgtcgggacgtccagtttacgtcgccagtgccaactggctgaacgccgcccggatctgattatccgctccctgcgcggcaacgtcggcactcgcctgagcaaactagataacggcgaatacgatgccatcattcttgctgtagccggactaaaacgtttaggtctggagtcccgcattcgcgccgcgttaccacccgagatttctcttccagcggtaggacaaggtgcggtcggtattgaatgccgccttgatgatgcacgcactcgcgagctgcttgccgcgctgaatcaccacgaaactgcactgcgcgttaccgcagaacgcgccatgaatacccgtctcgaaggcggatgtcaggtgccaattggtagctacgccgagcttattgatggtgaaatctggctgcgtgcgctggtcggcgcgccggacggttcgcagattattcgcggtgaacgccgcggtgcgccgcaagatgccgaacaaatggggatttcgctggcagaagagctactgaataacggcgcgcgcgagatcctcgctgaagtctataacggagacgccccggcatga

SEQ ID NO: 459770 - DNA, 741 bp, Shigella boydii
atgagtatcctggtcacccgcccgtctcccgctggagaagagttagtgagccgtctgcgcacactggggcaggtggcctggcattttccgctgattgagttttctccgggtcgacaattaccacaacttgctgatcaactggcggcgctgggggagagcgatctgttgtttgccctctcgcaacacgcggttgcttttgcccaatcacagctgcatcagcaagatcgtaaatggccccgactacctgattatttcgccattggacgcaccaccgcactggcgctacataccgtaagcggacagaagattctctacccgcaggatcgggaaatcagcgaagtcttgctacaattacctgaattacaaaatattgcgggcaaacgtgcgctgatattacgtggcaatggcggtcgtgagctaattggggataccctgacagcgcgcggtgctgaggtcactttttgtaaatgttatcaacgatgcgcaatccattacgatggtgcagaagaagcgatgcgctggcaatcccgcgaggtgacgatggtcgttgttaccagcggtgaaatgttgcagcaactctggtcgctgatcccacaatggtatcgtgagcactggttactacgctgtcgactattggtcgtcagtgagcgtttggcgaaactcgcccgggaactgggctggcaagacattaaggtcgccgataacgctgacaacgatgcgcttttacgggcattacaataa

SEQ ID NO: 459771 - DNA, 1218 bp, Shigella boydii
atgacggaacaagaaaaaacctccgccgtggttgaagagaccagggaggccgtggacaccacgtcacaacctgtcgcaacagaaaaaaagagtaagaacaataccgcattgattctcagcgcggtggctatcgctattgctctggcggcgggcgtcggtttgtatggctggggtaaacaacaggccgtcaatcagaccgccaccagcgatgccctggctaaccaactgacggcattgcaaaaagcccaggagagccaaaaagccgagctggaaggcattattaagcaacaagctgcacagcttaagcaggcgaatcgtcagcaagaaacgctggcaaaacagttggatgaagtccaacaaaaggtcgccaccatttccggcagcgatgctaaaacctggctgctggctcaggccgattttctggtgaaactcgccggacggaagctgtggagcgatcaggacgtcacgaccgctgcagcgttgctgaaaagtgcagatgccagcctggcggatatgaatgacccgagtctgattaccgttcgtcgggcaattaccgatgatatcgccagcctttctgcagtttcgcaggtggattatgacggcatcatccttaagcttaatcagctttcaaatcaggtagataacctgcgtctggccgataatgacagcgatggttcgccgatggattccgacggtgaagagctttccagttccatcagcgaatggcgtatcaatctgcaaaaaagctggcagaactttatggacaacttcattacgattcgccgtcgtgatgacaccgccgtaccgctgttagcgccaaatcaggatatctatctgcgcgaaaatattcgctctcgcctgctggtcgcagcacaagctgtaccgcgtcaccaggaagagacttatcgccaggcgctggagaacgtctccacctgggtacgtgcttactacgatactgatgatgccaccaccaaagcgttcctcgacgaggtggaccagttaagccagcaaaatatctcgatggatcttccggaaaccctgcaaagccaggcgatgctggaaaaactgatgcagactcgcgtgcgtaacctgctggcacaaccggcagcagggacaacggaagctaaacctgcacctgcgcctgcacctgcacctgcacctgcacctgcacctgcaccgcaaggtgatactccggcagccgcgccgcaaggagaataa

SEQ ID NO: 459772 - DNA, 1197 bp, Shigella boydii
atgctaaaagtgttattactctttgttttgctgattgcggggatagtggttggcccgatgattgccggtcatcagggttatgtgctgatccagaccgacaactacaatatcgaaaccagcgtcacgggcctggcgatcatattgattctggcgatggtagtgctgtttgccattgagtggctactgcggcggatcttccgcactggcgcgcacacccgtgggtggtttgtcgggcgtaagcgtcgccgtgcacgtaagcagaccgaacaggcgctgctgaaactggcggaaggcgattatcagcaagttgaaaagctgatggcgaaaaatgccgatcacgctgaacaaccggtggtgaactatctactggctgccgaagccgcgcaacaacgtggtgatgaagcgcgcgccaaccaacatctggaacgcgcagcggagctggccggcaatgacaccattccggtagaaatcacccgtgtacgtctgcaactggcccgtaatgaaaaccatgctgcacgccacggcgtggataagctgctggaagttacgccacgccatccggaagtattacgtctggcggaacaggcgtatatccgcacaggtgcatggagttctctgctggatatcatcccatcaatggcgaaagcccatgttggtgatgaagaacatcgtgcaatgctggaacaacaggcatggattggcctgatggatcaggcgcgtgccgataacggtagtgaaggtttgcgtaactggtggaaaaaccaaagccggaaaacgcgtcatcaagtagcgttgcaggtggcaatggcggaacatcttattgaatgtgacgatcatgatactgcccagcaaattatcatcgatggcctgaaacgccagtacgacgatcgcctactgctgccgattcctcgactgaaaaccaacaatccggaacagctggaaaaagtgctgcgccagcagatcaaaaacgtcggcgatcgcccgctgttgtggagcacactgggccagtcactgatgaagcacggagaatggcaggaagcatcgctcgccttccgcgcagcgctgaaacaacgtccggacgcctacgattacgcatggcttgccgacgcgctggacagactgcacaagccggaagaagctgcagcgatgcgtcgcgacggtttgatgttaacgttgcagaacaacccaccacagtag

SEQ ID NO: 459773 - DNA, 426 bp, Shigella boydii
atgagcaacattaccatttatcacaacccggcctgcggcacgtcgcgtaatacgctggagatgatccgcaacagcggcacagaaccgaccattatccattatctggaaactccgccaacgcgcgatgaactggtcaaactcattgccgatatggggatttccgtacgcgcgctgctgcgtaaaaacgtcgaaccgtatgaggagctgggccttgcggaagataaatttactgacgatcggttaatcgactttatgcttcagcacccgattctgattaatcgcccgattgtggtgacgccgctgggaactcgcctgtgccgcccttcagaagtggtgctggaaattctgccagatgcgcaaaaaggcgcattctccaaggaagatggcgagaaagtggttgatgaagcgggtaagcgcctgaaataa

SEQ ID NO: 459774 - DNA, 1290 bp, Shigella boydii
atgttactggcaggcgctatctttgtcctgaccattgtattggttatctggcagccgaaaggtttaggcatcggctggagtgcaacgctcggcgcagtactggcgttagttacgggcgtggtccatccgggtgatattccggtggtgtggaatatcgtctggaacgcgacggctgcgtttattgccgtcattatcatcagcctgctgctggatgagtccggcttttttgaatgggcggcgctgcacgtctcacgctggggtaatggtcgtggtcgcttgctgtttacctggattgtcctgctcggtgctgccgttgccgccctgtttgccaatgatggcgcagcgcttattttgacgccgattgtcatcgccatgctgctggctttaggattcagtaaaggcacgacgctggcgttcgtgatggcggccggattcattgccgataccgccagcctgccgcttattgtctccaacttggtgaatatcgtttccgctgatttctttggcctcggctttcgcgaatacgcctcggtgatggtgccggtggatatcgccgcgattgttgccacgctggtgatgctacatctctattttcgcaaagatattccgcagaactacgatatggcgctgctgaaatctcccgcagaagcgatcaaagatcctgctacgttcaaaactggctgggttgttttactgcttctgctggtgggatttttcgtcctggaaccgctcggcattccggtgagcgccattgcagctgtgggcgcgctgatattatttgtcgtcgctaaacgcggtcatgcgattaatacgggtaaagtcctgcgcggtgccccctggcaaattgtcatcttctcgctcggcatgtatctggtggtttatggcctgcgcaatgccggattaacggaatatctttctggcgtactcaacgtgctggcggataacggcctgtgggccgcgacgctcggcaccggattcctcacagccttcctctcttctattatgaacaatatgccgacggtactggttggcgcgttgtccattgatggcagcacggcatctggcgttatcaaagaagcgatggtttatgccaatgtgattggctgcgatttgggaccgaaaattaccccaattggtagcctggctacactactctggctgcacgtactttcacagaagaatatgactatcagctggggatattacttccgtacagggattatcatgaccctgcctgtgctgtttgtgacgctggctgcgctggcgctacgtctctctttcactttgtaa

SEQ ID NO: 459775 - DNA, 354 bp, Shigella boydii
atgtcatttctgttacccatccaattgttcaaaattcttgctgatgaaacccgtctgggcatcgttttactgctcagcgaactgggagagttatgcgtctgcgatctctgcactgctctcgaccagtcgcagcccaagatctcccgccacctggcattgctgcgtgaaagcgggctattgctggaccgcaagcaaggtaaatgggttcattaccgcttatcgccgcatattccagcatgggcggcgaaaataattgatgaagcctggcgatgtgaacaggaaaagattcaggcaattgtccgcaacctggctcgacaaaactgttccgcagacagtaagaacatttacagttaa

SEQ ID NO: 459776 - DNA, 174 bp, Shigella boydii
atgcatccgcttactcatccactgcctgtcacggcgcatgtctcattgttagataagaactctctcactccggccagagcatcagttaacggcaccacccgtacttctgaccaggactttgaaagcgtttatgcgcattgccagagtgaaaatgcctcagagctaactggataa

SEQ ID NO: 459777 - DNA, 1353 bp, Shigella boydii
atgactaaacactatgattacatcgccatcggcggcggcagcggcggtatagcctccatcaaccgcgcggctatgtacggccagaaatgcgcactgattgaagccaaagagctgggcggcacctgcgtgaacgtcggctgcgtgccgaaaaaagtgatgtggcacgcggcgcaaatccgtgaagcgatccatatgtacggccctgattatggtttcgataccaccatcaacaagttcaactgggaaacgttgatcgccagccgtaccgcctatatcgaccgtattcatacttcctatgaaaacgtgctcggtaaaaataacgttgatgtaatcaaaggctttgcccgcttcgttgatgccaaaatgctggaggtaaacggcgaaaccatcacggccgatcatattctgatcgccacaggcggtcgtccgagccacccggatattccgggcgtggaatacggtattgattctgatggcttcttcgcccttcctgctttgccagagcgcgtggcggttgttggcgcgggttacatcgccgttgagctggcgggcgtgattaacggcctcggcgcgaaaacgcatctgtttgtgcgtaaacatgcgccgctgcgcagcttcgacccgatgatttccgaaacgctggtcgaagtgatgaacgccgaaggcccgcagctgcacaccaacgccatcccgaaagcggtagtgaaaaatgccgatggtagcctgacgctggagctggaagatggtcgcagtgaaacggtggattgcctgatttgggcgattggtcgcgagcctgccaatgacaacatcaacctcgaagccgctggcgttaaaaccaacgaaaaaggctatatcgtcgtcgataaatatcaaaacaccaacattgaaggtatttacgcggtgggcgataacacgggtgcagtggagctgacaccggtggcagttgcagcgggtcgccgtctctctgaacgcctgtttaataacaagccggatgagcatctggattacagcaacattccgaccgtggtcttcagccatccgccgattggtactgttggtttaacggaaccgcaggcgcgcgagcagtatggcgacgatcaggtgaaagtgtataaatcctctttcaccgcgatgtataccgccgtcaccactcaccgccagccgtgccgcatgaagctggtgtgcgttggatcggaagagaagattgtcggtattcacggcattggctttggtatggacgaaatgttgcagggcttcgcggtggcgctgaagatgggggcaaccaaaaaagacttcgacaataccgtcgccattcacccaacggcggcagaagagttcgtgacaatgcgttaa

SEQ ID NO: 459778 - DNA, 843 bp, Shigella boydii
atgctcagttatcgccacagctttcacgctggcaaccacgccgacgtccttaaacataccgttcagagcctgatcatcgagttgctgaaagagaaagataaaccgtttctctatctcgacacccacgcaggggccgggcgttatcagttaggcagcgaacatgccgagcgtaccggcgaatatctcgaaggcatcgcccgtatctggcagcaggacgatttgcccgcagaactggaggcgtacatcaatgtggtaaaacacttcaaccgtagcggtcagttgcgttactaccccggttcgccattgattgctcgccagctactgcgcgaacaagacagcctgcaactgaccgaactgcacccgagcgattacccgttgctgcgttctgaatttcagaaagacagccgtgcgcgcgtcgaaaaagccgatggtttccagcagcttaaggccaaactgccgccggtttcccgccgtggtttaatccttatcgacccgccgtatgaaatgaaaaccgactatcaggcggtggtcagcgggatagcagaaggttacaaacgtttcgccactggtacttacgcactgtggtatccggtggtgctgcgtcagcaaattaagcgcatgctccacgatctggaagcgaccggtattcgcaaaattctgcaaattgaactggcggtactgccagacagcgatcgccgtggcatgaccgcttccggcatgattgtgattaacccgccgtggaaactggaacagcagatgaataacgtgctgccgtggctgcacagcaaactggttccggcaggcaccgggcacgccaccgtaagctggatcgtgccggagtaa

SEQ ID NO: 459779 - DNA, 2043 bp, Shigella boydii
atgacgaatccgttactgactccctttgaattgcctccgttttctaaaattctcccggaacatgtcgttccagccgtgactcaggcgctgaacgattgccgcgaaaatgtggagcgcgtagtagcgcaaggggcaccgtacacctgggaaaatctctgccagccgttggcggaagtggacgatgtgttggggcgtatcttctccccggtcagccacctgaactcggtgaaaaatagcccggaactgcgtgaagcctacgagcaaaccctgccgctgctgtcggaatacagcacctgggtagggcaacatgaagggctgtataaagcgtaccgcgacctgcgcgatggcgatcattacgccacgctgaacacggcgcagaagaaagcggttgataacgccctgcgtgattttgaactctctggcataggtctgccgaaagagaaacagcagcgttacggcgaaattgcgacccgtctttctgaactgggcaaccagtacagcaacaacgtcctcgatgcgacaatgggctggaccaaactcgttaccgacgaagcggagctggcggggatgcctgaaagcgcgctggctgcggcaaaagcccaggccgaagcgaaagagctggaaggctacctgctgacgctggatatcccaagctacctgccggtaatgacctactgcgacaaccaggccttgcgtgaagagatgtatcgcgcttacagcacccgcgcctccgatcaaggcccgaacgccggtaaatgggataacagcaaggtgatggaagagatcctcgctctgcgtcacgaactggcgcaactgctgggctttgaaaactacgcctttaaatcccttgccactaaaatggcagaaaacccgcagcaggtgctggatttcttaaccgatctggcaaaacgcgcgcgtccgcaaggcgaaaaagagctggcacaactgcgcgccttcgccaaagcggaatttggcgtcgatgagttgcagccgtgggatatcgcgtactacagcgaaaaacaaaaacagcacctctacagcatcagtgacgaacagctgcgtccgtacttcccggaaaacaaagcggttaacggcctgtttgaagtggtgaaacgtatttacggcatcaccgctaaagagcgtaaagatgttgatgtctggcatccggatgtacgtttcttcgaactgtatgacgagaacaacgaactgcgcggcagcttctacctcgatctgtatgcccgtgaaaacaagcgcggcggggcgtggatggatgactgcgtaggccagatgcgtaaagctgacggttctctgcaaaaaccggtcgcgtatttgacttgtaacttcaaccgcccggtaaatggtaaaccggcgctgttcactcacgacgaagtgatcaccctgttccacgagttcggtcacggcctgcaccatatgctgacccgcatcgaaaccgctggtgtttccggtatcagcggtgtgccgtgggatgcggtcgaactgccgagtcagtttatggaaaactggtgctgggagccggaggcgctggcgtttatctctggtcactatgaaaccggcgaaccgctgccgaaagagttgctggataaaatgctggcggcgaagaactaccaggcggcgctgtttattctgcgccagctggagttcggcctgttcgatttccgcctccatgccgagttccgcccggatcagggtgcgaaaatcctcgaaactctggcagaaatcaagaaactggttgccgtagtaccgtctccatcctggggccgtttcccgcacgctttcagccatattttcgccggtggttatgccgcaggttactacagctacctgtgggctgacgtactggcggcagatgccttctcgcgctttgaggaagagggcattttcaaccgtgaaaccgggcagtcgttcctcgacaacattctgagccgtggcggttcagaagagccgatggatctgttcaaacgcttccgtggtcgtgaaccgcagctggatgcgatgctggagcattacggcattaagggctga

SEQ ID NO: 459780 - DNA, 753 bp, Shigella boydii
gtgaaaatctgcttaattgatgaaacaggcgccggagacggcgccttatctgttctggcggcccgctgggggctggagcacgatgaagacaacctgatggcgctggtgttaacgccggaacatctggaattgcgcaagcgtgatgagccaaaacttggcggcatctttgttgattttgttggcggagcgatggcgcaccgacgcaaattcggcggtggtcgcggtgaggcggtggcgaaagcggtgggcattaaaggcgattatttgccggatgtggtggactccaccgcagggctggggcgcgatgcctttgtactggcttcagtcggctgccgcgtgcggatgctggagcgtaatccagtggttgccgcgctactcgacgacggcctggcgcgtggttatgcggatgcggaaatcggcggctggttgcaggagcggttgcagttaattcacgcctccagcctgacggcgctaaccgatattaccccacgcccgcaggtggtctatctcgatccgatgttcccgcataagcagaaaagcgcgctagtgaaaaaagagatgcgtgtctttcagtcgctggtgggaccggatcttgatgccgatggattactggagcctgcacgcttgctggcgaccaaacgcgtggtagtaaagcgcccggactacgcgccaccgctagcgaatgtcaccacgccaaacgcggttgtgactaaagggcatcgctttgatatctatgcaggtacgcccgtgtaa

SEQ ID NO: 459781 - DNA, 1470 bp, Shigella boydii
atgaatacaacaacacccatggggatgctgcagcaacctcgcccatttttcatgatcttttttgtcgagttatgggagcgattcggctactacggcgtgcagggcgtactggcggttttcttcgttaaacagcttggattctcgcaagagcaggcttttgtcacttttggtgcttttgctgcgctggtctatggcctcatttccattggcggctatgtcggcgaccacctgctggggaccaaacgcaccattgttctcggagcacttgtgctggcgattggctacttcatgaccggcatgtcgctacttaagcctgacctgattttcatcgccctggggactatcgctgtcggtaacggcctgtttaaagctaacccagccagcttgctttcgaagtgctatccgccgaaagatccgcggcttgatggcgcattcaccctgttctatatgtcgatcaatatcggctcgttgatagcgttatcgctggcccctgtgatcgctgatagattcggttattcagtcacctacaacctgtgcggggcggggttaattatcgcattactggtttacatcgcctgtcgtggaatggtgaaagacattggttctgaacccgacttcaagccgatgagcttcagcaaactgttgtacgtattacttggcagcgtggtgatgatcttcgtatgtgcatggctgatgcacaacgtagaagtcgccaatctggtgctgattgttctctccatcgtcgtcaccatcatcttctttcgtcaggcattcaagctggataaaaccgggcgcaataaaatgtttgtcgcctttgtcctgatgctcgaagcggtggtgttttacattctctacgcccagatgccaacatcgctgaacttctttgccatcaacaacgtgcatcatgaaattctcggtttttccatcaacccggtcagcttccaggcgcttaacccgttctgggtggtactcgccagcccaatactggcagacatttacacgcatctgggtaacaaaggcaaagacctctcgatgccgatgaaatttactctcggcatgtttatgtgctcactgggctttttgacggcggcagctgcgggaatgtggtttgcggatgcacaagggctgacatcgccatggtttatcgtgctggtgtacttattccagagcttaggtgaactgtttattagcgcccttggcctggcgatgattgctgccctggtgccgcagcatttgatggcctttattctcgggatgtggttcctgacgcaggctgccgcgttcttgctgggcggctatgtggcaacatttaccgcggtgccggacaacattaccgatccgcttgagacgttgcccgtctataccaacgtgtttggtaagattggtctggtcacgctgggcgttgcagtagtgatgctgttgatggtgccgtggctgaaacgcatgattgcgacgccggaaagccattaa

SEQ ID NO: 459782 - DNA, 435 bp, Shigella boydii
atggcttataaacacattctcatcgcggtcgatctctccccggaaagcaaagttctggtagagaaagcagtctctatggctcgcccctacaatgcgaaagtttctctgatccacgtagatgtaaactactctgacctatacaccgggcttattgatgtgaatctgggtgatatgcagaaacgcatctctgaagagacacatcatgcgctgaccgagctttccactaatgcaggctacccaatcactgaaaccctgagcggcagcggcgacctgggccaggttctggtcgatgcaatcaagaaatacgatatggatctggtggtttgtggtcaccaccaggacttctggagcaaactgatgtcttccgcacgtcagctgatcaacaccgttcacgttgatatgctgattgttccgctgcgcgacgaagaagaataa

SEQ ID NO: 459783 - DNA, 336 bp, Shigella boydii
atgataagcaccgtcgcattattttgggctttatgtgtcgtttgcattgttaacatggcgcgctatttctcatcactacgcgcgttgttagtggtactgcgtaactgcgatccattgctctatcaatatgttgatggagggggcttttttacctcacatggccaaccaaacaaacaggtgcgtctcgtttggtatatctatgcccaacgttatcgcgatcatcacgatgatgagtttattcgccgctgtgagcgggtgcgtcggcagtttattctgactagcgcattgtgtggtctggtggtggtcagcctgattgcattgatgatttggcattaa

SEQ ID NO: 459784 - DNA, 1500 bp, Shigella boydii
atgctacatttgtttgctggcctggatttgcataccgggctgttattattgcttgcactggcttttgtgctgttctacgaagccatcaatggtttccatgacacagccaacgccgtggcaaccgttatctatacccgcgcgatgcgttctcagctcgccgtggttatggcggcggtgttcaactttttgggtgttttgctgggtggtctgagtgttgcctatgccattgtgcatatgctgccgacggatctgctgcttaatatgggatcgtctcatggccttgccatggtgttctctatgttgctggcggcgattatctggaacctgggtacctggtactttggtttacctgcatccagctctcatacactgattggcgcgatcatcgggattggtttaaccaatgcgttgatgaccgggacgtcagtggtggatgcactcaatatcccgaaagtattaagtattttcggttctctgatcgtttcccctattgtcggcctggtgtttgctggcggtctgattttcttgctgcgtcgctactggagcggcaccaagaaacgcgcccgtatccacctgaccccagcggagcgtgaaaagaaagacggcaagaaaaagccgccgttctggacgcgtattgcgctgatcctttccgctatcggcgtggcgttttcgcacggcgcgaacgatggtcagaaaggcattggtctggttatgttggtattgattggtgtcgcaccagcaggcttcgtggtgaatatgaatgccactggctacgaaatcacccgtacccgtgatgccatcaacaacgtcgaagcttactttgagcagcatcctgcgctgctgaaacaggctaccggtgctgatcagttagtaccggctccggaagctggcgcaacgcaacccgcggagttccattgccatccgtcgaataccattaacgcgctcaaccgcctgaaaggtatgttaactaccgatgtggaaagctacgacaagctgtcgcttgatcaacgtagccagatgcgccgcattatgctgtgcgtttctgacactatcgacaaagtagtgaagatacctggcgtgagtgctgacgatcagcgcctgttgaagaaactgaagtccgacatgcttagcaccatcgagtatgcaccggtgtggatcatcatggcggtcgcgctggcgttaggtatcggtacgatgattggctggcgtcgtgtggctacgactatcggtgagaaaatcggtaagaaaggcatgacctacgctcaggggatgtctgcccagatgacggcggcagtgtctatcggcctggcgagttataccgggatgccggtttccactactcacgtactctcctcttctgtcgcggggacgatggtggtagatggtggcggcttacagcgtaaaaccgtgaccagcattctgatggcctgggtgtttacccttccggctgcggtactgctttccggcgggctgtactggctctccttgcagttcctgtaa

SEQ ID NO: 459785 - DNA, 1203 bp, Shigella boydii
gtggaaaggtttgatgccattattataggcgctggtgcggcgggtatgttctgttctgcgctggcaggtcaggcaggacgccgggttctgctgatcgataatggtaaaaaaccagggcgcaaaatccttatgtctggcggtgggcgctgcaactttaccaacctttatgtcgaaccaggcgcttatctgagccagaatccgcatttttgtaagtctgcactcgcgcgttttacccagtgggatttcattgatctggtcaataaacacggcatcgcctggcacgagaaaacgttaggacaactcttctgcgatgactccgcgcagcagattgtcgacatgctggtggatgagtgcgagaagggcaatgtaaccttcagattgcgtagcgaagtgctgagtgtggcgaaggatgaaacaggcttcacgcttgaactgaacggcatgactgtcggttgcgaaaagctggtcatcgcgaccggtgggctgtcaatgccggggctgggcgcatcgccgtttggttataagattgccgaacaatttggcctcaacgtgctgccgacccgtgcgggtctggtgccattcactctgcataaaccgttgctcgaagagttacaggtgctggcgggcgtggcggtgccttccgtgattaccgctgaaaacggcaccgttttccgtgagaacttactcttcacccaccgcggcttatctggaccggcggtgttgcagatttccagctactggcaaccgggtgaatttgtcagtatcaatctgctaccggatgtggacctcgaaaccttcctgaatgagcagcgtaacgcacatccgaatcagagcctgaaaaacacactggcggttcatctaccgaagcggttggttgaacgcttacagcaactcgggcaaatcccggatgtttcgctaaaacagctcaacgtgcgtgaccaacaggcactgattagcacattgaccgactggcgcgtacaacccaacggcactgaaggctatcgcactgccgaagtgacgctcggcggcgtggacaccaacgaactctcttcacggacgatggaagcgcgcaaagtgcctgggctgtacttcatcggcgaagtgatggacgttaccggctggctggggggctataacttccagtgggcgtggtcgagtgcgtgggcttgtgcgcaggatttgattgcagcgaagtcgtcctga

SEQ ID NO: 459786 - DNA, 141 bp, Shigella boydii
atgctgcgttatttcatgatgcctaagaaaaaccagcgttacgcaaatggtcaacgctggttttatccggtacgttgcaattattttttagcagaacctgcttctaatattgaaacgatggtaatgactccaacttattga

SEQ ID NO: 459787 - DNA, 213 bp, Shigella boydii
atgaaaaaagatattcacccgaaatacgaagaaattactgctagctgctcttgcggtaacgtaatgaaaatccgctccactgttggtcatgacctgaacctcgacgtgtgcagcaagtgccacccgttcttcactggcaaacagcgtgatgttgctaccggtggccgtgttgaccgcttcaacaagcgtttcaacatcccgggcagcaaataa

SEQ ID NO: 459788 - DNA, 2199 bp, Shigella boydii
atgcccgttgcccacgttgccttgcccgttccgcttcctcgtacctttgactatctgctgccagaaggcatgacggttaaagccgggtgtcgcgtgcgcgtgccgtttggcaaacaacaggagcgcatcggggttgtggtgtcagttagcgatgtcagtgagctgccgcttaacgagctgaaagcggtagtggaagtgctggacgttgagccggtatttactcactccgtctggcggttactgctctgggcggcagattactatcatcatccgattggcgatgtgctgtttcatgccttgccgattttactgcgccaggggcggcctgcggcgaacgcgccgatgtggtactggtttgccactgaacaaggccaggcggtggatctgaacagcctgaaacgctcccccaagcaacaacaggcgctggcggcgttacggcaaggcaaaatctggcgcgaccaggtcgccacgctcgaatttaatgatgccgcgttgcaggcgctacgcaaaaaaggtctgtgtgatttagcaagtgaaacaccagagtttagcgactggcgaacgaactatgccgtttctggtgagcggttgcgattgaataccgaacaggccaccgccgttggcgcaattcatagcgcggcagatactttttctgcctggctgctggcgggcgttaccggttccggtaaaacggaggtttatctcagtgtactggaaaacgtgctcgctcagggcaaacaggcgctggtgatggtgccggaaatcggcctgacaccgcaaactatcgcccgttttcgtgaacgttttaatgcccccgtggaagttctgcattccggcctgaacgacagcgagcggctttcggcgtggttgaaagcgaaaaatggcgaggcggcgattgtgatcggcacccgctccgcgctgtttacgccgtttaaaaatctcggcgtgattgtcattgatgaagagcacgacagctcctacaagcagcaggaaggctggcgctatcatgcccgcgacctggcggtgtatcgtgcgcacagcgagcaaatcccgattattcttggctccgcaacgcccgcgctggaaacgttatgcaacgtccagcagaaaaaataccgcctgctgcgcctgacccgtcgggcagggaatgcgcgtccggcaattcaacatgtgctggatttaaaaggtcagaaggtgcaggcaggtctggctccggcgttaatcacccgtatgcgccagcatttacaggccaacaatcaggttatcctctttcttaatcgtcggggttttgcgcctgcgctgctgtgccacgactgcggctggatagccgaatgcccacgttgcgatcactactacacgctgcatcaggcgcaacagcatttgcactgtcaccactgtgacagtcagcgtccggtgccgcgccagtgcccttcctgcggttccacgcacctggtccccgtggggctgggcaccgaacagcttgaacagacgcttgcgccgatgttccccggcgtgcccatttcacgtatcgaccgcgataccaccagccgcaaaggggcgctggaacagcaactggcgaaagtgcatcgcggcggcgcgaggattttgatcggcacacaaatgctggcgaaaggtcaccactttccggatgtgacgctggtggcgttactggatgtggacggcgcgctgttttctgccgattttcgctcggcagaacgtttcgcccagctttacacccaggtcgccggtcgtgccgggcgtgcgggtaaacagggcgaagtggtgctgcaaacgtaccatccggaacatcctctgttgcaaacgttgctctataaaggctacgacgcctttgccgaacaggcgctggctgagcgacgcatgatgcagctgccgccgtggaccagccatgtgattgtgcgtgcggaagatcataacaatcagcacgcgccgctgttcctgcaacaactgcgtaatctgatcctttccagcccgctggcagacgacaaactgtggattctcggcccggttccggctctggcacctaagcgtggtggccgctggcgctggcagatcttgttgcagcacccttcccgcgtgcgcttgcaacacatcattagtggtacgctggcgcttattaatacaataccggattcccgcaaggtgaaatgggtgttggatgtcgatcccatcgaaggctaa

SEQ ID NO: 459789 - DNA, 1026 bp, Shigella boydii
gtgaaagcgaagaagcaggaaactgccgcgaccatgaaagacgttgccctcaaggcaaaagtctctacagcgactgtctcccgagcattaatgaatcccgataaagtctcccaggccacccgtaatcgggttgaaaaagcggcccgggaagtgggttatttaccgcagcctatggggcgcaacgtcaagcgtaatgaatcccgcaccattctggtgattgtcccggatatctgcgatcccttctttagcgaaattattcgcggtatcgaagttacggcggcaaatcacggatatctggtgctgattggcgactgtgcgcatcaaaatcagcaggaaaaaacctttatcgatttgatcatcaccaagcaaattgatggcatgttgctgctgggttcaaggctgccgtttgatgccagcattgaggaacagcgtaatctgccgccgatggtgatggcgaacgaatttgcaccggaactggagctgcctaccgttcatatcgacaatctgaccgccgcatttgatgcagtaaattatttatatgagcaagggcataaacggattggctgtatagccggtcccgaagagatgccactgtgtcactaccgcctgcaaggctatgttcaggcgctgcgtcgctgcggaattatggttgatccacaatacatcgcccgtggcgacttcaccttcgaagccggaagcaaagcaatgcaacagctgcttgatcttccacaaccgcctactgcagtcttctgccatagcgatgtgatggcgctcggcgcactttctcaggcaaaacgccaggggctgaaagtcccggaagacctttccataatcagttttgataacatcgacctgacgcaattttgtgatccgccgctgacaaccatcgcgcagccgcgttacgaaatcggtcgggaagctatgctgttattgcttgatcaaatgcaggggcaacacgttggcagtggctctcgtttaatggactgcgaacttatcatccggggatcaacacgcgcgttaccttaa

SEQ ID NO: 459790 - DNA, 855 bp, Shigella boydii
atggtcgctattgctgccgccgttcttgtgacctttatcggtggtctgtacttcattacgcatcacaagaaagaagagtccgagacgctgcaaagccagaaagtgaccggaaacggactaccaccaaaaccagaagaacgctggcgctacattaaagagctggaaagtcgccagccgggtgtgcgtgcgcccacagaaccttctgccggtggtgaagtgaaaacgccggagcaactgacaccagaacaacgtcagcttcttgaacaaatgcaggctgatatgcgccagcagccaacgcagctggttgaggttccgtggaatgaacagacgccggaacagcgtcagcaaacgctacaacgccagcgtcaggcgcagcaattagcggagcagcaacgcctggctcagcagtcgcgtacgactgaacaaagctggcagcagcagacgcgtacgtcgcaagccgcgccggtacaggcgcaaccgcgccagtctaaaccagcttctactcagcagccgtaccaggatctgctgcaaacccctgcgcacacgaccgcgcagtcgaagccgcagcaagctgcgccggttgctcgtgccgctgacgcgccaaaaccgacggcggagaaaaaagacgaacgccgctggatggtgcagtgcggttcgttcagaggcgcggaacaggcagagacggtacgtgctcagctggcgttcgaaggatttgactcgaaaatcaccaccaacaatggctggaatcgtgtggtcattggcccggtgaaaggcaaagagaacgcagacagcaccctcaatcggttgaagatggcgggtcatacaaactgcattcggctcgccgccgggggttga

SEQ ID NO: 459791 - DNA, 531 bp, Shigella boydii
gtgacaactatagtaagcgtacgccgtaacggccatgtggtcatcgctggtgatggtcaggccacgttgggcaataccgtaatgaaaggcaacgtgaaaaaggtccgccgtctgtacaacgacaaagtcatcgcgggctttgcgggcggtactgcggatgcttttacgctgttcgaactgtttgaacgtaaactggaaatgcatcagggccatctggttaaagccgccgttgagctggcaaaagactggcgtaccgatcgcatgctgcgcaaacttgaagcactgctggcagtcgcggatgaaactgcatcgcttatcatcaccggtaacggtgacgtggtgcagccagaaaacgatcttattgctatcggctccggcggcccttacgcccaggctgcggcgcgcgcgctgttagaaaacactgaacttagcgcccgtgaaattgctgaaaaggcgttggatattgcaggcgacatttgcatctataccaaccatttccacaccatcgaagaattaagctacaaagcgtaa

SEQ ID NO: 459792 - DNA, 1332 bp, Shigella boydii
atgtctgaaatgaccccacgcgaaatcgtcagcgaactggataagcacatcatcggccaggacaacgccaagcgttctgtggcgattgctctgcgtaaccgctggcgtcgcatgcagctcaacgaagagctgcgccatgaagtgaccccgaaaaatatcctgatgatcggcccgaccggtgtcggtaaaactgaaatcgcccgtcgtctggctaagctggcgaatgcgccgttcatcaaagttgaagcgaccaaattcaccgaagtgggctatgtcggtaaggaagtggattctattattcgcgatctgaccgatgccgccgtgaaaatggtacgcgtccaggctatcgagaaaaaccgttatcgcgctgaagaactggcagaagaacgtattctcgacgtgctgatcccacctgctaaaaacaactggggacagaccgaacagcagcaggaaccgtccgctgctcgtcaggcattccgcaaaaaactgcgtgaaggccagcttgatgacaaagaaatcgagatcgatcttgccgcagcaccgatgggcgttgaaattatggctcctccaggcatggaagagatgaccagccagctgcagtccatgttccagaacctgggcggccagaagcaaaaagcgcgtaagctgaaaatcaaagatgccatgaagctgctgattgaagaagaagcggcgaaactggtgaacccggaagagctgaagcaagacgctatcgacgctgttgagcagcacgggatcgtgtttatcgacgaaatcgacaaaatctgtaagcgcggcgagtcttccggtccggatgtttctcgtgaaggcgttcagcgtgacctgctgccgctggtagaaggttgcaccgtttccaccaaacacgggatggtcaaaactgaccacattctgtttatcgcttctggcgcgttccagattgcgaaaccgtctgacctaatcccggaactgcaaggtcgtctgccaatccgcgttgaactgcaggcactgaccaccagcgacttcgagcgtattctgaccgagccgaatgcctctatcaccgtgcagtacaaagcactgatggcgactgaaggcgtaaatatcgagtttaccgactccggtattaaacgcatcgcggaagcggcatggcaggtgaacgaatctaccgaaaacatcggtgctcgtcgtttacacactgttctggagcgtttaatggaagagatttcctacgacgccagcgatttaagcggtcaaaatatcactattgacgcagattatgtgagcaaacgtctggatgcgttggtggcagatgaagatctgagccgttttatcctataa

SEQ ID NO: 459793 - DNA, 927 bp, Shigella boydii
atgactgaacaacaaattagccgaactcaggcgtggctggaaagtttacgacctaaaaccctccccctcgcctttgctgcaattatcgtcgggacggcgctggcatggtggcaaggtcattttgatccgctggtcgccctgctggcactgattaccgccgggctattacagatcctttctaacctcgccaatgattacggcgatgcggtaaaaggcagcgataaacctgaccgcattgggccgctacgcggcatgcaaaaaggggtcattacccagcaagagatgaaacgggcgctcattattaccgtcgtgctcatctgtctctccgggctggcactggttgcagtggcgtgccatacgctggctgattttgtcggtttcctgattcttggcgggttgtcgatcattgccgctatcacctacaccgtgggcaatcgtccttatggttatatcggtctgggggatatttccgtactggttttctttggctggttaagcgtcatggggagctggtatttacaggctcatacattgattccggcactgatccttccggcgaccgcatgcggcctgctggcaacggcagtactgaacattaataacctgcgtgatatcaatagcgaccgcgaaaacggcaaaaacacgctggtggtgcgcttaggtgaagtgaacgcgcgtcgttatcatgcctgcctgctgatgggctctctggtatgtctggcgctgtttaatctcttttcgctgcatagcctgtggggctggctgttcctgctggcggcaccgttgctggtgaagcaagcccgttatgtgatgcgggaaatggacccggtggcgatgcgaccgatgctggaacgcactgtcaagggggcgttactgactaacctgctgtttattttagggatattcctaagccagtgggcagcataa

SEQ ID NO: 459794 - DNA, 486 bp, Shigella boydii
atgaaatacgatacttccgagctttgtgacatctatcaagaagatgttaacgtcgtggaaccgctgttctccaactttggcggacgggcgtcgtttggcggacaaataatcacggtaaaatgtttcgaggacaacgggttgctgtacgatctgctcgaacagaatggccgtggtcgtgttcttgtcgtcgatggcggtggttctgttcgtcgcgcactggtcgatgctgaactggcgcgtctggcagtacaaaatgaatgggaaggtctggttatttacggcgcggtgcgtcaggtagatgacctggaagagttggatatcggcatccaggcgatggcggcaattccggttggtgccgctggcgaaggcattggcgaaagcgatgtccgcgtcaattttggcggtgtaaccttcttctccggcgaccatctttatgccgacaataccgggattattctttcagaagatccgctggatattgaatga

SEQ ID NO: 459795 - DNA, 240 bp, Shigella boydii; identical to SEQ ID NO: 3072

SEQ ID NO: 459796 - DNA, 846 bp, Shigella boydii
atgagtcaaacatcaaccttgaaaggccagtgcattgctgaattcctcggtaccgggttgttgatttttttcggtgtgggttgcgttgcagcactaaaagtcgctggtgcgtcttttggtctgtgggaaatcagtgtcatttggggactgggggtggcaatggctatctacctgaccgcaggggtttccggcgcgcatcttaatcccgctgttaccattgcattgtggctgtttgcctgtttcgacaagcgcaaagttattccttttatcgtttcacaagttgccggcgctttctgtgctgcggctttagtttacgggctttactacaatttatttttcgacttcgagcagactcatcacattgttcgcggcagcgttgaaagtgttgatctggcaggcactttctctacttaccctaatcctcatatcaattttgtgcaggctttcgcagttgagatggtgattaccgctattctgatggggctgatcctggcgttaacggacgatggcaacggtgtaccacgcggccctttggctcccttgctgattggtctactgattgcggtcattggcgcatctatgggcccattgacgggttttgccatgaacccagcgcgtgacttcggtccgaaagtctttgcctggctggcgggctggggcaatgtcgcctttaccggcggcagagacattccttacttcctggtgccgctttttggccctatcgttggcgcgattgtaggtgcatttgcctaccgcaaactgattggtcgccatttgccttgcgatatctgtgttgtggaagaaaaggaaaccacaactccttcagaacaaaaagcttcgctgtaa

SEQ ID NO: 459797 - DNA, 1509 bp, Shigella boydii
atgactgaaaaaaaatatatcgttgcgctcgaccagggcaccaccagctcccgcgcggtcgtaatggatcacgatgccaatatcattagcgtgtcgcagcgcgaatttgagcaaatctacccaaaaccaggttgggtagaacacgacccaatggaaatctgggccacccaaagctccacgctggtagaagtgctggcgaaagccgatatcagttccgatcaaattgcagctatcggtattacgaaccagcgtgaaaccactattgtctgggaaaaagaaaccggcaagcctatctataacgccattgtctggcagtgccgtcgtaccgcagaaatctgcgagcatttaaaacgtgacggtttagaagattatatccgcagcaataccggtctggtgattgacccgtacttttctggcaccaaagtgaagtggatcctcgaccatgtggaaggctctcgcgagcgtgcacgtcgtggtgaattgctgtttggtacggttgatacgtggcttatctggaaaatgactcagggccgtgtccatgtgaccgattacaccaacgcctctcgtaccatgttgttcaacatccataccctaggctgggacgacaaaatgctggaagtgctggatattccgcgcgagatgctgccagaagtgcgtcgttcttccgaagtatacggtcagactaacattggcggcaaaggcggcacgcgtattccaatctccgggatcgccggtgaccagcaggccgcgctgtttggtcagttgtgcgtgaaagaagggatggcgaagaacacctatggcactggctgctttatgctgatgaacactggcgagaaagcggtgaaatcagaaaacggcctgctgaccaccatcgcctgtggcccgactggcgaagtgaactatgcgttggaaggtgcggtgtttatggcaggcgcatccattcagtggctgcgcgatgagatgaagttgattaacgacgcctacgattccgaatatttcgccaccaaagtgcaaaacaccaatggtgtgtatgtggttccggcatttaccgggctgggtgcgccgtactgggacccgtatgcgcgcggggcgattttcggtctgactcgtggggtgaacgctaaccacattatacgcgcgacgctggagtctattgcttatcagacgcgtgacgtgctggaagcgatgcaggccgactctggtatccgtctgcacgccctgcgcgtggatggtggcgcagtagcaaacaatttcctgatgcagttccagtccgatattctcggcacccgcgttgagcgcccggaagtgcgcgaagtcaccgcattgggtgcggcctatctcgcaggcctggcggttggcttctggcagaacctcgacgagctgcaagagaaagcggtgattgagcgcgagttccgtccaggcatcgaaaccactgagcgtaattaccgttacgcaggctggaaaaaagcggtcaaacgcgcgatggcgtgggaaaaacacgacgagtaa

SEQ ID NO: 459798 - DNA, 1140 bp, Shigella boydii
atgccggatgaagcgtttatgccgcatccggtagtcctgaaacgtgcgggggcaaccccgcacacatcaataatcccacccttcccctgtgctacacttcgcgccattccttactgcttagagtttgctatgagacgagaacttgccatcgaattttcccgcgtcaccgaatctgcggcgctggctggctacaaatggttaggacgcggcgataaaaacaccgcggacggcgcggcggtaaacgccatgcgtattatgctcaaccaggtcaacattgacggcaccatcgtcattggtgaaggtgaaatcgacgaagcaccgatgctctacattggtgaaaaagtcggtactggtcgcggcgacgcggtagatattgctgttgatccgattgaaggcacgcgcatgacggcgatgggccaggctaacgcgctggcggtgctggcagtaggcgataaaggctgcttcctcaatgcgccggatatgtatatggagaagctgattgtcgggccgggagccaaaggcaccattgatctgaacctgccgctggcggataacctgcgcaatgtagcggcggcgctcggcaaaccgttgagcgaactgacggtaacgattctagctaaaccacgccacgatgccgttatcgctgaaatgcagcaactcggcgtacgcgtatttgctattccggatggcgacgttgcggcctcaattctcacctgtatgccagacagcgaagttgacgtgctgtacggtattggtggcgcgccggaaggcgtagtttctgcggcggtgatccgcgcattagatggcgacatgaacggtcgtctgctggcgcgtcatgacgtcaaaggcgacaacgaagagaatcgtcgcattggcgagcaggagctggcacgctgcaaagcgatgggcatcgaagccggtaaagtattgcgcctgggcgatatggcgcgcagcgataacgtcatcttctctgccaccggtattaccaaaggcgatctgctggaaggcattagccgcaaaggcaatatcgcgactaccgaaacgctgctgatccgcggcaagtcacgcaccattcgccgcattcagtccatccactatctggatcgcaaagacccggaaatgcaggtgcacatcctctga

SEQ ID NO: 459799 - DNA, 747 bp, Shigella boydii
atggctgattgggtaacaggcaaagtcactaaagtgcagaactggaccgacgccctgtttagtctcaccgttcacgcccccgtgcttccgtttaccgccgggcaattcaccaagcttggccttgaaatcgacggcgaacgcgtccagcgcgcctactcctatgttaactcgcccgataatcccgatctggagttttacctggtcaccgtccccgatggcaaattaagcccacgattggcggcactgaaaccaggcgatgaagtgcaggtggttagcgaagcagctggcttctttgttctggatgaagtaccagattgcgaaacgctatggatgctggcaaccggtacagcgattggcccttatttatcgattctgcaactaggcaaagatttagatcgcttcaaaaatctggtcctggttcacgccgcacgttatgccgccgacttaagctatttgccactgatgcaagaactggaaaaacgctacgaaggcaaactgcgcattcagacggtggtcagtcgggaaacggcagcggggtcgctcaccggacggataccggcattaattgaaagtggggaactggaaagcgcgattggcctgccgatgaataaagaaaccagccatgtgatgctgtgcggcaatccacagatggtgcgcgatacacaacagttgctgaaagagacccggcagatgacgaaacatttacgtcgccgaccgggccatatgacagcggagcattactggtaa

SEQ ID NO: 459800 - DNA, 429 bp, Shigella boydii
atggcttataaacacattggcgtggcaatttccgggaatgaagaagatgccttactggtgaataaagctctggagctcgccagacataatgacgctcacctgacgttaattcatattgatgatggcttaagcgagttgtatccgggtatctacttccctgcaacagaagatattcttcaattgttgaagaataagtcggataacaagctgtataaactgacgaaaaatattcaatggccgaagacaaaactgcgtattgaacgcggagaaatgccggaaacactgctggaaattatgcaaaaagagcagtgcgacctccttgtctgtggtcatcatcactcatttatcaaccgtttgatgccggcatatcgcgggatgatcaataagatgagtgcggatttgctcatcgtgccgtttatcgataagtaa

SEQ ID NO: 459801 - DNA, 300 bp, Shigella boydii
atgaaagatgtcgtagataaatgcagtactaaaggatgtgcgattgatatcggtacggtgattgataacgacaactgtaccagtaagttttcgcgcttttttgccacccgcgaagaagcagagtcttttatgaccaaactgaaagagcttgccgccgctgcatcctctgcagatgaaggggccagcgtggcctacaagattaaggatctggaggggcaagttgagcttgatgcggccttcactttctcatgccaggccgagatgattatttttgagttatcactgcgttcgttagcttga

SEQ ID NO: 459802 - DNA, 375 bp, Shigella boydii
atgacaaaagagctgacaggtaaagccctgtttatggcgctcaggagccagcgcccacctgccgggctaatccaccactctgatcgaggttcacagtactgcgcatacgattaccgggtcatacaggagcagtctggtctgaaaacatcaatgtcgcgtaaaggtcactgttacgacaacgctccgatggaaagcttctggggaacgctgaaaaatgagagcctgagccactatcgttttaataaccaggatgaagccatctcagtaatacgggaatacattgagattttctacaatcgtcagcgtcgtcactctcgtctggggaatatctccccggcagccttcagggaaaaatatcatcagatggctgcttaa

SEQ ID NO: 459803 - DNA, 288 bp, Shigella boydii
atgaacgaagttgtaaattcaggcgtgatgaacattgcgtctttggttgtatcggtggtggttcttcttatcgggctcatcttgtggttttttatcaatcgtgccagttcacggactaacgaacagattgaactgcttgaggcgttgctggatcagcaaaaacgtcaaaatgcactgttacgtcgtttgtgcgaagcaaacgaaccagagaaagcagataaaaagaccattgagagtcaaaaatcggttgatgacgaagatattattcgcctggtcgccgaacgataa

SEQ ID NO: 459804 - DNA, 240 bp, Shigella boydii
atgcgattcatcattcgcacagttatgctgatagcactggtatggataggattattactcagcggatatggcgttttgattggaagcaaagagaatgccgcaggattaggtttgcaatgtacctatctgactgccagaggcaccagcacggtacaatacttgcacactaaaaatggtttcttggggataacagattgcccactgttacgtaaaagcaatatcgtggccgataatggttaa

SEQ ID NO: 459805 - DNA, 792 bp, Shigella boydii
atggctaacgcagatctggataaacagcctgattctgtatcttccgtgctaaaagtttttggcattttgcaggcgctgggtgaagagcgcgaaatagggataaccgagctgtcgcagcgcgtcatgatgtcaaaaagcaccgtttatcgctttttacagaccatgaaaaccttaggttatgtggcgcaggaaggggagtcggagaaatattccctgaccctgaaattgtttgaactgggcgctcgcgcgttacaaaacgtcgatttaattcgtagcgcagatatccagatgcgtgagatctcccgcctgaccaaagaaactatccacctcggcgcactggacgaagacagtattgtttacattcacaaaattgactctatgtacaatttgcgcatgtattcacggattgggcgtcgtaatccgctgtacagcaccgcgattggtaaggtactgctggcatggcgcgatcgcgatgaagtgaagcaaattcttgagggcgtggagtataaacgcagtaccgagcggaccatcaccagtacagaagcgttattacccgttctggaccaggtgcgcgagcaggggtatggcgaagataacgaagagcaggaagaagggctgcgatgcattgcggtaccggtatttgatcgctttggcgtggtcattgccggtttgagcatctccttcccgacgttgcgtttctctgaagagcgtttacaggaatatgtcgcaatgttgcataccgcagcgcgcaaaatttctgcccaaatgggttatcacgactatccgttctga

SEQ ID NO: 459806 - DNA, 1374 bp, Shigella boydii
atgccaaaagttcaggccgacggcctgccattgccccagcgatacggtgcgatattaaccattgtgattggtatttcgatggctgtccttgacggcgcaatcgccaacgtcgccctgccaacaatcgccacggaccttcatgccacgccagccagttccatctgggtagtgaacgcctatcaaatcgccattgtcatctccctgctctcgttttcgtttctgggcgatatgtttggctatcgacgtatttataaatgcggtctggtcgtttttctgttgtcttcactgttctgcgccctttctgattcgctgcaaatgctcacccttgcgcgtgtcatacaaggtttcggcggtgcagcgttgatgagcgttaataccgcacttatccgcctgatctatccacaacgttttctggggagagggatgggcataaactcgtttattgttgccgtctcttctgctgccgggccgacaattgctgcagcaatcctctccatcgcatcctggaaatggttatttttaatcaacgtaccgttaggtattatcgccctgcttctggcgatgcgttttctgccacccaatggttctcgcgccagtaaaccccgtttcgacctgcccagcgccgtgatgaacgcgttaaccttcggcctgcttatcactgcgttgagtggtttcgctcaggggcaatcgctgacgttaattgctgcggaactggtggtaatggttgttgttggtattttctttattcgccgccagctttctcttcccgtaccgctgctaccggtggatttactgcgtatcccgctgttttcactttctatttgcacatctgtttgctctttctgcgcacaaatgctggcaatggtttccctgcccttttacctgcaaaccgtgctcgggcgtagtgaagtcgaaacaggtttacttctgacaccgtggccgttagcaacgatggtgatggctccgttggcaggctatttgattgaacgcgtacatgcaggattgctgggtgctctagggttgttcatcatggctgcggggcttttttccctggttctgctgcccgcgtcacctgcggatatcaatattatctggccgatgatcttatgtggcgctggatttggcttgttccagtcacccaataaccacaccattattacctccgctcctcgcgaacgtagcggtggagccagtggcatgttaggaacggctcgtctactgggtcagagtagcggcgcggcactggtggcgctgatgctaaatcagttcggtgataatggtacgcacgtttcgctgatggctgcggctattctggcagtgattgctgcctgtgtcagtggtttacgtatcactcagccacgatccagggcataa

SEQ ID NO: 459807 - DNA, 882 bp, Shigella boydii
atgatgcgaatcgcgctcttcctgctaacgaacctggccgtaatggtcgttttcgggctggtactgagcctgacagggatacagtcgagcagcgttcaggggctgatgatcatggccttgctgttcggttttggtggttccttcgtttcgcttctgatgtccaaatggatggcattacgatctgttggcggggaagtgatcgagcaaccgcgtaacgaaagggaacgttggctggtcaatactgtagcaacccaggctcgtcaggcagggatcgctatgccgcaagtggctatctaccatgcgccggacatcaacgcttttgcaaccggtgcgcgccgtgatgcctctctggttgctgtcagcaccggtttgctgcagaacatgagcccggatgaagccgaggcggtaattgctcacgaaatcagccacatcgccaatggtgatatggttaccatgacgctgattcagggcgtggtgaacaccttcgttatctttatttcccgtattctggcgcagcttgccgcgggttttatgggcggaaatcgtgatgaaggtgaagagagcaacggcaacccgctgatctactttgcggttgcaacggttctggaactggtgtttggtattctggcgagcattatcaccatgtggttctcgcgtcatcgtgaattccatgctgatgccggttcggcaaaactggttggtcgcgagaaaatgattgccgcgctgcagcgcctgaaaaccagctatgaaccgcaagaagcaaccagcatgatggctttctgcattaacggtaagtcgaaatcgctcagtgagttgttcatgactcacccgccgctggataaacgaattgaagctctgcgtacgggtgaatacctgaagtaa

SEQ ID NO: 459808 - DNA, 2049 bp, Shigella boydii
atgaacatgttttttaggcttaccgcgttagctggcctgcttgcaatagcaggccagaccttcgctgtagaagatatcacgcgtgctgatcaaattccggtattaaaggaagagacgcagcatgcgacggtaagtgagcgcgtaacgtcgcgcttcacccgttctcattatcgccagttcgacctcgatcaggcattttcggccaaaatctttgaccgctacctgaatctgctcgattacagccacaacgtgctgctggcaagcgatgttgaacagttcgcgaaaaagaaaaccgagttaggcgatgaactgcgttcaggcaaactcgacgttttctacgatctctacaatctggcgcaaaagcgccgttttgagcgttaccagtacgctttgtcggtactggaaaagccgatggatttcaccggcaacgacacttataaccttgaccgcagcaaagcgccctggccgaaaaacgaggctgagttgaacgcgctgtgggacagtaaagtcaaattcgacgagttaagcctgaagctggcaggaaaaacggataaagaaattcgtgaaaccctgacacgccgctacaaatttgccattcgtcgtctggcgcaaaccaacagcgaagatgttttctcgctggcaatgacggcgtttgcgcgtgaaatcgacccgcataccaactatctttccccgcgtaataccgaacagttcaacactgaaatgagtttgtcgctggaaggtattggcgcagtgctgcaaatggatgatgactacaccgttatcaattcgatggtggcaggtggtccggcagcgaagagtaaagctatcagcgttggtgacaaaattgtcggtgttggtcaaacaggcaagccgatggttgacgtgattggctggcgtcttgatgatgtggttgccttaattaaagggccgaagggcagtaaagttcgtctggaaattttacctgctggtaaagggaccaagacccgcactgtaacattgacccgtgaacgtattcgtctcgaagaccgcgcggttaaaatgtcggtgaagaccgtcggtaaagagaaagtcggcgtgctggatattccgggcttctatgtgggtttgacagacgatgtcaaagttcaactgcagaaactggaaaaacagaatgtcagcagtgtgatcatcgacctgcgtagcaatggcggtggggcgttgaccgaagcggtatcgctctcaggtctgtttattcctgcgggtcccattgttcaggtccgcgataacaacggcaaggttcgtgaagacagcgataccgacgggcaggtgttctataaaggcccgctggtggtactggttgaccgtttcagtgcttcggcttcagaaatctttgccgcggcaatgcaggattacggtcgtgcgctggttgtgggtgaaccgacgtttggtaaaggcaccgttcagcaataccgttcattgaaccgtatttacgatcagatgttacgtcctgaatggccagcgctgggttctgtgcagtacacgatccagaaattctatcgcgttaacggcggcagtacgcaacgtaaaggcgtaacgccagacatcatcatgccgacgggtaatgaagaaacggaaacgggtgagaaattcgaagataacgcgctgccgtgggatagcattgatgccgcgacttatgtgaaatcaggcgatttaacggcctttgggccggagctgctgaaggaacataatgcgcgtatcgcgaaagatcctgagttccagaacatcatgaaggatatcgcgcgcttcaacgctatgaaggacaagcgcaatatcgtttctctgaactacgctgtgcgtgagaaagagaataatgaagatgatgcgacgcgtctggcgcgtttgaacgaacgctttaaacgcgaaggtaaaccggagttgaagaagctggatgatctaccgaaagattaccaagagccggatccttatctggatgagacggtgaatatcgcactcgatctggcgaagcttgaaaaagccagacccgcggaacaacccgctcccgtcaagtaa

SEQ ID NO: 459809 - DNA, 699 bp, Shigella boydii
atggaaaatcaacctaagttgaatagcagtaaagaagtaatcgcgtttctggccgaacgttttccccactgtttcagtgcggaaggtgaagcgcgtccgctgaaaatcggtatttttcaggatttggtcgatcgtgttgccggggaaatgaacctgagcaaaacgcaattacgatccgctttacgcctctacacttcgagctggcgttatctttacggtgttaaacccggcgcaacgcgtgtcgatcttgacggcaacccatgcggtgagctggacgagcaacatgtagagcatgctcgcaagcagcttgaagaagcgaaagcgcgtgttcaggcacagcgtgctgaacagcaagcgaaaaaacgcgaagctgccgcagctgctggtgagaaagaagacgcaccgcgccgcgaacgcaagccacgtccgaccacgccacgccgcaaagaaggcgctgaacgtaaacctcgtgcgcaaaagccggtagagaaagcgccaaaaacagtaaaagcacctcgcgaagaacagcacaccccggtttctgacatttcagctctgactgtcggacaagctctgaaggtgaaagcgggtcaaaacgcgatggatgccaccgtattagaaatcaccaaagacggcgtccgcgtccagctgaattcgggtatgtctttgattgtgcgcgcagaacacctggtgttctga

SEQ ID NO: 459810 - DNA, 552 bp, Shigella boydii
atgcttattttaataggctggcagttccaggtaagacaaacaagtgattatataatgaacaaaacagaattttacgcggatttaaatcgcgactttaacgcgctgatggcgggagaaaccagttttctggcaacgcttgcgaacaccagtgcgttgttatacgagcgtctcactgacgtaaactgggcaggtttttatttgcttgaggacgatacactggtactcggaccatttcagggcaaaattgcctgtgtccggatacccgtcgggcgcggggtgtgcggcactgcggttgcccgcaatcaagtgcagcgtatcgaggatgttcacgcgtttgacgggcatattgcctgtgatgcggcgagtaattctgaaattgttctgccgctggtggtgaaaaatcagattattggtgttcttgacatcgatagtaccgtcttcggtcgctttacagacgaggacgagcaaggcttacgtcagcttgtggcacagcttgaaaaagtgcttgcaacgacggattacaaaaaattctttgcgagcgtcgcaggataa

SEQ ID NO: 459811 - DNA, 1284 bp, Shigella boydii
atggctcttaacacaccacaaattacgccgacaaaaaagataacagtgaggtcaatcggcgaggaactgccgcgtggtgattaccaacgttgcccgcaatgtgacatgctgtttagcctgcccgagataaattctcatcagagtgcctattgtccgcgctgtcaggcaaaaattcgcgacgggcgcgactggtcgctaacgcgcctggcggcaatggctttcaccatgctgttgctgatgccgtttgcctggggcgaaccgctgttgcatatctggctgttaggtattcgtatcgacgcaaacgtcatgcaaggcatctggcaaatgaccaaacagggcgatacgataacgggggcgatggtctttttctgcgttattggtgcccccctcattctggtgtcctccatagcatatttatggtttggtaaccgactgggaatgaatttacgtccggtactgctgatgcttgagcgtcttaaagagtgggtaatgctggatatctacctggtcggcattggcgttgcttctataaaggtacaggattatgcccatatccaggcgggtgtcggcttgttctcttttgtggcgttggtgattttaacgacggtgacgttgtcacatcttaatgttgaggagctgtgggagcgatattatccgcagcgccccgctacgcgtagggacgagaaacttcgtgtctgtcttgggtgccattttaccggctatcctgatcagcgtggtcgctgcccgcgttgccatatcccgctacgcctgcgtcgtcgtcatagtttgcaaaaatgctgggcggcgctgttagcgtcaatcgttttgttgttaccagccaacctattgcctatttctatcatttatctgaatggtggccggcaggaagatacgattctttccgggattatgtcgctggcaagtagcaacattgcggtcgccggaatcgtgtttatcgccagtattctggtaccgtttactaaagtgatcgtcatgttcactttactgttgagcactcattttaaatgccagcaaggtttacgcacacgcattctgttactgcggatggtgacctggattggacgctggtcgatgctcgacctgtttgtcatatctttaaccatgtcgctgattaatcgcgatcagatcctcgcttttactatgggaccggctgcgttttattttggcgcagccgtaattttgactattcttgctgtggaatggctggacagccgcttactttgggatgcacatgagtcaggaaacgcccgcttcgacgactga

SEQ ID NO: 459812 - DNA, 2634 bp, Shigella boydii
atgagtcaggaaacgcccgcttcgacgactgaagcgcagattaaaaataaacgccgtatctcacctttctggctgctgcctttcatcgcgctaatgattgccggttggctgatttgggacagttatcaggaccgaagtaataccgtcaccatcgactttatgtcggcggatggtattgtcccgggccgtacgcctgttcgttatcagggcgttgaagtcggaacagtgcaggatatcagcctcagcgacgatcttcgtaagattgaagtcaaggtcagcatcaagtccgatatgaaagatgcgctgcgcgaagagactcaattctggctggtgacgccaaaagcatcgttggcaggtgtctccgggctggacgccctcgtcggtgggaactatatcggcatgatgccgggtacaggtaaagagcaggatcactttgtcgcactcgatacccaaccgaaatatcggctggacaatggcgatctgatgatccacctgcaagcccccgatctcggttcgctgaacagcggttcattggtctatttccgcaagatcccggtgggaaaagtctacgactatgccatcaatcccaacaaacaaggcgtggtgattgatgtcctgatcgagcggcgttttaccgatctggtgaaaaaaggtagccgtttctggaacgtttccggcgttgatgccaatgtcagtatcagtggcgcgaaggtgaaactggaaagcctggcggcactggttaacggtgcgattgccttcgattcaccagaagagtcgaaacctgccgaggcggaagatacctttggtctgtatgaagacctcgcccatagccagcgtggcgtaataatcaaactggaactgccgagtggggccggattaaccgccgactcgacgccattaatgtatcagggactggaagtcggacagctaactaaactggatttaaatcctggtggtaaagtcactggggaaatgacagttgatcccagcgtcgttaccctgcttcgtgaaaatacccgcatcgaattacgtaatccgaaattatcccttagcgatgccaatctcagcgccctgctgactggcaaaaccttcgagttggtacccggcgatggcgagccacgcaaagagttcgttgttgtgccaggcgaaaaagcactgctgcatgaacctgatgttctgacgctgaccctgaccgcgccggaaagttacggtattgatacgggtcagccgctcattcttcacggcgtgcaggtaggccaggttattgatcgtaaactcaccagcaaaggcgttacctttaccgtcgccatcgagcctcagcatcgcgaactggtaaaaggcgatagcaaatttgtcgtcaacagccgtgtcgacgtgaaggtggggctggatggcgttgagtttcttggtgccagcgcctcagaatggattaacggcgggatacgtattctgccaggcgataaaggtgagatgaaagccagctatccactgtatgccaatctggaaaaagcgctggagaacagccttagcgatttacccaccacaaccgtgagtttgagtgcagagacgctgccggatgtgcaggcaggatcggtagtgctgtaccgtaaatttgaagttggtgaagtgattaccgtgcgtccgcgagctaacgcgtttgatatcgatctgcatattaagccggagtatcgcaaccttctgaccagcaatagcgtgttctgggcagaaggcggggcgaaagttcagctgaatggtagtggcctgaccgtacaggcatccccgctctccagagcattaaagggagccattagcttcgataacctcagcggtgccagcgccagtcagcgtaaaggcgacaaacgaattctgtatgcttccgaaacagcggcccgtgcggttggtgggcagattacgcttcacgctttcgatgccggaaaactggcggtcgggatgccaattcgctatctcggtattgatatcgggcaaatccagacgctggatctgattaccgcgcgcaatgaagtacaggcaaaggcggtgctctatccggagtatgtccagaccttcgcccgcggcggtacgcgcttctcggtggtcacaccgcaaatttcagccgcaggcgttgagcatctaaatactatcctccagccgtatatcaatgtcgaaccaggtcggggtaatcctcgccgtgactttgagttgcaagaagctactattactgattcgcgttacctggatggcttaagcattattgccgaagcaccggaagccggttcgttaggtattggtacgcctgtgctgttccgtggtctggaagtaggtacggttaccggaatgacgctggggacattgtcagatcgcgtgatgattgcgatgcgcatcagtaaacgctatcaacacctggtgcgtaacaattccgtcttctggttggcatcgggttacagtctggactttggtctgacgggcggcgtagtgaaaaccggcacctttaaccagtttatccgtggcggcatcgccttcgccacgcctccgggtacgccactggcaccgaaagcccaggaaggcaaacacttcctgttgcaggaaagtgaaccgaaagagtggcgtgaatggggaactgcgcttcccaaataa

SEQ ID NO: 459813 - DNA, 1446 bp, Shigella boydii
atgctcgtggcccaacacaccgtttatttcccggacgcgtttctgacacaaatgcgcgaagctatgccttcgacgctctcatttgatgattttcttgccgcctgtcagcgcccgttgcgccgcagcattcgcgttaatacgctgaaaatctccgttgctgatttcctgcaattaaccgctccttatggctggacgcttacgccaattccgtggtgtgaagaaggtttctggattgaacgcgacaatgaagatgcattgccattgggtagtaccgccgagcatttaagtggcctgttttatattcaggaagccagttcaatgttgcccgtcgccgccttgtttgctgacggtaatgcaccacagcgggtgatggatgtcgctgctgcgccaggctcaaaaacgacgcaaattgccgcgcggatgaataacgaaggggcaatccttgccaatgagttttccgccagtcgggtaaaagtgttacatgccaatatcagccgctgtggcatcagtaatgttgcgctcacacattttgatggccgcgtgtttggtgcggcagtgccagaaatgtttgatgccattttgctggacgctccctgctccggcgaaggcgtggtgcgtaaagatcccgatgcgctaaaaaactggtcaccagaaagcaatcaggaaatcgcagctacacaacgggagcttatcgacagcgcctttcatgcattacgtcctggtggtacgctggtttactcgacctgtaccttaaaccaggaagaaaacgaagccgtttgcctgtggctgaaagagacttaccccgacgcagtagagtttttaccacttggcgatctcttccctggtgcaaacaaagcgctgaccgaagaaggctttttgcatgttttcccacaaatttacgactgcgaaggcttcttcgttgctcgtctgcgtaaaactcaggcgattcccgccttacccgcccccaaatacaaagtcggtaattttccgttcagcccggtgaaagatcgcgaagctggacaaattcgccaggcggctgcagatgttggcttaaactgggatgaaaacctgcgcctctggcagcgtgacaaagaactgtggttgttcccggtgggcattgaagccctgatcggtaaagtccgattttctcgcttggggattaaacttgccgaaacgcacaacaaaggttatcgctggcagcatgaagcagttattgcccttgccacccccgacaatgtgaacgcttttgaactgacaccgcaggaagcggaggagtggtatcgcgggcgcgatgtttacccgcaagccgcgccagtggcggatgacgtgttggttactttccagcatcaaccgattggtttagccaaacggattggttcgcgattgaaaaacagctatccgcgtgaactggtgcgcgatgggaaactttttaccggtaacgcctga

SEQ ID NO: 459814 - DNA, 237 bp, Shigella boydii
atgaaaaccagtgtgcgcataggcgcttttgaaatcgacgacggcgaattacacggtgaatcgccgggtgatcgaacgttaaccattctttgtaaatctgaccccgatttatgtatgcaactcgatgcctgggatgctgaaaccagtatccctgccctgctaaatggcgaacactctgtcctttaccgtacccgttacgatcaacaatctgatgcctggattatgcgtcttgcctga

SEQ ID NO: 459815 - DNA, 276 bp, Shigella boydii
atggcgggttatttgtcctggttattcccccgttgtaaaatctctcctaaacttaacggtacggcaccacacttcggggatgaaatgttcgcgctggtactttttgtttgctacctggatggcggttgtgaagatattgttgtggatgtctacaacacggaacagcagtgtctttattctatgagcgatcaacggatccgccagggcggttgttttccgattgaggattttatagatggtttctggcgacctgcacaggagtacggtgatttttaa

SEQ ID NO: 459816 - DNA, 516 bp, Shigella boydii
atgccattctatttcaggaaggagtgtccgttaaactcaggctacctcagtctgcagttactggaacaacattgggtttgtgcggtaagatgcaatcatgaacagatggcgatggatgcgctggcatcccagcagatgtctttgtggttgatgaatggcggcgactggtttattgcgctggcagataatcaacagaaacaagcgaaaacggcgctggaaaaatgtcagcatttgccctttattcttgaagtacacagtcgcaccggcaagcatgttattgctcatgcggattatccagatgatgtttatgaatggcaaaaggacgttgatttgcatcaggtcttgtggagccgctcgcgattaggtgaacgccaaaaagggcagggaattacaggtgctgatcatttctggtttggtcatacaccgttgcgacatcgcgtggatattggcaacctgcattatattgataccggtgctgtctttgggggcgaactgactcttgtgcaattgcaatga

SEQ ID NO: 459817 - DNA, 306 bp, Shigella boydii
atggcaactttgttacaacttcattttgcttttaatggcccatttggcgacgcaatggctgagcagcttaaaccgcttgctgagtcgattaatcaggaacctggttttctgtggaaggtatggacagaaagtgaaaagaaccacgaagccggtgggatctatctttttactgatgaaaaaagcgcccttgcctatctggaaaaacatactgcccgacttaaaaatctcggcgttgaggaagttgtcgccaaagttttcgatgtcaatgagccactgagtcaaatcaatcaggcaaaactcgcctga

SEQ ID NO: 459818 - DNA, 1257 bp, Shigella boydii
atgggatctgatgcgaaaaacttgatgagcgacgggaatgtgcaaattgttaagaccggcgaggtcattggcgcgacgcaacttactgaaggcgagttgattgttgaagctggcggaagagccgaaaataccgtggtcacgggggctggctggttgaaagtggcaaccggtgggatcgccaaatgcacacagtacggtaacaatggcacgctatcggtcagcgacggtgccattgccacagatattgttcagtccgagggaggcgcaattagtctctctacgctcgctacggttaatggccgccatcccgaaggtgaattcagcgttgatcagggttatgcctgcggtttgttgctggaaaatggcggtaacctgcgtgtactggaaggacatcgcgcggaaaaaatcattctcgatcaagagggcggcctgttggttaatgggacaacctcagcggtcgtggtagatgaaggtggtgaattgttggtgtatccaggtggggaagccagcaattgtgagattaatcagggcggcgtttttatgctggccgggaaagccagtgatacgttgcttgctggtggcaccatgaataatctcggtggtgaagactctgacactattgttgagaatggatccatttatcgtctggggacggatggccttcagctctacagttccggtaagacgcaaaacctgtccgtgaatgtgggtggtcgggctgaagtgcatgccggtacgctggaaaatgcggtaatacaaggtggaacagtgatcctgttgtcacccaccagcgcggacgaaaattttgtcgtagaggaagatcgcgcaccggttgaactgaccgggagtgttgcattactggacggcgcttcaatgattattggctatggcgcagatctgcaacaatcaacgattactgtacagcagggcggtgtgttgattctcgacggcagtacggtaaaaggtgacggtgtcacttttattgttggtaacatcaatctgaatggcggaaaactgtggctgatcactggtgcggcaacgcatgtgcaactgaaagtgaaacgcctgcgcggagagggagcgatttgcctgcaaaccagtgcgaaagaaatctcacctgacttcatcaatgtgaaaggggaagttaccggtgatatacacgttgagataacagatgccagtcggcaaactctgtgcaacgctctgaaattacagccagacgaagacgggattggcgcaacgctccagcctgcgtaa

SEQ ID NO: 459819 - DNA, 1374 bp, Shigella boydii
gtgcagaagtatatcagtgaagcgcgtctgttattagcattagcaatcccggtgattctcgcgcaaatcgcccaaactgcgatgggttttgtcgataccgtgatggcgggcggctatagtgccaccgacatggcggcggtcgctatcggtacttctatctggcttccggcgatcctctttggtcacggactgctgctggcattaacgccggttatcgcgcaattaaatggttccggtcgacgtgagcgcattgcgcatcaggtgcgacaaggtttctggctggcaggttttgtttccgttctcattatgctggtgctgtggaatgcaggttacattatccgctccatggaaaacatcgatccggctctggcggacaaagccgtgggttatctgcgtgcgttgttgtggggcgcgccgggctatctgttcttccaggttgcccgtaaccaatgtgaaggtctggcaaaaaccaagccgggtatggtaatgggctttatcggcctgctggtgaacattccggtgaactatatctttatttatggtcatttcggtatgcctgagctcggtggcgttggttgtggcgtggctactgcggcggtgtattgggtcatgttccttgccatggtttcttacattaaacgcgcccgctccatgcgcgatattcgtaacgaaaaaggcaccgcgaaacccgatcctgcggttatgaaacgactgattcaactcggtttaccgattgcgctggcactattctttgaagtgacactgtttgccgtcgtggctctgttagtgtctccgctcggtattgttgatgtcgcaggacaccagattgccctgaactttagttcactgatgtttgtgcttccaatgtcgctggcggcagcggtaactatccgcgtaggttatcgtctgggtcagggctcaacgctggatgcgcaaaccgctgcgcggaccgggcttatggtgggtgtctgtatggcaaccctgacggccattttcacggtttcactccgggagcaaatcgccctgttgtacaacgacaatcccgaggttgtaacgctggctgcgcatttgatgttgctggcggcggtatatcagatttctgactcaatccaggtgattggcagtgggattttgcgtggttataaagatacgcgttccattttctatatcacctttacagcttactgggtgctgggcttgccaagcggctatattctggcactgaccgatctggtcgttgaacctatggggccagcaggcttctggataggctttattatcggcctgacatcggcagccattatgatgatgttgcgtatgcggttcctgcaacgtctgccgtcagttatcattctgcaacgagcatcccgctaa

SEQ ID NO: 459820 - DNA, 642 bp, Shigella boydii
atgtttacggggattgtacagggcaccgcaaaactggtgtcgattgacgagaaaccaaattttcgtacgcatgtggtggagttacccgaccacatgctggacggcctggaaaccggtgcttccgtggcgcataacggttgctgcctgaccgtgacggaaattaacggcaaccatgtcagttttgacctgatgaaagaaacgttacgcattaccaatcttggcgatttaaaagtgggggattgggtaaacgttgagcgtgcggcgaaattcagtgatgaaattggcggacacttaatgtcaggtcatattatgaccaccgctgaagtggcgaaaatattaacctcggaaaataatcgccagatctggtttaaagtccaggatagtcagttgatgaaatatatcctgtacaaaggatttattggcatcgacggtattagcctgaccgtcggcgaagtcacgccaacgcgtttttgcgtccatttaattccggaaactctggaacgcacgactcttgggaagaaaaaactcggcgcacgcgtcaacattgaaattgatccacaaactcaggcagtggtagatacggtagaacgtgtgctggcggcacgagaaaatgccatgaatcaaccaggtacagaagcctga

SEQ ID NO: 459821 - DNA, 1149 bp, Shigella boydii
atgagttcatcgtgtatagaagaagtcagcgtaccggatgacaactggtaccgtatcgccaacgaattacttagccgtgccggtatagccattaacggttctgccccggcggatattcgtgtgaaaaaccccgatttttttaaacgcgttctgcaagaaggctctttggggttaggcgaaagttatatggatggctggtgggaatgtgaccgactggatatgttttttagcaaagtcttacgcgcaagtctcgagaaccaactcccccatcatttcaaagacacgctgcgtattgccggcgctcgtctcttcaatctgcagagtaaaaaacgtgcctggatagtcggcaaagagcattacgatttgggtaatgacttgttcagccgcatgcttgatcccttcatgcaatattcctgcgcttactggaaagatgccgataatctggaatctgcccagcaggcgaagctcaaaatgatttgtgaaaaattgcagttaaaaccagggatgcgcgtactggatattggctgcggctggggcggactggcacactacatggcatctaattatgacgtaagcatggtgggcgtcaccatttctgccgaacagcaaaaaatggctcaggaacgctgtgaaggcctggatgtcaccattttgctgcaagattatcgtgacctgaacgaccagtttgatcgtattgtttctgtggggatgttcgagcacgtcggaccgaaaaattacgatacctattttgcggtggtggatcgtaatttgaaaccggaaggcatattcctgctccatactatcggttcgaaaaaaaccgatctgaatgttgatccctggattaataaatatatttttccgaacggttgcctgccctctgtacgccagattgctcagtccagcgaaccccactttgtgatggaagactggcataacttcggtgctgattacgatactacgttgatggcgtggtatgaacgattcctcgccgcatggccagaaattgcggataactacagtgaacgctttaaacggatgtttacctattatctgaatgcctgcgcaggtgctttccgcgcccgtgatattcagctctggcaggtcgtgttctcacgcggtgttgaaaacggccttcgagtcgctcgctaa

SEQ ID NO: 459822 - DNA, 1212 bp, Shigella boydii
atgcaacctgggaaaagatttttagtctggctggcgggtttgagcgtactcggttttctggcaaccgatatgtatctgcctgctttcgccgccatacaggccgacctgcaaacgcctgcgtctgctgtcagtgccagccttagtctgttccttgccggttttgccgcagcccagcttctgtgggggccactctccgaccgttatggtcgtaaaccggtgttattaatcggcctgacaatttttgcgttaggtagtctggggatgctgtgggtagaaaacgccgctacgctgctggtattgcgttttgtacaggctgtgggtgtctgcgccgcggcggttatctggcaagcgttagtgacggattattatccttcacagaaagttaaccgaatttttgcgaccatcatgccgctggtgggtctatctccggccctggctcctctgttaggaagctggctgctggtccatttttcctggcaggcgattttcgccaccctgtttgccattaccgtggtgctgattctgcctattttctggctcaaacccacgacgaaggccggtaacaatagtcaggatggtctgacctttaccgacctgctacgttctaaaacctatcgcggcaacgtgctgatatacgcggcctgttcagccagtttttttgcatggctgaccggttcaccgttcatccttagtgaaatgggctacagcccggcagttattggtttaagttatgtcccgcaaactatcgcgtttctgattggtggttatggctgtcgcgccgcgctgcagaaatggcaaggcaagcagttattaccgtggttgctggtgctgtttgctgtcagcgtcattgcgacctggactgcgggcttcattagccatgtgtcgctggtcgaaatcctgatcccattctgtgtgatggcgattgccaatggcgcgatctaccctattgttgtcgcccaggcgctgcgtcccttcccacacgcaactggtcgcgccgcagcgttgcagaacactctacaactgggtctgtgcttcctcgcaagtctggtagtttcctggcttattagtatcagcacgccattgctcaccaccaccagcgtgatgttatcaacagtagtgctggtcgcgctgggttacatgatgcaacgttgtgaagaagctggctgccagaatcatggcaatgccgaagtcgctcatagcgaatcacactga

SEQ ID NO: 459823 - DNA, 933 bp, Shigella boydii
atgtggtcagaatattcactcgaagttgttgatgcggtagcgcgtaatggtagttttagcgctgcggcacaggagctgcatcgcgttccttctgcggtcagctataccgtgcgtcagctggaagagtggctggcggtgccgctctttgaacgacggcaccgtgatgtggagctgaccgctgctggagcgtggtttctcaaagaagggcgctctgttgtcaaaaaaatgcagatcacccgccagcaatgtcagcagatagcgaacggctggcgcggtcagttagctatcgcagtggataatattgtcaggccagaacgtacacggcagatgatcgttgatttttatcgccattttgatgatgtcgaacttcttgtctttcaggaagtgttcaacggtgtctgggatgcgctttccgacgggcgcgtggaactggcgattggcgcaacacgcgcgattccggtaggcggtcgttatgccttccgggatatggggatgctaagctggagttgcgttgttgccagccaccacccgctggcgttgatggatggcccattcagcgatgatacgttgcgcaactggccgtcgttggtgcgcgaagacacctcgcgaacgctacctaaacgtattacctggttgctggataaccaaaaaagagttgtcgtgcctgactgggaatcatcggcaacctgtatctcggcaggattatgcatagggatggtgccaacacatttcgccaaaccgtggcttaatgaggggaagtgggtagcacttgaattggaaaaccccttcccggattcggcatgttgtctgacatggcagcaaaatgatatgtcgcctgcgttaacctggctgcttgagtatctcggcgatagtgagacgctgaataaggagtggctgcgggagccggaagagactcccgcaacgggtgattaa

SEQ ID NO: 459824 - DNA, 1026 bp, Shigella boydii
atggcaacaataaaagatgtagcgaaacgagcaaacgtttccactacaactgtgtcacacgtaatcaacaaaacacgtttcgtcgctgaagaaacgcgcaacgccgtgtgggcagcgattaaagaattacactactcccctagcgcggtggcgcgtagcctgaaggttaaccacaccaagtctatcggtttgctggcgaccagcagcgaagcggcctattttgccgagatcattgaagcggttgaaaaaaattgcttccagaaaggttacaccctgattctgggtaatgcgtggaacaatcttgagaaacagcgggcttatctgtcgatgatggcgcaaaaacgcgtcgatggtctgctggtgatgtgttctgagtacccagagccgttgctggcgatgctggaagagtatcgccatatcccaatggtggtgatggactggggtgaagcaaaagctgacttcaccgatgcggtcattgataacgcgttcgaaggcggctacatggccgggcgttatctgattgaacgcggtcaccgcgaaatcggcgtcatccccggcccgctggaacgtaacaccggcgcaggccgccttgccggttttatgaaggcgatggaagaagcgatgatcaaggtgccggaaagctggattgttcagggtgactttgaacccgaatctggttatcgcgccatgcagcaaatactgtcgcagccgcatcgccctactgccgtcttctgtggtggcgatatcatggcaatgggcgcactttgtgctgctgatgaaatgggtctgcgcgtcccgcaggatgtttcgctgatcggttatgataacgtgcgcaacgcccgctattttacgccggcgctgaccacgatccaccagccaaaagattcgctgggtgaaacagcgttcaacatgctgttggatcgtatcgtcaacaaacgtgaagaaccgcagtccattgaagtgcatccgcgcttgattgaacgccgctccgtggctgacggcccgttccgcgactatcgtcgttaa

SEQ ID NO: 459825 - DNA, 1170 bp, Shigella boydii
atgaaaattaactatccgttgctggcgctggcgattggcgcgtttggtatcgggacaacggagttctcgccaatgggcttgttgcccgtcattgcgcgcggtgtggatgtctcgattcccgctgccggaatgttaatcagtgcctatgcagttggcgtaatggttggcgcgccgctgatgacgcttctactttctcatcgtgcccgccgcagtgcgttgattttcctgatggcaattttcacgctcggcaacgtactttccgccatcgcgccggattatatgaccctgatgctttcacgcattttgaccagcctgaatcacggagcattttttggtttgggttcagtcgtggccgcaagcgtggagccaaaacataaacaggccagcgcagttgccactatgtttatggggttaaccctggcaaatatcggtggcgtgccggcggcgacctggttgggtgaaaccatcggctggcggatgtcatttctggcaacggcggggctgggagtgatttcaatggtaagtctgttcttctcattacctaaaggtggtgcaggggcacgacctgaagtgaaaaaagagctggcggtattaatgcgtccgcaggtgctgtctgcattgctgacgacggtactgggagctggtgcaatgtttactctctacacctatatctatccggtactgcaaagtattacccacgcaacaccggtgttcgtcacggcaatgctggtgctgattggtgtcggattctctatcggtaactatcccggcggcaaactggcagatcgttcagttaacggcacgttgaaaggctttttgttgttgttgatggtgattatgctggcaatcccgttcctggcccgcaatgagttcggcgcagctattagcatggtggtgtggggcgcagcaacctttgcggtcgtaccgccgttacagatgcgcgtgatgcgtgtcgccagtgaagcgccaggtctgtcttcatcagtcaatattggtgcctttaatcttggaaatgcgctgggagcagctgctggtggtgcggtaatttccgctgggctgggatacagctttgtgccggtgatgggagcgattgtcgcgggactggcattattgctggtgtttatgtcagccagaaaacaacctgaaacagtttgcgttgctaacagctaa

SEQ ID NO: 459826 - DNA, 582 bp, Shigella boydii
atgtcattcgaattacctgcactaccatatgctaaagatgctctggcaccgcacatttctgcggaaactatcgagtatcactacggcaagcatcatcagacttatgtcactaacctgaacaacctgattaaaggtaccgcgtttgaaggtaaatcactggaagagattattcgcagctctgaaggtggcgtattcaacaacgcagctcaggtctggaaccatactttctactggaactgcctggcaccgaacgccggtggcgaaccgactggaaaagtcgctgaagctatcgccgcatcttttggcagctttgccgatttcaaagcgcagtttactgatgcagcgatcaaaaactttggttctggctggacctggctggtgaaaaacagcgatggcaaactggctatcgtttcaacctctaacgcgggtactccgctgaccaccgatgcgactccgctgctgaccgttgatgtctgggaacacgcttattacatcgactatcgcaatgcacgtcctggctatctggagcacttctgggcgctggtgaactgggaattcgtagcgaaaaatctcgctgcataa

SEQ ID NO: 459827 - DNA, 816 bp, Shigella boydii
gtggcgcggataaaccgtatttcgatcacgctctgtgctttactttttaccaccctgcctttaacgcctatggcccatgcttcaaagcaagccagggagagttctgctaccactcatatcaccaaaaaagcagataaaaagaaaagcacggcaaccaccaaaaagacccagaaaacagcgaaaaaagccgccagtaaaagtacgaccaaaagcaaaaccgcttcttccgttaaaaaatcttccattaccgcttctaaaaacgccaaaactcgcagcaaacacgccgtcaataaaacggcctcagccagctttaccgaaaagtgtaccaaacgtaagggctataaatcgcattgtgtgaaagtcaaaaatgccgcgtcaggaactcttgccgacgcgcacaaagcgaaggtgcaaaaagctacgaaagtggcaatgaataaactgatgcagcaaattggtaagccatatcgttggggtggcagctcaccgcgtaccggttttgattgcagcggcctggtttattacgcttataaagatttggtgaaaattcgtattccgcgtacggcgaatgaaatgtatcacctgcgtgatgcagcgccaatcgaacgtagtgaactgaaaaacggcgacctggtctttttccgtactcagggacgcggcacagccgatcatgtcggcgtgtatgtcggcaacggcaaatttattcagtcaccgcgcacaggtcaggaaattcaaatcacttctctcagtgaagactactggcagcgccactatgttggcgctcgtcgggtaatgaccccaaaaacacttcgctaa

SEQ ID NO: 459828 - DNA, 348 bp, Shigella boydii
atgagcaccactatcgaaaaaatccaacgccagattgctgaaaacccgatcctgctgtacatgaaaggttcaccgaaactgccgagctgcggtttctctgcccaggcagtccaggcgcttgccgcatgtggcgaacgttttgcctatgttgatattctgcagaatccggacattcgtgcggaactgccgaaatatgctaactggccgaccttcccgcaactgtgggttgacggcgagctggtcggcggttgtgatatcgtgatcgaaatgtatcagcgtggcgaactgcagcagctgatcaaagaaactgccgctaaatacaagtctgaagagccggacgcggaataa

SEQ ID NO: 459829 - DNA, 249 bp, Shigella boydii
atgttaacccgcgttaaatatcccacgttggccagcatctgtctcacggaaagtcatactgccttacaaaaagaggaattactcgccccagaggttttccacgcgctgactaccgcactgcgtcgcgaaccacggctgcgctttacgctaacagaagtgaatgatctaccggtccggcaaacgccgatgtttacgctgctgcgtgaggcgggattttcaagttcgccacaagggctggattggggatag

SEQ ID NO: 459830 - DNA, 207 bp, Shigella boydii; identical to SEQ ID NO: 24440

SEQ ID NO: 459831 - DNA, 546 bp, Shigella boydii
atgggtgaattcagacattttagtcagcgtgcgtcgctgaaggatgatttcttactgcatattaatgtttcgccctggcagttaaacgaaccgcactttcatgagcgttttaccaccatcatgaaagaaaatggcctgaaggcgaacagcctctgtgttgagatcactgaaaccgtgatcgagcgaattaatgaacatttttatctcaatattgaacaactgcgtaaacaaggggtacggatatcgattgatgactttggcaccggtttgtcaaacctgaaacgtttttatgaaattaatccagacagcataaaggtggactcgcaatttaccggcgatattttcggtactgcgggaaaaattgtgcgcattattttcgatctggcacgctataaccggatcccggtgattgcggaaggcgtagagagcgaagacgttgcgcgcgaattaattaaattaggatgtgttcaggctcaggggtatctgtaccagaaacctatgccattctccgcctgggataaaagtggaaaattagtaaaagagtag

SEQ ID NO: 459832 - DNA, 1329 bp, Shigella boydii
atgtccagaatcaataagttcgtacttacagtcagtctgctgatttttatcatgatttcagcagttgcctgcgggatctacactcaaatggtaaaggaacgggtgtatagcctgaaacagtccgttattgatactgcttttgcggtggcaaatattgctgaatatcggcgtagcgtggcaattgatcttatcaacacgctaaatcccacggaggaacagctgttggttggtttgcgcacagcttacgccgactcggtttccccctcttatttgtacgatgtcggtccttatctgatttccagtgacgaatgtattcaggtaaaggagttcgagaaaaattattgtgcagatattatgcaggttgtgaagtatcgacatgtcaaaaatacagggtttatctcttttgacggtaaaaccttcgtctattacctctatccggtaactcacaatcgtagtctgatatttttgcttggtctggagcgtttttctttactgtcaaaatcgctggcgatggacagcgagaacctgatgttctctctatttaagaacggtaaaccggtgaccggtgatgaatataatgctaaaaacgccatcttcaccgtttcggaagcgatggagcacttcgcctatttgccgaccggattgtacgtatttgcgtataaaaaagatgtttatttgcgggtctgtacattgattattttctttgccgcattggtggctgtgatatcgggtgccagttgcctctatctggtacgcagagtgattaatcgtggtattgtggagaaagaagccatcattaataaccattttgaacgcgtactggatggcgggcttttcttttcggctgccgatgtcaaaaaactctacagtatgtataactcggcgttcctggacgacctgaccaaagcaatgggcagaaaatcctttgacgaagatttaaaagcgctgccggaaaaaggcggttatttgtgcctgtttgacgtcgataaattcaaaaacattaacgacaccttcggtcatttgctgggcgatgaagtgttgatgaaagtggtgaaaatccttaaatcacagatcccggtagataaaggtaaaatctaccgcttcggcggtgacgaatttgcggtgatttatacgggtggaacgctggaagagttgctgtcgattctaaaagaaatcgttcatttccaggtgggaagcattaatttaagtaccagtatcggtgtagcgcattcaaatgaatgtaccaccgtcgaacgcttgaaaatgctggcggatgagcggctgtataagagtaagaaaaacggcagggctcagattagctggcagtaa

SEQ ID NO: 459833 - DNA, 1326 bp, Shigella boydii
atgagcaaagtaactccccagccgaaaatcggctttgtttcccttggctgtccgaaaaaccttgtcgattcagagcgtattctcaccgaactccgcactgaaggttatgacgtggtaccgagctatgacgatgcggacatggtgatcgtcaacacctgcggctttattgacagcgcggtacaagaatcactggaagccattggtgaagcgttgaatgaaaacggcaaggtaattgtgaccggttgtctgggggcaaaagaagatcagatccgcgaagtccacccgaaagtgctggaaatcaccgggcctcatagctatgagcaggttctggagcacgttcatcactacgtgccaaaaccgaaacacaacccattcctgagcctggtgccagaacaaggtgtgaaactgacgccgcgtcattatgcctatctgaaaatttcggaaggctgtaatcaccgctgcaccttctgcattattccgtctatgcgcggcgacctggtgagccgtccgattggcgaagtgttaagtgaagcgaaacgtctggtagatgcgggcgttaaagagattctggtgatctcgcaggatacttccgcctatggcgttgatgttaaacatcgtactggcttccacaacggcaagccggtaaaaaccagcatggtcagcctgtgcgaacagttatcgaaactggggatctggacacgtctgcactacgtttacccttatccgcatgtggacgacgtcatcccactgatggcagaaggcaaaatcctgccgtatctggacattccgttgcagcacgccagcccgcgcattctcaaactgatgaagcgtccgggttctgtagatcgccaactggcgcgcatcaaacagtggcgcgaaatctgcccggaactgaccctacgctcaacctttattgtcggcttccctggcgagacagaagaagatttccagatgctactcgacttcctgaaagaagcgcgtctggatcgcgttggctgctttaaatacagcccggttgaaggtgcagacgccaatgccctgcctgaccaggttccggaagaagttaaagaagaacgctggaaccgtttcatgcagctgcagcagcagatttccgccgagcgcctgcaagagaaagtgggccgtgaaattctggtgattatcgacgaagtggacgaagaaggcgcgattggtcgcagcatggcagatgcaccggaaatcgacggcgcggtttatctcaatggtgaaaccaacgttaagccgggtgatatcctgcgtgtgaaagtcgagcacgccgatgagtacgatttgtggggtagccgggtttaa

SEQ ID NO: 459834 - DNA, 384 bp, Shigella boydii
atgttcgttgacagacagcgaatcgatctgctgaaccggttgatcgacgcacgcgttgacctcgctgcatacgtgcaactgaggaaggcaaaaggatacatgtccgtcagcgaaagcaatcatctacgagataacttttttaaactgaatcgcgaactgcacgataaatcgctgcggttgaatcttcatctggatcaggaagagtggagtgctcttcatcatgctgaagaagcattagcgacagccgcagtatgtttgatgagtgggcaccatgattgcccgactgttattaccgtcaacgccgataagcttgaaaattgtctgatgagcttaacgctgagtatccagagcctgcagaagcacgccatgcttgagaaggcctga

SEQ ID NO: 459835 - DNA, 1116 bp, Shigella boydii
atgcatcgacaatcctttttccttgtgccccttatttgtctttcttccgctctctgggcggctcctgcaacggtaaatgtcgaagtactgcaagacaaactcgaccatccctgggcactggcctttttacccgataatcacggtatgttaatcactctgcgcggcggcgagttgcgtcattggcaagcaggaaaaggattatctgcgccgctttccggagttccggacgtttgggcgcacgggcagggcggcctgctggacgtggttttagcgcctgattttgttcagtctcgccgcatctggttaagttattccgaagttggcgatgatggcaaagccggaactgctgtgggttatggccgcttaagtgatgatctctcaaaagtgaccgacttccgcaccgtcttccgccagatgccaaaactgtctaccggcaaccattttggcgggcggctggtattcgacggtaaaggttatctttttattgctctgggcgaaaacaatcagcgcccgacggcgcaggatctggataaattacagggcaaactggtgcgtctgaccgatcagggcgaaatcccggatgataatccttttataaaggaatccggtgcgcgcgccgagatctggtcttatggcattcgtaatccgcaaggaatggcgatgaatccgtggagtaatgcactgtggctgaatgaacatggcccgcgcggtggtgatgaaattaatatcccgcaaaaaggcaaaaactacggctggccgctggcaacctggggaatcaactattcaggctttaagataccggaagcgaaaggggagatcgtcgccgggaccgagcaacctgttttttactggaaagattcgcccgctgtgagcggcatggccttctataacagcgataaattcccccagtggcagcaaaaattatttattggcgcgctgaaagataaagatgtcattgtgatgagcgtcaacggcgacaaagtgacagaagatggccgtattttaacggacagagggcagcgaattcgtgatgttcgcactggacccgacggttatttatacgttctcaccgacgagtccagtggggaattacttaaagttagcccacgcaattag

SEQ ID NO: 459836 - DNA, 579 bp, Shigella boydii
ttgctgacgctcgaagaactggaactaccttatgagcaaattctcgcgggccgtgagtttgggataaatcacgatgctgattttctggcgatgaaccctaacgggctggtgccgttgttgcgtgacgacgaaagtgatctcattctttgggaatcaaacgccattgtccgctatctggcggcacagtacgggcaaaaacgcctgtggatcgactcaccggcacgtcgtgcggaagcggaaaaatggatggactgggcaaaccagacgctcagtaatgcccatcgagggatcctgatgggattagtcagaacaccaccggaagagcgcgatcaggccgccattgatgccagttgcaaagagtgcgacgccctgtttgccctgctcgatgcggaactggcaaaagtaaaatggttctctggcgacgagtttggtgtgggcgatatcgctatcgcaccgttcatctacaatttgtttaacgttggcctgacctggacaccgcgtccaaatctgcaacgctggtatcagcaactcactgaacgccccgcagtgcgcaaagtggtgatgattcccgttagctaa

SEQ ID NO: 459837 - DNA, 1203 bp, Shigella boydii
atgacgcaatactcctctctccttcgtggtcttgcagcgggttctgcatttttattcctttttgccccaacggcattcgcggccgaacaaaccgttgaagcgccgagcgtggatgcgcgtgcatggattttaatggattacgccagcggtaaagtgctggcagaaggcaatgcggatgagaaactggatcccgcgagcctgactaaaatcatgaccagctatgtggttgggcaggcgcttaaggccgataagattaaactcaccgatatggtgacggtcggtaaagatgcctgggcgacgggaaatccggcactgcgtggttcatcggtaatgttcctcaaaccgggcgatcaggtttcggtggcagacttgaacaaaggtgtgattatccagtccggtaatgacgcctgtattgcgctggccgattacgttgccgggagccaggagtcatttattggtctgatgaatggttatgccaaaaaactgggtctgaccaacactaccttccagacggtgcacggcctggatgcgccggggcagttcagtaccgcgcgcgatatggcattgctgggtaaagcattgatccacgatgtgccggaagagtacgccattcataaagagaaagagttcaccttcaacaaaattcgtcagcctaaccgtaaccgtctgctgtggagcagcaatctgaatgttgatggcatgaagacaggaaccacggcaggcgcgggatataatctggttgcttcggctacccagggcgatatgcgtttaatctccgtagtgttgggggcgaaaactgaccgtatccgttttaatgagtctgagaaattattgacctggggtttccgcttctttgaaaccgtgacgccaattaaacctgatgccacctttgtgactcagcgcgtctggtttggtgataagagcgaactgaatctcggggcaggcgaagcgggctcagtgaccataccgcgtgggcagctgaaaaacctgaaggcgagctacacgttaacggaaccgcagcttaccgcaccgctgaaaaaaggtcaggttgtcgggaccattgatttccagcttaacggtaaatccattgagcagcgtccgctgatcgtgatggaaaatgtggaagagggcggattctttggtcggatgtgggatttcgtgatgatgaaattccatcagtggttcggcagctggttctcttaa

SEQ ID NO: 459838 - DNA, 759 bp, Shigella boydii
atggaaacacgtcgcgaagagcgtatcgggcagctgctgcaagaattaaaacgcagcgataagttacatcttaaagacgccgccgccctgcttggggtttcggagatgacgattcgtcgcgatctgaacaaccacagtgcgcccgtcgttttgctcggcggctatattgttctggaaccgcatagtgccagccattacctgttaagcgatcaaaaatcccgcctggtggaagaaaaacgccgggcggcaaaactggctgcgacactggtagaacccgatcagaccctcttttttgactgtggcaccaccacgccgtggattattgaagcgattgataatgaaatcccttttaccgccgtttgttattcgctaaatacctttctggcgctgaaagagaaaccccattgccgcgcatttctgtgcggtggtgaatttcacgccagcaacgccattttcaaacccatcgattttcagcaaacgttgaataatttttgcccggatatcgctttttattccgcggcgggcgtgcatgtcagtaaaggcgctacctgttttaatcttgaagagttgccggtaaaacactgggccatgtcgatggcgcaaaagcatgtgctggttgtcgaccacagtaaatttggcaaggtccgtccggcgcgcatgggtgacctgaaacgctttgatattgtggtgagtgattgttgcccggaagatgagtatgtgaagtacgcgcagacgcaccgtattaagttgatgtattaa

SEQ ID NO: 459839 - DNA, 597 bp, Shigella boydii
atgctggaaaatttgaatctctctctattctctcttattaacgcgacgccagactcggctccgtggatgatctcgttggcgatttttattgctcaagatttgattaccgtggtgccgctgctggccgcggtgctttggttgtgggggcttacagcacaacggcaactggtgataaaaatcgctatcgcgctggcggtcagcctgtttgtgtcctggacgatgggacatctttttccgcacgaccgaccctttgtcgaaaatatcggctataacttcctgcatcatgcggcggatgactcattcccaagcgaccacggtacggtgattttcacctttgcactggcatttttatgctggcatcgcctgtggtccggctcacttttaatggtgctggccgtcgtcattgcctggtcgcgcgtttatcttggcgtccactggccgctggatatgctcggtggattgctggcaggtatgattggctgccttagtgcccagattatctggcaagcgatggggcataaactctatcaacgtctgcaatcgtggtatcgcttctgttttgcattaccgatccgcaaaggctgggtgcgtgactga

SEQ ID NO: 459840 - DNA, 1026 bp, Shigella boydii
atggctcctggggccgctgtcggatcgtattggtcgccgtccggtgatgctggcgggggggtgtggtttatcatcacctgtctggcaatattactggcgcaaaacattgaacaattcactctgttgcgcttcttgcagggcataagcctctgtttcattggcgctgtgggatacgccgcaattcaggaatctttcgaagaggcggtttgtatcaagatcaccgcgctgatggcgaacgtggcgctgattgctccgctacttggtccgctggtgggcgcggcgtggatccatgtgctgccctgggaggggatgtttgttttgtttgccgcattggcagcgatctcctttttcggtctgcaacgagctatgcctgaaaccgccacgcgtataggcgagaaactgtcactgaaagaactcggtcgtgactataagctggtgctgaagaacggccgctttgtggcgggggcgctggcgctgggattcgttagcctgccattgctggcgtggatcgcccagtcgccgattatcatcattaccggcgagcagttgagcagctatgaatatggcttgctgcaagtgcctattttcggggcgttaattgcgggtaacttgctgttagcgcgtctgacctcgcgccgcaccgtacgttcgctgataattatgggcggctggccgattatgattggtctgttggtcgctgctgcggcaacggttatctcatcgcacgcgtatttatggatgactgccgggttaagtatttatgctttcggtattggtctggcgaatgcgggactggtgcgattaaccctgtttgccagcgatatgagtaaaggtacggtttctgctgcgatgggaatgctgcaaatgctgatctttaccgttggtattgaaatcagcaaacatgcctggctgaacgggggcaacggacagtttaatctcttcaaccttgtcaacggaattttgtggctgtcgctgatggttatctttttaaaagataaacagatgggaaattctcacgaagggtaa

SEQ ID NO: 459841 - DNA, 279 bp, Shigella boydii
atgaaaaattgtctactgttgggcgcgcttttaatgggctttactggtgtggcgatggcgcaaagtgtcaccgtcgatgtgccgagtggatacaaagtggttgtagttcctgattcagtcagcgttccacaagcggtcagcgtcgcgactgtgccgcaaaccgtctatgtggctcctgcgccagctccggcttaccgcccgcatccttatgctcgccatcttgccagcgtaggtgaagggatggttatcgaacaccagattgacgaccatcaccattaa

SEQ ID NO: 459842 - DNA, 816 bp, Shigella boydii
atgagcattaaattaattgcggtagacatggatggtactttcttaagcgatcaaaaaacctataaccgtgagcggtttatggctcagtatcagcaaatgaaagcacaaggcattcgctttgtggtcgccagcgggaatcaatattatcagttgatctctttcttccctgaaattgctaatgaaattgcctttgtggctgaaaacggcggctgggtagtgagtgaaggcaaagatgtttttaatggcgagctgtcgaaagatgcctttactactgtcgtggaacatttgctgacgcgcccggaagtggaaattattgcctgcggaaaaaatagcgcctatacgctcaaaaaatatgacgatgccatgaaaacggtggcggaaatgtattatcaccgtctggaatacgtcgataactttgacaacttagaagatattttctttaagtttggcctgaatctttccgatgaactgattccacaagtacaaaaagcattacatgaggccatcggcgatattatggtgccagtccacaccggcaacggcagcatcgatctgattatccccggcgtacataaagccaatggccttcgccaactgcagaaattatggggaatagacgacagcgaagtggtggtctttggcgatggcggtaacgatattgagatgctgcgtcaggcaggctttagttttgcaatggaaaatgccggcagcgcggtcgtcgcagcggcaaaataccgggcaggctccaataaccgtgaaggcgtactggatgtgatcgataaagtgcttaaacacgaagcgccatttgaccaataa

SEQ ID NO: 459843 - DNA, 1128 bp, Shigella boydii
atggcgtcctgggcaacccgtacgcctgctatccgcgatattctctctgtctcgatcgctgaaatgggcggtgttctctttggtctgtcgatcggttcgatgagcggtattctctgctcggcgtggttagtgaaacgctttgggacacgtaatgtcatcctggtcacgatgtcctgcgcattgatcgggatgatgatattaagtctggcactctggctgacatcgcccctgctctttgccgttggtctcggcgtctttggggcaagttttggttctgcggaagtggcgataaacgttgaaggtgccgccgttgagcgagaaatgaataaaacggttttgccgatgatgcacggtttttatagcctgggcacgctggcaggcgctggtgtcgggatggcactgacggcctttggcgttccggcaacggtgcacattttattggcggcgctggtaggtatcgcgcctatttatatcgccattcaggcaatccctgacggtacgggcaaaaatgctgccgatggcacccagcatggcgaaaaaggcattcctttttatcgcgatatccagttgctgttgattggtgttgtagtgctggcgatggcctttgccgaaggttctgccaacgactggttacccttattaatggttgacggtcacggttttagccctacttccggctcgctgatttatgccggttttaccctggggatgaccgttggacgcttcactggcggttggttcatcgaccgttacagtcgcgttgccgtggttcgggccagtgcactaatgggggcgttgggtattgggctgattatttttgtcgatagcgcctgggtcgctggggtgtctgttgtactctggggactgggtgcctcgctgggcttcccgctgaccatttctgccgccagcgataccggccccgatgcaccaacccgcgtcagtgtggtagcaacgaccggttatctggctttcctcgtcgggccgccgctgctgggctatctcggcgaacattatggattacgtagtgcaatgctggttgtactggcgctggttattctcgcggctattgtcgcgaaagccgtcgccaaacccgataccaaaacgcagacggcgatggagaatagttga

SEQ ID NO: 459844 - DNA, 537 bp, Shigella boydii
atgcgtcgcgctaacgatccgcaacggcgagaaaaaattatccaggccacgctggaggcggtgaaactttacggaatacatgctgttacgcaccgcaaaattgctacccttgccggggtaccgttgggatcgatgacctactatttttcaggaattgatgagttgttgctggaggcgttcagcagttttactgagattatgtcccggcaatatcaggcattttttagcgatgttagtgatgctcaaggcgcatgccaggctatcaccgatatgatctacagctcacaggttgcaacgccggataatatggagctgatgtaccagctctacgcgctggctagccgaaaaccgctattaaaaacggtaatgcaaaactggatgcagcgcagtcagcaaacgctcgaacaatggtttgaacccggaaccgcccgcgcgcttgatgcgtttattgaggggatgacgctgcattttgtcaccgaccgtaagccgctatcgcgcgaggagattttgaggatggttgagagggttgcagggtag

SEQ ID NO: 459845 - DNA, 255 bp, Shigella boydii
atggaaaaaacgtctatcgtgctccctcgcggtcaactcacacacgttctgcgccatacgtttgcggcgcacttcatgatgtcgggtggaaacattctggccttacaaaaaattctcggacaccacgatataaaaatgactatgcgttacgcacatctggcaccggatcatctggaaacggcgctccgtttcaatcctctggcaacgctgccaagtggcgacaaagtggcggcagcggttggcattaccccgtaa

SEQ ID NO: 459846 - DNA, 504 bp, Shigella boydii
atgttgcagcttaacgagaataaacagtttgcatttttccaaagactggcatttccgctgcgtatctttttgctgattctggtgttctcaatatttgtcattgcagccttggcgcaatattttacggccagttttgaggactatttaacgcttcatgtacgcgacatggcaatgaatcaggcgaaaattattgcctccaatgacagtgtcatctctgcggtgaaaacgcgtgactacaaacggctggcgaccatcgctaacaaattacaaagagataccgattttgattatgtggtgattggcgaccggcactcgatccgcctttaccatcctaatccggagaaaattggttatcctatgcagttcaccaaacagggcgcgctggagaaaggggagagctacttcattaccgggaaagggtcaatggggatggcgatgcgcgccaaaacgccaatctttgatgacgatggaaaagtcggtaatgctgccaacttactgatttag

SEQ ID NO: 459847 - DNA, 1059 bp, Shigella boydii
atgttcggcaatgatattttcacccgcgtaaaacgttcagaaaataaaaaaatggcggaaatcgcccaattcctgcatgaaaatgatttgagcgttgacaccacagtcgaagtatttattaccgtaacccgcgatgaaaagcttatcgcgtgcggtggaattgccggaaatattattaaatgcgttgctatcagtgaatccgttcgcggtgaaggactggcgctgacattagccactgaactgataaacctcgcctatgagcggcacagcacgcatctgtttatttataccaaaaccgaatacgaggcgctgttccgccagtgcggtttttccacgctgaccagcgtacccggcgtgatggtgctgatggaaaacagcgccacgcgactgaaacgctatgccgaatcgctgaaaaaatttcgtcatccagggaacaagattggctgcattgtgatgaacgccaatccctttacgaatggtcaccgttatctgattcaacaagctgcggcacagtgcgactggttgcatctgtttttagtcaaagaagattcttcacgcttcccctatgaagaccggctggatctggtgttaaaaggcaccgccgatattccacgcctgactgtgcatcgcggctccgaatacatcatctcccgcgctacgttcccttgctacttcattaaagaacagagcgtcattaaccattgttacaccgaaattgatctgaagattttccgtcagtacctcgctcccgcactgggtgtaactcaccgctttgtcggtactgaacccttttgtcgcgttaccgcccagtacaaccaggatatgcgctactggctgaaaacgccgactatctccgcaccgcccatcgaactggttgaaattgagcggctgcgttaccaggagatgccgatatccgcttcccgggtacgtcaactgctggcgaaaaacgatctcacggctatcgcgccgctggtccctgcagtcacgctgcattatttgcagaacctgcttgagcactcccgccaggacgcggcagctcgtcaaaagccccccgcatga

SEQ ID NO: 459848 - DNA, 297 bp, Shigella boydii
atgaaaataaaccagcccgccgttgcaggcacccttgagtctggggatgtgatgatacgcatcgccccactcgatacgcaggatatcgacctgcaaatcaacagcagcgttgagaaacagtttggcgatgcaattcgcaccaccattctggacgttctcgcccactacaacgtgcgcggcgtacagctgaatgtcgatgacaaaggcacactggactgcattttacgtgcacgactggaagccctgctggcacgcgccagcggtatcccgactctgccatgggaggattgccaatga

SEQ ID NO: 459849 - DNA, 909 bp, Shigella boydii
atgatttccgcttcgctgcaacaacgtaaaactcgcacccgccgcagcatgttgtttgtgcctggtgccaatgccgcgatggtcagcaactccttcatctacccggctgatgccctgatgtttgacctcgaagactccgtggcattacgtgaaaaagacaccgcccgccgcatggtttatcacgcgctgcaacatccgctgtatcgcgatattgaaaccattgtgcgtgtcaacgcgctggattccgaatggggtgttaacgacctggaagccgtcgttcgcggtggtgcggacgttgtgcgtctgccgaaaaccgataccgctcaggatgttctggatattgaaaaagagatcctgcgtatcgaaaaagcctgtggtcgtgaacccggcagcaccggcctgctggcggcgattgaatctccgctgggcattacccgcgcagtggaaatcgctcacgcttccgagcgtttgatcggtatcgccctaggtgcagaagactatgtgcgcaacctgcgtacagaacgctccccggaaggaactgaactgctgttcgcacgctgttccattttgcaggccacgcgctctgcgggtattcaggcgttcgataccgtctattccgacgctaacaacgaagccggattcctgcaagaagccgcccacatcaaacagctgggctttgacggcaaatcgctgatcaacccgcgtcagattgatctgctgcacaacctctacgcaccgacccagaaagaagtggatcacgcccgccgcgtcgtagaagccgctgaagccgccgctcgcgaaggcctcggcgtggtttccctgaacggcaagatggtggacggtccggttatcgatcgcgcccgtctggtgctctcccgtgcagaactttccggcatccgcgaagaataa

SEQ ID NO: 459850 - DNA, 1533 bp, Shigella boydii
atgacgcagaaaattgaacaatctcaacgacaagaacgggtagcggcctggaatcgtcgcgctgaatgcgatcttgccgctttccagaactcaccaaagcaaacctaccaggctgaaaaagcgcgcgatcgcaaactgtgcgccaacctggaagaagcgattcatcgctctggtttacaggacggcatgacggtttccttccatcacgctttccgtggcggtgacctgaccgtcaatatggtgatgggcgtcatcgcgaagatgggctttaaaaacctgactctggcctccagctccctgagtgattgccatgcgccgctggtagaacacattcgccagggcgtggttacccgcatttatacctctggcctgcgcggtccactggcggaagaaacctcccgtggtctgctggcggaaccggtgcaaatccactctcacggcggacgtgtgcatctggtacagagcggcgaactaaatatcgacgtggctttcctcggcgtcccatcctgtgatgaattcggtaatgccaacggttacaccggtaaagcctgctgtggctccctcggctatgcaatggttgatgccgacaacgcaaaacaggtcgtgatgcttaccgaagaactgctgccttatccgcataatccggcaagcattgagcaagatcaggttgatttgatcgtcaaagttgatcgcgttggcgatgctgcaaaaatcggcgctggtgcgacccgtatgaccactaacccgcgcgaactgcttattgcccgtagcgctgcggatgtgattgtcaactctggctacttcaaagaaggtttctccatgcaaaccggcaccggcggcgcttcgctggcggtaacccgtttcctggaagacaaaatgcgtagccgcgatattcgcgccgacttcgccctcggcggtattactgcaacgatggttgatctgcacgaaaaaggtctgatccgcaaactgctggatgtgcagagctttgacagccatgctgcgcaatcgctggcccgtaaccccaatcacatcgaaatcagcgccaaccagtacgctaactggggttcgaaaggcgcatcggttgatcgtctctacgtggtggtactgagcgcgctggaaattgacacccagttcaacgttaacgtgctgaccggctctgacggcgtactgcgtggtgcttccggtggtcactgcgataccgcgattgcctctgcgctttccatcatcgtcgcgccgctggtacgcggtcgtattccgactctggtggataacgtgctgacctgcatcaccccgggctccagtgtcgatattctggtcacagaccacggtatcgcagttaacccggcacgtccggagctggcagaacgtctgccggaagcgggcattaaagtggtttccattgagtggctgcgtgaacgtgcgcgtctgctgaccggtgaaccacagccgattgaattcaccgaccgagtcgttgccgttgtgcgttaccgcgatggctcggtgatcgatgttgtacatcaggtgaaggaataa

SEQ ID NO: 459851 - DNA, 552 bp, Shigella boydii
atgcacctgcttcctgaactcgccagccaccatgcggtgtcaattcccgagctgctcgtcagccgggatgaaaggcaagcacggcaacacgtctggctcaagcgccatcctgttccactggtctcctttaccgtggttgcgcctgggccgattaaagacagtgaggtcacacgccgaatttttaatcatggcgtgacagccttgcgtgccttagccgcaaaacagggctggcaaattcaggagcaggctgcactggtttccgccagcggaccggagggtatgttgagcattgccgccccggctcgcgacctcaagctcgccaccattgagcttgaacatagtcatcctctcgggcggttatgggatatcgatgtcctgacgcccgaaggcgaaattctctcccgccgcgactattcactgccgcctcgccgctgcctgttgtgcgagcaaagcgcagccgtctgcgcgcgtggaaaaacccatcaactgaccgatttactcaaccgcatggaggcactgctgaacgatgtcgatgcctgcaacgtcaactaa

SEQ ID NO: 459852 - DNA, 879 bp, Shigella boydii
atgtcgatgcctgcaacgtcaactaaaaccacaaagcttgcgacgtcattaatcgatgagtacgccctgctgggctggcgcgccatgctgactgaagtcaatctgtcaccgaaaccaggtctcgtggatcgcattaactgcagtgcgcataaagatatggcgctggaagatttccaccgcagcgcgctggcgattcagggctggctaccccgtttcattgaatttggtgcctgtagtgcggaaatggcaccagaagcggtactccacggattacgcccaattggtatggcttgcgaaggtgatatgttccgcgccaccgcgggagtaaacacgcataagggcagcattttttctttagggctactgtgtgcggcaattggccgtttgcttcagctcaaccagtcgctaacgccaacaaccgtttgttctacggcggcaagtttctgccgtggcctgaccgatcgcgaactgcgtaccaataattcacaactgacggcaggtcaacggttgtaccagcagcttgcccttaccggcgcacgcggtgaagccgaagcgggttatccactggtgatcaaccacgccttgccgcattacctcactctgctggatcaggggttagatcctgaactggcattgctcgataccttgctcctactgatggcgatcaacggcgataccaacgttgcttcgcgcggtggcgaggggggcctgcgctggctacagcgcgaggcgcaaacattattgcaaaaagggggcattcgaaccctcgccgatctcgattatctccggcagttcgacagggagtgtatcgaacgaaatctcagtccaggcggcagtgccgacctgctgatccttacctggtttttagcacagatttaa

SEQ ID NO: 459853 - DNA, 816 bp, Shigella boydii
atgtctttagcaaaagataatatatggaaactattggccccactggtggtgatgggtgtcatgtttcttatccctgtccccgacggtatgccaccacaggcatggcattacttcgctgtgtttgtggcaatgattgtcggcatgatcctcgagccaattccggcaacagcgatcagttttattgcggttactatttgcattattggcagtaattacctgctctttgatgccaaagaattagctgacccagcgtttaatgcgcaaaaacaggcgctgaaatggggtctggctggtttttccagcaccacggtatggctggtatttggcgcatttatttttgcattagggtatgaagtttccgggttaggtcttcgcattgcccttttcctggtgaaattcatgggcaaacgcacgctgacgttgggttatgcgattgtcattatcgacattctgctggcgccgtttacaccgtccaacaccgcgcgtaccgggggtacggtttttccggtcattaaaaacctgccgccgttgtttaaatcattccccaacgatccgtccgcgcgtcatattggcggctatttgatgtggatgatggtcattagtaccagtctgagttcgtccatgtttgtcaccggtgcggcaccaaacgtgctgggtctggagttcgtcagcaaaattgccggtatccagattagctggttgcagtggttcctctgcttcctgccggttggggttatcttgcttatcattgcgccgtggctttcctacgtgctgtacaaaccggaaatcacacacagtgaagaagtggcaacctag

SEQ ID NO: 459854 - DNA, 627 bp, Shigella boydii
atgggtgcgctgacacgcagagagtggacactgattggccttgtattgctcagcttaggtttgtgggtttttggcagtgaagtcattaatgctactgcagttggtctgctggcagtttcgctaatgctggccctgcacgttgtgccttggaaagatattacccgctataacagcgcatggaacacgctggtcaacctggcaactctggttgtgatggctaacggcctgactcgttctggctttattgactggttcgccggtaccatgagtacgcacctggaaggattctcaccaaacgcaacggtgattgtactggttctggtgttctactttgcacactacctgtttgccagcctgtctgcgcacaccgcaaccatgctgccggttattctggccgtcggtaaaggtattccgggcgtaccaatggaacaactgtgtatcctgctggtgctgtctatcggtatcatgggctgtctgacgccctatgcaaccggtcctggggtgattatttacggctgtggctatgtgaaatcaaaagattactggcgtcttggcgcaatcttcggggtgatttacatctctatgttgctgttggttggctggccgattctcgccatgtggaactaa

SEQ ID NO: 459855 - DNA, 807 bp, Shigella boydii
atgaaagcattctggcgtaacgccgcgttgctcgcggtttctctgcttcccttctcttctgccaacgccgtagcgttgcagacaaaacagtatggcgattttgatcgctatgtcctggccctctcctggcaaaccggattttgccagagtcaacacgatcgaaatcgtaacgaacgagatgaatgtcgcctgcaaaccgaaacgaccaacaaagctgattttctgaccgtacatggtctgtggccaggattgcctaaatcggttgctgcccgtggtgttgatgaacgccgctggatgcgcttcggttgcgctactcgcccaatcccgaatctaccagaagcgcacgccagccggatgtgttcatcgccggaaaccgggttatcactggaaacggccgctaaactaagcgaagtcatgccaggagctggcggacgttcctgcctggaacgctacgaatatgccaaacacggtgcctgctttggttttgatccggacgcatacttcggtacgatggtacgcctgaatcaagaaattaaagagagcgaagccggaaaattccttgcggataattacggtaaaacagtgagccgccgtgactttgacgccgcctttgccaaaagctggggaaaagagaacgtgaaagcagttaagctaacgtgccagggtaaccctgcgtatttgactgaaattcagatctcgatcaaagctgacgccatcaacgctccgctttctgcaaactcattcttgccacaaccacacccaggcaactgtggcaaaacctttgtgattgataaagtgggttattaa

SEQ ID NO: 459856 - DNA, 411 bp, Shigella boydii; identical to SEQ ID NO: 263334

SEQ ID NO: 459857 - DNA, 1053 bp, Shigella boydii
atgggggaagtcgttgaaaccggaaaggacgtaaaaaatttgcaaaaaggcgaccgggtggtaattccgtttgtcattgcttgtggcgactgttttttctgtcgaatgcagcaatatgccgcctgcgaaaataccaatgcgggtaaaggcgctgcgctcaataaaaaacagataccagctcccgcggcattgtttggttatagtcacctgtatggtggcgttcctggtggacaggcggaatatgtccgcgtccctaaagggaatgtggggccgtttaaagtaccgcctttgctttcagatgataaagcccttttcctttctgatattctgccaacggcatggcaggcagcaaaaaatgcgcagatccaacaaggttcaagcgttgcagtctatggtgccggtccagtgggattgttgacaatcgcctgtgcacggttgctcggtgcggaacagatttttgttgttgatcatcatccctaccgcttgagtttcgccgctgaccgctacggcgcgatcccgattaatttcgatgaagatagcgatccggcacagtcaattattgaacaaacggcaggtcaccggggcgtggatgcagtaatagacgccgtcggttttgaagcgaaaggcagcaccacggaaacggtgctgactaacctgaaactggagggcagcagcggtaaagcgttgcgccagtgtattgcggcggtcaggcgtggcggcattgttagcgtaccgggcgtctacgctggatttattcacggtttcctgtttggtgacgcctttgataaagggttgacgtttaaaatgggacagacccacgttcacgcatggctgggagaattattaccgttaattgagaaaggattactgaaaccagaagaaattgttacccactatatgccgtttgaagaggccgcccggggatatgagattttcgaaaaacgtgaagaggagtgccgtaaggtgattctggtacccggtgcacaaagcgcagaggcggcgcagaaggcagtttcaggtctggtgaatgcgatgccggggggaacaatatga

SEQ ID NO: 459858 - DNA, 429 bp, Shigella boydii
atgtataagacaatcattatgccagttgatgtatttgaaatggaattgagcgacaaagctgttcgccacgctgaattcctcacccaggatgacggagttattcatctacttcacgtactacccgggtcagccagcctgagcctgcaccgttttgccgctgatgtgcgtcgttttgaagagcatctgcaacatgaagcagaagaacgtctgcaaacgatggtcagccacttcaccatcgatccttcccgcattaaacaacatgtccgttttggtagcgtgcgggatgaagtcaatgagttggcagaagaactgggggctgatgttgtagttatcggttctcgcaacccatcgatttcgacccatctgttaggttctaacgcctcgagcgtgatccgccacgccaatctgcctgtactggtcgttcgctaa

SEQ ID NO: 459859 - DNA, 1596 bp, Shigella boydii
atgatgatgtttaaagcccaggagataaacatgctcgacacaaatatgaaaactcaactcaaggcttaccttgagaaattgaccaagcctgttgagttaattgccacgctggatgacagcgctaaatcggcagaaatcaaggaactgttggctgaaatcgcagaactgtcagacaaagtcacctttaaagaagataacagcttgccggtgcgtaagccgtctttcctgatcaccaacccaggttccaaccaggggccacgttttgcaggctccccgctgggccacgagttcacctcgctggtactggcgttgctgtggaccggtggtcatccgtcgaaagaagcgcagtctctgctggagcagattcgccatattgacggtgattttgaattcgaaacctattactcgctctcttgccataactgcccggacgtggtgcaggcgctgaacctgatgagcgtactgaacccgcgcatcaagcacactgcaattgacggcggcaccttccagaacgaaatcaccgatcgcaacgtgatgggcgttccggcagtgttcgtaaacgggaaagagtttggtcagggccgcatgacgttgactgaaatcgttgccaaaattgatacgggcgcggaaaaacgtgcggcagaagagctgaacaagcgtgatgcttatgacgtattaatcgtcggttccggcccggcgggtgcagcggcagcaatttactccgcacgtaaaggcatccgtaccggtctgatgggcgaacgttttggtggtcagatcctcgataccgttgatatcgaaaactacatttctgtaccgaagactgaagggcagaagctggcaggcgcactgaaagttcacgttgatgaatacgacgttgatgtgatcgacagccagagcgccagcaaactgatcccagcagcagttgaaggtggtctgcatcagattgaaacagcttctggcgcggtactgaaagcacgcagcattatcgtggcgaccggtgcaaaatggcgcaacatgaacgttccgggcgaagatcagtatcgcaccaaaggcgtgacctactgcccgcactgcgacggcccgctgtttaaaggtaaacgcgtagcggttatcggcggcggtaactccggcgtggaagcggcaattgacctggcgggtatcgttgagcacgtaacgctgctggaatttgcgccagaaatgaaagccgaccaggttctgcaggacaaactgcgcagcctgaaaaacgtcgacattattctgaatgcgcaaaccacggaagtgaaaggcgacggcagcaaagtcgttggtctggaatatcgagatcgtgtcagcggcgatattcacaacatcgaactggccggtattttcgtgcagattggtctgctgccgaacaccaactggctcgaaggcgcagtcgaacgtaaccgcatgggtgagattatcattgatgcgaaatgcgaaaccaacgtcaaaggcgtattcgcagcgggtgactgtacgacggttccgtacaagcagatcatcatcgccactggcgaaggtgccaaagcctctctgagtgcttttgactacctgattcgcaccaaaactgcataa

SEQ ID NO: 459860 - DNA, 564 bp, Shigella boydii
atgtccttgattaacaccaaaattaaaccttttaaaaaccaggcattcaaaaacggcgaattcatcgaaatcaccgaaaaagataccgaaggccgctggagcgtcttcttcttctacccggctgactttactttcgtatgcccgaccgaactgggtgacgttgctgaccactacgaagaactgcagaaactgggcgtagacgtatacgcagtatctaccgatactcacttcacccacaaagcatggcacagcagctctgaaaccatcgctaaaatcaaatatgcgatgatcggcgacccgactggcgccctgacccgtaacttcgacaacatgcgtgaagatgaaggtctggctgaccgtgcgaccttcgttgttgacccgcagggtatcatccaggcaatcgaagttaccgctgaaggcattggccgtgacgcgtctgacctgctgcgtaaaatcaaagcagcacagtacgtagcttctcacccaggtgaagtttgcccggctaaatggaaagaaggtgaagcaactctggctccgtctctggacctggttggtaaaatctaa

SEQ ID NO: 459861 - DNA, 426 bp, Shigella boydii
atgttaaaaaagatacttttactggctctgcttcctgcaatcgccttcgcagaggaacttcctgctccagtaaaagcgattgaaaaacagggcattacaatcatcaaaacgttcgatgcccccggaggaatgaaaggttatctcggaaagtatcaggatatgggcgtcaccatctacctgactccagatggtaagcacgctatctctggttacatgtacaacgagaaaggtgaaaacctgagtaacacacttatcgaaaaagaaatttacgcaccagccggacgcgaaatgtggcaacggatggaacaatcccactggctcctcgacggtaaaaaagatgcgccggtcattgtctacgtcttcgccgatccgttctgcccatattgtaaacagttctggcagcaggcgcgtagactggccccctga

SEQ ID NO: 459862 - DNA, 2076 bp, Shigella boydii
atgagtcagcttgatgacaccatccttgatgcgctgacgcacgttactttcccaaagggttttgcacaggcagagcccgcatgggttgtcacggtagacggtgttaattacccactctggcaaacagatgccctggtagtcggcagtggtgcagcaagattacgtgcggcagttgaacttaaacgccgccagcaaaatgtgctgatcgctaccgccgggttatatatggggacgtcggcatgttctggttccgataaacagacactatttaccgccgctaccgcgggcaacggcgacaacttcaccaaactggcagaggcactggcgagcggtggggcgatggatcacgacaccgcttatgtcgaagcggtaggttctctgcacactctaggcgggttgcaatatcttggtctggaattaccggaagatcgctatggcgcgattcttcgttatcaaaccgaccatgacgaagccgggcgtgcaacctcgtgtgggccgcgtacctcaaggttaatggtgaaagtgctgttggaagaagtacagcgcctcgccattccagtgttgaccagtgcaacagtgattaaactgctgcatcagcgtgacgaaaacggcgaagaccgcgtggcaggggcaatcctcgcgaccggtcatcgcgcccataacccatgggggctggcaattgtgactgcgcccaatgtggtactggcaacgggcggaccgggcgagctttatcgcgacagtgtttatccacataaatgcttcggctcgctggggctggcgctggaggaaggtctgacgctaaccaatctgaccgaaagccagtttggtataggcacgccgcgtagcacgtttccgtggaatttatccggcacctatgtacaggtgatcccgtatatctattccgtggatgctgagggtaacgagtataacttcctcgcggattactatcgcaccacccaggagctggcttcaaacattttccgtaaaggctatcagtggccgttccacgccactcgggtgatggattttggctccagcttgttagatatggcagtagcgcaagagcagcaatcagggcgtcaggtatttatggatttcaatcgcaatcctgaagcggtgccgggtgacctgccgttctcattagatcgactggacgacgacgttcgcgcgtatctggaaaataacgacgctctggcaccatcgcccatcgaacggctgcaacgaatgaatccgctgtctatctcgctgtataagatgcacggttacgatctcaccacacagcctttgcagtttgccatgaataatcagcatatgaatggctgcattgaagtggatatctggggacaaacctccctgcccggctgtttcgccgtgggggaagttgctggcacacacggcgtcactcgcccaggtggtgcagcattgaatgccgggcaggtttttgctgttcgtctggcacgttttattggttgcacgcaaaagcggtctgttgagggtgatgtcgcgcagctggtagcctcatctctgaatatagtcagagaagttatcgctcaggcactggcaaacgagaacggaatggcgctggtaacggtgaaagacaaaatccaggcgcgaatgtctgattacgccggatttatttgtcatgccgataaagttcgtcatgccacccgtgacgccctgctgctaagtgagtttgtacaacaacacggtttaaccatcaatcacgcaggcgaaattgccgaactgtttatgtggcggcatatgacgctgacttctgccgccgtattaacgcaattgacgcattatattgacgcaggtggaggcagtcgtggagcacggatggttattgatccacaaggcaaatgcctcccacaaactcgtcgcggcgcaaaagaagaatggcgttttcgctctgaacgtgctgaagacaaaaatcacagattaacgattcaatattcgcaaggttcttttattaccgaagtgaagtctttacgtatgcaaccgtgtattaacggtatttactttgaaaaaaactggccagactttttaggtaatgctgccaacttactgatttag

SEQ ID NO: 459863 - DNA, 1542 bp, Shigella boydii
atgcgtaagataacaaccgccgaggcactggcggcgcaaattcaggacggtgcgactattgctattagcggtaacggcggcggtatggtagaagccgaccatattctggctgctattgaagcgcgtttcctgcaaaccggacaccctcgcgacctgacgctaatccactcgctgggtattggcgatcgcgactgcaaaggcactaaccgttttgcgcacgcagagatgctcaaacgcattattgccgggcactttacctggtcgcccaaaatgcaggcgctggtaaaaaataacacgattgaagcctactgctttcctggtggcgtgattcaggtactgctacgggagatcggctccggacgtccggggctttttacccacgttgggctgggatcgtttgttgatccacgcaatggcggcggtaagtcgaatgaatgcactaccgacgacctggtagaactgattgaaatcgacggtgaaaccaaacttcgttatcgccctttcaaagtggattacgcgattttgcgtggcacttatgccgatcctcgaggcaacgtcagccttgaagaagaagcgattgatatggatagctattccatggcgctggcagcacacaacagcggcggcaaagtgttcgtacaggtacgcgatgtgctggaagctggcgcgattgaaccacgccgagtcaaattaccgggcattctggttgatggcatcgttgaacaccgcaaacagccacaaacctatcttggcggttacgacctgaccatcagcggccaacatcgccgtctgagttctaacgacgctattgaactggttagtcatccggtacgtcgcctgattgcccgtcgggcagcacgcgaactggtagctggcgcttcaaccaactttggctttggtattcccggcggcgttccaggagtagcgctgcgcgaaggcgttccttaccaaagtttatggctgagcgtcgagcaaggcgtacataacggcatgatgctggatgatgcgtttttcggctgcgcccgcaacgccgatgccattattccatcactcgatcaatttgagttctacagtggcggagggatcgatatcaccttcctcggcatgggagagatggatcagtacggtaacgtcaacgtctcccatctcaatggcaatctgattggccccggcggatttctcgaaattgcgcaaaatgcccgtaaagtggtgttctgcggcacgttcgacgctaaaggcagcaagatcgatataacaccagatggcttgcatatcgcccagtcaggtcaaatccctaaactggttaccaaggtggaaaaaatcacttttagcgccgcctacgcacagcaaagtggtcaggaagtgttgtatatcactgaacgcgcagtattccagttaacggcagaaggcgttgaattaattgaaatcgcgccgggtgtggagattgagcgcgacattctgccgtatatggctttccgtccaattatcaagcacccacgcctgatggaaagtagcctgtttacgccgatggaggatgcatga

SEQ ID NO: 459864 - DNA, 777 bp, Shigella boydii
atgagtgaccaacccgttctgttcagcagagtggcggcttcctgccgcctgacattgaaccgtgaagataaatgtcatgctattaacgaagaggtgatcgaatctctcgaccattatttaaatgaaattgaaaacgacaccacattacgattagtcgaattaacggcaaccggcgataaattcttttgtgcgggcggcgatattaaatcgtggtcggcctattcgccattagatatgggcagaaaatggattaaacgcggtaatgacgtttttaatcgcctgcgaaacataccccaattaaccgttgcgaatctcaacggtcataccatcggcggtggtattgaactggccttgtgctgcgatattcgtattgcccgccccggcgcgaaattctctaacccggaagtgatgctcggcatggtgcctggctggatgggcattgaacgtgtgcttaatcaggtcggtccggtggtcggtcgccagatgctgatgctgggtaaacgcctgacggcgcaggaagctcaggcggcgaatttaattgatgaagtggtagaaaaagaacaggtggaaagctggatggcgaaccagttagcgcagctggaaaaatgcggtccggtggccctggcgcatattaagcaactgattctggcactggaaaataaacatgccgattacccgcaccagctactggccggattaatgtccgccactcaggattgccagcaggcgacgcgcgcctttgccgaaaaaagtagcgtgagcttccataatcaataa

SEQ ID NO: 459865 - DNA, 657 bp, Shigella boydii
atgagcgtttccggtttgtgccgtagcacttactacaccgcgccgacactggcggaacgcaaactggcgattgatgataaccgccgggcgctggacgacgcagcggtgcttaacgccgcctgttatatgcaggtggttggcggtctgccaacgggcactaaagatctatatgaagcgcgagaacaagtgaaacaagggattcgccagttgctgccacattcgaaagatgtcggcgtgccaattgcgctggagccactgcacccgatgacagctgccgatcgctcttgcctgtgcacgttacgtcaggcgctggactggtgtgatgaactcgatcccgatggtgagtttggcctcggcgtggcggtggatgtttatcacgtctggtgggatccggatctcgccagtcagatcctgcgtgccggaaaacgcatcctcgcgtttcatgtttccgactggttagtgccgaccactgatctggtcaatgaccgtggtatgccgggagatggcgtcatcaatattccgtcaattcgtcggctggttgaaaacgccggatttaatggtgctattgaactggaaatattctcgccttactggtggcagaaagatattaacagcacgctggatattagcgtcgatcgcatcgcgcattattgttaa

SEQ ID NO: 459866 - DNA, 189 bp, Shigella boydii
atgagagatctgttacaacgcccggatttattcagtatcaataccgcgacactgggctataaaacgccgctacccgccattattgatgcctgcgccgcacgcggtattggcgcaattgcccctggcgcagggagttgcagggtgaagatctccagcaaatcacccgccagcttgccgccagtaacatga

SEQ ID NO: 459867 - DNA, 792 bp, Shigella boydii
atgaaatccactcgtcctgttgccgtgattaccggagccgctcgcggtattggaaagggctgtgcgcaggagcttgctcgtggcgggtttaacctgctgattaacgatcgtcccgatgccgacagcgtagaaaaactgcatatcacacaacaagaatgtttggcggaaggcgtggaagtgatttgcttccctgctgatgtcggtgatctatctctgcatgaggagatgctcgacgcggcgcaaaaccagtgggggcggctggagtgtctgctcaataacgcggggatttcagtgaaaaaacgcggtgacctcctcgacctcgaaccagacagcttcgatcaaaacattgccattaacacccgcgcgccgttcttccttgctcaggcattcagtaagcgcttactggcacagccgaaaccggaagcggagctgccgcaccgctcgattattttcgtcagttccatcaacgccatcatgctggcgatgaatcgcggcgaatacaccattgccaaaaccgccgtttctgccgctgctcgtctgtttgctgctcgcctttgtaatgaacaaattggcgtttatgaagtgcgccctggtctcatcaaaactgatatgactattccggcaacggcttattacgacgaactgattgccaaaggtctggtgccgtggggacgttggggttatccggctgatattgcttccaccgtccgcgcaatggcggaaggtaaactgatttacacctgtggtcaggcggtcgccatcgacggcggcttaagtatgccgcgcttctga

SEQ ID NO: 459868 - DNA, 648 bp, Shigella boydii
atgtatcttgataccagcaacgtacagagcctgaaggaaaagctgctgttatgcgcggttaatgaatttgccgaatatggttatgaaggggccagggtcgataatattgttaaggctgcggggtgtagtaaacagacggtttatcatcactttggtaataaagaaaatttatttattgaagtactggaatatacctggaacgatattcgacaaaaagaaaaggcccttgatttctcagatcttctgccacaaaaggctattgagaaaattattgattttacatgggattattatattgctaacccctggtttttaaaaattgtgcatagtgaaaatcaaagtaaaggtgtgcattatgcaaaatcacagcgtctcttagaaattaaccatgcgcacttgcagttaatggaatccttattggatgaagggaagaaacacaatatttttaagccagatatcgacccattgcaggtgaatattaatattgctgcgcttggcggatattatttgatcaaccagcatacgcttggcctggtttatcatatcagtatggtttccccccaggcactggaagccagacgtaaggtcatcaaagagacaatccttagctggcttttggttgacccttcatctaccgcgcacgaataa

SEQ ID NO: 459869 - DNA, 639 bp, Shigella boydii
atgcccgggcgctttgaactaaaaccaaccctggagaaagtctggcacgcgccggacaattttcgcttcatggacccgctgccgccgatgcatcgtcgggggatcattattgccgccattgtattggtggtcggatttctgcttccatctgatgatacgcccaacgcgccggtcgtgacgcgtgaagcgcagttagatattcagtcgcaatcacaaccgccgacagaagaacagctgcgggcgcaattagtcacaccacaaaatgatcctgatcaggtggctccggtcgctccagaacctatacaggaaggccagccagaagagcagccgcaaactacccaaacgcaaccattccagccagatagcggaattgataatcaatggcgctcttaccgtgtcgaacccggtaaaacgatggcgcagctgttccacgaccacggactgcccgctaccgatgtctatgcaatggcgcaggtagaaggcgcgggtaagccgctgagtaatttgcaaaacgggcagatggtgaaaatccgccagaacgccagcggcgtggtgacgggcttaaccattgatacggggaataatcaacaggtcctgttcacccgccagccggatggcagttttattcgtgcgcggtag

SEQ ID NO: 459870 - DNA, 621 bp, Shigella boydii
atgaccaccccaacttttgacaccatcgaagcgcaagcaagctacggcattggtttgcaggtagggcaacaactgagtgaatctggcctggaagggctgctgccagaagcactggttgcaggtattgccgatgcgctggaaggcaaacatccggctgttccggttgatgtggtgcatcgcgcgctgcgtgaaatccacgaacgcgccgatgccgttcgtcgtcagcgtttccaggcgatggctgctgaaggtgtgaaatacctggaagaaaacgccaaaaaagaaggtgtgaatagcaccgaatctggcctgcaattccgcgtgatcaaccagggtgaaggcgcaattccggcacgtaccgaccgcgttcgtgttcattacaccggtaaactgatcgacggcaccgtgtttgacagctccgttgctcgtggtgaacccgctgaattcccggttaacggcgtgatccctggctggattgaagcactgactctgatgccggtaggttctaaatgggaactgactatcccgcaggaactggcatatggcgagcgcggcgcaggtgcatccatccctccgttcagcaccctggtgtttgaagtcgaactgctggaaatcctctaa

SEQ ID NO: 459871 - DNA, 1413 bp, Shigella boydii
atggtagatcaggtaaaagtcgttgccgatgatcaggctccggctgaacagtcgctacggcgcaatctcacaaaccgacatattcagcttattgccattggcggtgccattggtacggggttgtttatggggtctggcaaaacgattagccttgccgggccgtcgatcattttcgtttatatgatcattggttttatgctctttttcgtgatgcgggcaatgggggaattgctgctttcgaatctggaatacaaatcttttagtgacttcgcttccgatttactcgggccgtgggcaggatatttcactggctggacttactggttctgctgggttgtaaccggtatggcagacgtggtggcgatcacggcttatgctcagttctggttccccgatctctccgactgggtcgcctcgctggcggtgatagtgctgctgctgacgctcaaccttgccaccgtgaaaatgttcggtgagatggagttctggtttgcgatgatcaaaatcgtcgccatcgtgtcgctgattgtcgtcggcctggtcatggtggcgatgcactttcagtcaccgactggtgtggaagcgtcattcgcgcatttgtggaatgacggcggctggttcccgaaaggtttaagtggcttctttgccggattccagatagcggttttcgctttcgtggggattgagctggtaggtacaacagctgcggaaaccaaagatccggagaaatcactgccacgcgcgattaactccattccgatccgtatcattatgttctacgtcttcgcgctgattgtgattatgtccgtgacaccgtggagttcggtagtcccggagaaaagcccgttcgttgagctgtttgtgttggtaggtttgcctgcggctgccagcgtgatcaactttgtggtgctgacctctgcggcgtcttccgctaacagcggcgtcttctctaccagccgtatgctgtttggtctggcgcaggaaggtgtggcaccgaaagcgttcgctaaactttctaagcgcgcagtaccagcgaaagggctgaccttctcctgcatctgcctgctcggtggcgtggtgatgcagtatgtgaatcctagcgtgattggtgcgttcacgatgattacaaccgtttccgcgattctgtttatgttcgtctggacgattatcctttgctcgtacctggtgtaccgcaaacagcgtcctcatctgcatgagaagtcgatctacaagatgccgctcggcaagctgatgtgctgggtatgtatggcgttctttgtgttcgtggtcgtgttgctgacactggaagatgacactcgccaggcgctgctggttaccccgctgtggtttatcgcactggggctgggctggttgtttattggtaagaagcgggctgctgaactgcggaaataa

SEQ ID NO: 459872 - DNA, 663 bp, Shigella boydii
atggcttatcgcgaccaacctttaggtgaactggcgctctctattcctcgcgcttcagctctgtttcgtaaatatgatatggattactgctgtggcggtaagcagacgctggcgcgcgcggcggcacgtaaagaactggatgttgaggtcattgaagctgaactggcaaagcttgctgaacaaccgattgagaaagactggcgtagcgccccgctggcagaaatcattgaccatatcatcgtgcgctaccacgatcgtcaccgcgagcaactgccggagctgatcctgcaagcgactaaagtcgagcgcgttcacgccgacaaaccgagcgtgccaaaagggctgacaaaatacctgaccatgctgcatgaagagctttccagccacatgatgaaagaagagcagatcctcttcccgatgatcaaacaaggcatgggcagccaggcaatggggccaatcagcgtaatggaaagcgagcacgatgaagcgggcgaactgctggaagtgatcaaacacactaccaataacgtcacaccgccgccagaagcctgcaccacctggaaagcgatgtataacggcattaatgaactgattgatgacctgatggatcacatcagtctggaaaacaatgtactgttcccacgcgcgctggcgggtgagtga

SEQ ID NO: 459873 - DNA, 966 bp, Shigella boydii
atgattagcggcgtgctgtacgccctgttagcagggttgatgtgggggcttatttttgtcgggccgttgatcgtaccggaatacccggcgatgttgcagtcgatggggcgttatctggcgttagggttaattgcgctgcccattgcctggctgggacgcgtgcgtctgcgtcagttggcgcgtcgcgactggcttaccgccttgatgctcacaatgatgggcaacctcatctattacttctgccttgccagtgccattcaacgtactggtgcgcctgtttccacgatgattatcggcaccctgccggtggtgattcccgtttttgccaatctgctttatagccagcgcgacggcaaactcgtgtggggaaaactcgccccggcactggtttgtattggcatcggcctggcgtgtgtgaatattgctgagttaaaccacggactccccgattttgactgggcacgttatacctcaggcatcgtgctagcgttagtttccgtggtctgctgggcatggtatgccctgcgcaacgcccgctggctgcgggagaatcccgacaaacatccgatgatgtgggcgacggcgcaggcgctggtcacactgccggtttctctcatcggctatctcgtcgcctgttactggctgaatacgcaaacgccggacttctccctaccttttggcccccgtccgctggtgtttattagtctgatggttgcgatagccgtgctttgctcatgggttggcgcactctgctggaacgtcgccagccagcgattaccgacagtgattctcgggccgctgatcgttttcgaaacactggcaggtttgctgtacacctttttgatacgccagcaaatgccgccgctgatgacgctgagcggtatcgcgctgttagtggttggcgtggtcattgcagtcagagcaaaaccggaaaagcctttaactgaatctgtctcagaaagttga

SEQ ID NO: 459874 - DNA, 861 bp, Shigella boydii
atgatcgctattactggtgccactggccaacttggtcactatattattgaatccttgatgaaaacggttcctgccagccaaatagtggctatcgttcgtaatccggcaaaagcccaggctctggcagcacaaggcattaccgtgcgtcaggctgactacggcgatgaagccgcactgacatctgcacttcagggagtggaaaaactactgctgatctcttccagcgaagtgggtcaacgtgccccgcagcatcgtaatgttattaatgccgcaaaggcggctggcgtgagatttatcgcttataccagcctgctacatgcagatacctccccgctcggcctcgccgatgagcacattgagacggagaaaatgttggctgattctggcatcgtttacaccctgctgcgcaacggctggtacagcgaaaactacctcgccagcgccccggcagcactggaacacggcgtatttatcggtgcggcgggcgatggcaaaatcgcctcagcaacgcgggcagattatgcggcagctgcggcacgcgtgattagcgaagccggtcacgaaggcaaggtttacgaactggcgggcgatagtgcctggacgttgacacagttagcgacagagctgaccaaacagagcggcaaacaggttacctatcaaaatctgagcgaagccgatttcgccgcggcactgaaaagcgtcggactgcccgacggactggcggatatgctggcggattctgacgttggcgcatcgaaaggtggtctgtttgataacagcaaaacgcttagcaaattgattggccgcccaacgacaacgttagccgaaagcgtaagccatctttttaatgttaataactag

SEQ ID NO: 459875 - DNA, 381 bp, Shigella boydii
atgagtcaggttagcctgtcgcaacaactgaaagagggtaatctctttgcggaacagtgcccgtcgcgcgaggtgttgaaacacgtcaccagccgttggggggtgttgattctggtggcgctacgcgaaggtactcatcgctttagcgacctgcggcgcaaaatcggcggggtgagcgaaaagatgcttgcgcagtcgttacaggcgttagaacaggatggttttcttaaccgtatcgcgtatccggtggtgccaccgcatgtggaatatagcctcacgccgctgggcgagcaggtgagcgaaaaggttgctgcactggcggactggattgagttgaatttgcccgaggtgttggcggtgcgggatgaacgtgcggcataa

SEQ ID NO: 459876 - DNA, 660 bp, Shigella boydii
ttgaccttccgtaatgccgccgatctttatctctaccccaatacgctgattgtagtgaaagccagcggtaaagaggtgaaagagtggctggagtgctccgccggacagtttaaccagattgatcctaacagcacgaaaccacagtcactcatcaactgggatggtttccgcacttataactttgatgttattgatggtgtgaattatcagattgatgttacccaacccgcccgctatgacggcgagtgccagatgattaatgccaatgcagagcggattaagaacctgacctttaatggcaagccgattgatccgaacgctatgttcctcgttgccaccaataactatcgcgcttacggcggcaaatttgccggtacgggcgacagccatatcgcttttgcttcaccggatgagaatcgctcggtgctggcagcgaggattgctgatgagtcgaaacgtgcgggagaaattcacccggcggcagataacaactggcgtttagcaccgatagctggcgataagaaactggatatccgtttcgaaacttccccgtcagataaagccgcagcgtttattaaagagaaagggcaatatccgatgaataaagtcgcgaccgatgatatcgggtttgcgatttatcaggtggatttgagtaagtaa

SEQ ID NO: 459877 - DNA, 2115 bp, Shigella boydii
atggctcgtacaacacccatcgcacgctaccgtaacatcggtatcagtgcgcacatcgacgccggtaaaaccactactaccgaacgtattctgttctacaccggtgtaaaccataaaataggtgaagttcatgacggcgctgcaaccatggactggatggagcaggagcaggaacgtggtattaccatcacttccgctgcgactactgcattctggtctggtatggctaagcagtatgagccgcatcgcatcaacatcatcgacaccccggggcacgttgacttcacaatcgaagtagaacgttccatgcgtgttctcgatggtgcggtaatggtttactgcgcagttggtggtgttcagccgcagtctgaaaccgtatggcgtcaggcaaacaaatataaagttccgcgcattgcgttcgttaacaaaatggaccgcatgggtgcgaacttcctgaaagttgttaaccagatcaaaacccgtctgggcgcgaatccggttccgctgcagctggcgattggtgctgaagaacatttcaccggtgttgttgacctggtgaaaatgaaagctattaactggaacgacgctgaccagggcgtaaccttcgaatacgaagatatcccggcagacatggttgaactggctaacgaatggcaccagaacctgatcgaatccgcagctgaagcttctgaagagctgatggaaaaatacctgggtggtgaagaactgactgaagcagaaatcaaaggtgctctgcgtcagcgcgttctgaacaacgaaatcatcctggtaacctgtggttctgcgttcaagaacaaaggtgttcaggcgatgctggatgcggtaattgattacctgccatccccggttgacgtacctgcgatcaacggtatcctggacgacggtaaagacactccggctgaacgtcacgcaagtgatgacgagccgttctctgcactggcgttcaaaatcgctaccgacccgtttgttggtaacctgaccttcttccgtgtttactccggtgtggttaactctggtgataccgtactgaactccgtgaaagctgcacgtgagcgtttcggtcgtatcgttcagatgcacgctaacaaacgtgaagagatcaaagaagttcgcgcgggcgacatcgctgctgctatcggtctgaaagacgtaaccactggtgacaccctgtgtgacccggatgcgccgatcattctggaacgtatggaattccctgagccggtaatctccatcgcagttgaaccgaaaaccaaagctgaccaggaaaaaatgggtctggctctgggccgtctggctaaagaagacccgtctttccgtgtatggactgacgaagaatctaaccagacaatcatcgcgggtatgggcgaactgcacctcgacatcatcgttgaccgtatgaagcgtgaattcaacgttgaagcgaacgtaggtaaaccgcaggttgcttaccgtgaaactatccgccagaaagttaccgatgttgaaggtaaacacgcgaaacagtctggtggtcgtggtcagtatggtcatgttgttatcgacatgtacccgctggagccgggttcaaacccgaaaggctacgagttcatcaacgacattaaaggtggtgtaatccctggcgaatacatcccggccgttgataaaggtatccaggaacagctgaaagcaggtccgctggcaggctacccggtagtagacatgggtattcgtctgcacttcggttcttaccatgacgttgactcctctgaactggcgtttaaactggctgcttctatcgcctttaaagaaggctttaagaaagcgaaaccagttctgcttgagccgatcatgaaggttgaagtagaaactccggaagagaacaccggtgacgttatcggtgacttgagccgtcgtcgtggtatgctcaaaggtcaggaatctgaagttactggcgttaagatccacgctgaagtaccgctgtctgaaatgttcggatacgcaactcagctgcgttctctgaccaaaggtcgtgcatcatacactatggaattcctgaagtatgatgaagcgccgagtaacgttgctcaggccgtaattgaagcccgtggtaaataa

SEQ ID NO: 459878 - DNA, 471 bp, Shigella boydii; identical to SEQ ID NO: 2391

SEQ ID NO: 459879 - DNA, 375 bp, Shigella boydii
atggcaacagttaaccagctggtacgcaaaccacgtgctcgcaaagttgcgaaaagcaacgtgcctgcgctggaagcatgcccgcaaaaacgtggcgtatgtactcgtgtatatactaccactcctaaaaaaccgaactccgcgctgcgtaaagtatgccgtgttcgtctgactaacggtttcgaagtgacttcctacatcggtggtgaaggtcacaacctgcaggagcactccgtgatcctgatccgtggcggtcgtgttaaagacctcccgggtgttcgttaccacaccgtacgtggtgcgcttgactgctccggcgttaaagaccgtaagcaggctcgttccaagtatggcgtgaagcgtcctaaggcttaa

SEQ ID NO: 459880 - DNA, 288 bp, Shigella boydii
atgctgcacacgttacatcgttcaccctggctgacggattttgctgcgctgctgcgtctgctcagtgaaggagacgaactgctattattgcaagatggcgtaactgccgcagttgacggtaaccgctaccttgaaagtctgcgtaatgcccccattaaggtctatgccctgaacgaagaccttattgcccgcggtttgactggtcaaatttcgaacgacatcattcccattgactatactgatttcgtcagacttacggttaagcactccagccagatggcctggtga

SEQ ID NO: 459881 - DNA, 360 bp, Shigella boydii
atgaaacgaattgcgtttgttttttctactgcacctcatggtacagctgctggtcgggaaggtttagatgctttactggcaacttccgcattaactgacgatctggccgtcttctttattgctgatggcgtttttcagctgctgtcaggacaaaagcccgatgcagtgctggcgcgtgattacattgccacttttaaattgttgggtctgtacgacattgaacagtgctgggtttgtgcggcttcactgcgcgaacgcgggttagatccgcagacaccctttgttgtcgaagccacgccgctcgaagcagatgccttacgccgcgaactcgccaactacgatgttattttgaggttttga

SEQ ID NO: 459882 - DNA, 387 bp, Shigella boydii
atgcgttttgccatcgtggtgaccgggccagcatacggtacgcaacaggcgagtagtgcttttcagtttgcgcaggcgctgatagtagaaggccatgagttaagcagcgtctttttctatcggggaggggtctataacgctaaccaattgacctcaccggcaagtgacgaatttgaccttgtgcgcggctggcaacagttgaatgcgcaacatggtgtggcgctgaatatctgcgtagcggcagcgttacgccgcggtatcgtcgatgaaactgaagcaggaaggctggggctggcttcgtcaaaccttcagccgggatttaccttaagcggacttggcgcgctggcggaagcctcgctgacctgtgacagggtggtacagttctga

SEQ ID NO: 459883 - DNA, 723 bp, Shigella boydii
atgtccaggtcgcttttaaccaacgaaaccagtgagttggatttactggatcaacgtcctttcgaccagaccgattttgatattctgaaatcctacgaagcggtggtggacgggttagcgatgcttattggctcccactgtgaaatcgttttgcactctttgcaggatctaaaatgttcagccattcgcattgctaacggtgaacatacaggccggaagattggttcgccaattactgacctggcgctacgtatgctgcacgatatgacgggagcggatagcagcgtttctaaatgctactttactcgcgccaaaagcggcgtattaatgaagtccctgactatcgcgattcgtaaccgcgaacagcgtgtaattggtctgctgtgcatcaatatgaatcttgatgttcccttctcgcagattatgagcacttttgtgccgccagaaaccccggatgtcggttcaagcgtcaactttgcctcttctgttgaagatctggttacccaaacgctggagttcaccatcgaagaagtgaatgccgatcgcaatgtttctaataacgccaaaaatcgtcagatcgtgctgaatctctacgagaaagggatcttcgatattaaagatgcgatcaaccaggttgctgaccgcctgaacatctccaaacacactgtctatctctacatccgccagttcaagagcggtgatttccaggggcaagataagtaa

SEQ ID NO: 459884 - DNA, 813 bp, Shigella boydii
atgaaatcactgtttaaagtaacgctgctggcgaccacaatggccgttgccctgcatgcaccaatcacttttgctgctgaagctgcaaaacctgctacaactgctgacagcaaagcagcgttcaaaaatgacgatcagaaatcagcttatgcactgggtgcttcgctgggtcgttacatggaaaactctcttaaagaacaagaaaaactgggcatcaaactggataaagatcagctgatcgctggtgttcaggatgcatttgctgataagagcaaactctccgaccaagagatcgaacagactctgcaagcattcgaagctcgcgtgaagtcttctgctcaggcgaagatggaaaaagacgcggctgataacgaagcaaaaggtaaagagtaccgcgagaaatttgccaaagagaaaggtgtgaaaacctcttcaactggtctggtttatcaggtagtagaagccggtaaaggcgaagcaccgaaagacagcgatactgttgtagtgaactacaaaggtacgctgatcgacggtaaagagttcgacaactcttacacccgtggtgaaccgctttctttccgtctggacggtgttatcccgggttggacagaaggtctgaagaacatcaagaaaggcggtaagatcaaactggttattccaccagaactggcttacggcaaagcgggtgttccggggatcccaccgaattctaccctggtgtttgacgtagagctgctggatgtgaaaccagcaccgaaggctgatgcaaagccggaagctgatgcgaaagccgcagattctgctaaaaaataa

SEQ ID NO: 459885 - DNA, 219 bp, Shigella boydii
atgcaggatttatcattggaagcacgcctggcagagctggagagccgactggcttttcaggaaatcaccattgaagaactgaacgtcacggtgaccgctcatgaaatggagatggcgaaactgcgcgatcatctgcgtctgctgaccgagaagttaaaagccagccagccgtcgaacatcgcgtcgcaggctgaagaaacgccaccgccacattattga

SEQ ID NO: 459886 - DNA, 591 bp, Shigella boydii
atgaaagtagcaaaagacctggtggtcagcctggcctatcaggtacgtacagaagacggtgtgttggttgatgagtctccggtgagtgcgccgctggactacctgcatggtcacggttccctgatctctggcctggaaacggcgctggaaggtcatgaagttggcgacaaatttgatgtcgctgttggcgcgaacgacgcttacggtcagtacgacgaaaacctggtgcaacgtgttcctaaagacgtatttatgggcgttgatgaactgcaggtaggtatgcgtttcctggctgaaaccgaccagggtccggtaccggttgaaatcactgcggttgaagacgatcacgtagtggttgatggtaaccacatgctggccggtcagaacctgaaattcaacgttgaggttgtggcgattcgtgaagcgaccgaagaagaactggctcatggtcacgttcacggcgcgcacgatcatcaccacgatcacgaccacgacggttgctgcggcggtcatggccacgatcacggtcatgaacacggtggcgaaggctgctgtggcggtaaaggcaacggcggttgtggttgccactaa

SEQ ID NO: 459887 - DNA, 201 bp, Shigella boydii
atggcaatccgaaaacgttttattgcgggcgcaaaatgcccggcctgtcaggcacaggattcaatggcgatgtggcgcgaaaataatattgatattgttgaatgcgttaagtgcggacatcagatgcgagaagcagacaaagaagcccgcgatcacgttcgcaaagatgagcaagtgatcgggatttttcatccggactag

SEQ ID NO: 459888 - DNA, 1806 bp, Shigella boydii
atggaaggttccgattttttactcgcaggagtgctgtttctcttcgcggcggtggctgcggtgccgttggcatcgcggctggggattggcgctgtgttgggatatttgctggcagggattgcaattggcccgtgggggctggggtttattagcgacgtcgatgagatcctccacttttcggaactcggcgtggtattcctgatgtttatcatcggtcttgagttgaatccctccaaactttggcaactgcggcgttcgatttttggcgtaggcgcggcacaggtgctgttaagcgcggcgttgctggcgggattattgatgctgacggatttcgcctggcaggcggcggtggtcggtggcattggccttgcgatgtcttcaactgcaatggcgttgcaattgatgcgtgagaaagggatgaatcgcagcgaatccggccagctcgggttttcggttctgctgtttcaggatctggcagtgatcccagcactggcgttagtgccgttgttggcggggtcggcagacgaacatttcgactggatgaagatcggcatgaaggtgctggcgtttgtcggcatgctgattggtgggcgctatttactgcgtccggtattccgctttattgcagcttctggcgtgcgggaagtgttcaccgccgcgacgctgctgctggtgttgggttccgcattgtttatggatgcgctggggctgtcgatggcgctcggtacatttattgcgggcgtgctgctggcggaaagtgaatatcgccatgaactggaaacggctatcgatcccttcaaaggcttgctgctcggtttgttctttatctctgtcggcatgtcgctcaacctcggggtgctttatatccatctgttgtgggtagtgataagcgtggttgtgctggtggcggtgaaaattctcgtgctgtatctgctggcgcgattgtatggcgtgcgtagctcagagcggatgcagtttgctggcgtgttgagtcagggcggtgagtttgcctttgtcctcttttctaccgcttcttcacaacgtttattccagggcgaccagatggcgctgttgctggtgacggtgacgctttccatgatgaccacgccgttgctgatgaagctggtggataaatggttatcccgccagtttaacggaccggaagaagaagacgaaaaaccgtgggtcaacgatgataaaccccaggtcattgtcgtgggcttcgggcgttttggtcaggtgattggtcgtttgctgatggcaaataaaatgcgcattaccgtgctggagcgggatatcagcgccgttaacctgatgcgtaaatatggctacaaagtttattacggcgacgccacgcaggtcgatctattacgttctgcgggtgcagaggccgctgagtctatcgtcattacctgtaacgagccggaagacaccatgaagctggtggaaatatgccagcagcactttccgcatttgcatattcttgcgcgagcgcgcggacgtgtggaagcgcatgagttattacaggcaggggtgacgcagttttcccgtgaaacattctccagtgcgttagagctggggcgcaagactttggtcacgcttgggatgcatccgcatcaggcgcagcgggcgcaactgcattttcgccgcctggatatgcggatgctgcgagagctcatcccaatgcatgccgatactgtacaaatttctcgcgccagggaagcccgacgcgaactggaagagattttccagcgtgaaatgcaacaagaacgacgccagctggacggctgggatgaatttgagtag

SEQ ID NO: 459889 - DNA, 552 bp, Shigella boydii
atgtctcagccagcgaaagttttgctgctgtatgcccatccggaatctcaggactcggtggcaaaccgggtactgcttaaaccggccacgcagctcagcaatgttaccgtgcacgacctttacgcgcactatcccgatttttttattgatatcccccgtgagcaggcattactgcgcgagcacgaggtgattgtctttcagcatcctctttatacctatagctgcccggcgctactgaaagagtggctggaccgggtattaagtcgtggttttgccagcgggccgggaggaaaccaactggcgggaaagtactggcgtaacgtgattaccaccggcgagccggaaagtgcttaccgttatgacgcgctgaatcgctacccgatgagcgatgtgctgcgcccctttgaactggcggcgggcatgtgccggatgcattggttaagtcccatcattatttactgggcgagacggcaaagcgcaaaggagctggcgaaccacgccagagcctacggtgactggctggcaaatccgctgtctccaggaggccgctga

SEQ ID NO: 459890 - DNA, 1914 bp, Shigella boydii
atgattgttttctcctcgttacaaattcgtcgcggcgtgcgcgtcctgctggataatgccaccgccaccatcaaccctgggcagaaagtcggcctggtgggtaaaaacggctgtggtaaatctaccctgctggcattgctgaaaaatgaaatcagcgccgacggcggcagctacacctttccgggaagctggcaactggcgtgggtgaatcaggaaacgccggcgttatcgcaagcggcgctggaatatgtcattgacggcgaccgtgaatatcgtcaactggaagcgcagctgcacgacgccaacgaacgtaacgacgggcacgccattgcgaccattcatggcaagctggatgctattgacgcatggagtattcgctcccgtgccgccagcctgctgcacggcctcggtttcagcaatgaacaactggagcgcccggtaagtgatttctccggtggctggcgtatgcgtcttaaccttgcccaggcgctgatttgccgttcagacttgctgctgctcgacgaaccgactaaccacctcgatctcgatgccgttatctggctggaaaaatggttgaagagctatcaaggcacgctgatcctgatctctcacgaccgcgacttcctcgatccgatcgttgataaaattattcatatcgaacaacaaagcatgttcgagtacaccggcaactacagttcgtttgaagtacagcgcgccacccgtctggcgcagcaacaagcgatgtatgaaagccagcaggaacgcgtggcacatctgcaaagttatatcgaccgtttccgtgccaaagccaccaaagcgaagcaagcccagagccgcattaagatgcttgagcgtatggagctgattgcccccgcgcacgtcgacaacccgttccgctttagcttccgcgcgccggaaagcctgccaaatccgttactgaagatggaaaaagtcagcgcgggctatggcgatcgcattattctcgactcgattaaactgaacctggtgcccggctcgcgcattggtctgttaggccgcaacggcgcgggtaaatcgacattaatcaaactgttagccggtgaacttgcgccagtcagcggtgaaattggtctggcgaaagggatcaagctcggctacttcgcccagcatcaacttgaatacctgcgcgccgacgaatcacctattcaacatctggcacgtttagcgccgcaggagctggaacaaaaactgcgtgactacctcggcggctttggtttccagggcgataaagtaaccgaagaaacgcgccgcttctccggtggggaaaaagcccgcctggtgctggcattaattgtctggcagcgtccgaatctgctgctgctcgacgaaccgactaaccaccttgacctcgacatgcgtcaggcactcaccgaagcattaatcgagtttgaaggcgcgctggttgtcgtttcgcacgaccgtcatttgctgcgttccaccactgacgatctctacctggttcacgatcgtaaagtcgaaccgttcgacggcgatctggaagattatcaacagtggttgagcgacgtacaaaagcaggaaaaccagaccgacgaagcgccaaaagagaacgcgaacagcgcccaggcacgtaaagatcagaagcgtcgggaagcggagctgcgtgcgcaaacccagccgctgcgtaaagagattgcccgtctggaaaaagagatggagaagctgaacgcgcaactggcgcaggcggaagagaaactcggcgacagcgaactgtatgaccagagccgtaaagcggagttgaccgcctgcctgcaacagcaagccagcgccaaatccggcctggaagagtgcgaaatggcgtggctggaagcccaggagcagcttgagcagatgctgctggaaggccaaagcaactga

SEQ ID NO: 459891 - DNA, 1023 bp, Shigella boydii
atggcgcagataacgacgaccgatgccaatgaattcagcagcagtgctgaattcacccctatgcgcggctttagcaattgtcatctacaaactatgctgccgcgtttgtttcgtcgtcaggtgaaattcaccccgtactggcagcggctggagttgcccgacggcgattttgtcgatctcgcgtggagtgaagcccctgcacaggctcggcataaaccgcgtttagtgatatttcacgggctggaaggcagtctcaatagcccttacgcccacggtctggttgaggcggcgcaaaagcgcggctggctgggcgtggtgatgcattttcgcggatgcagcggtgaaccaaaccgtatgcaccgcatttaccattcgggcgaaaccgaagacgccagttggtttttacgctggctgcaacgcgaatttggtcatgcgccaacggctgccgtcggctattcgctcggcggtaatatgctggcctgtttgctggcaaaggaaggcaatgatctcccggttgatgcggcggtgattgtctctgcgccgtttatgctggaagcctgtagctatcatatggaaaagggcttttcccgcgtttatcagcgttacttgctgaacctgttaaaagccaatgccgcgcgcaagctggcagcctaccccggaacgctgccgattaatctcgcgcagttaaaatcggtacgtcgcatccgtgaatttgacgatctaatcaccgccagaattcacggctacgccgacgctatcgactattatcgtcagtgtagcgccatgccgatgctgaaccggatcgccaaaccgacgctgattattcacgccaaagacgatccgtttatggatcatcaggtgatcccgaaaccggaaagtctcccctcgcaggtggagtatcaactgactgaacatggcggtcatgttggctttattggcggtacattacttcatccgcaaatgtggctggagtcacgcattcctgactggttaacaacgtatctggaggcgaaatcatgttga

SEQ ID NO: 459892 - DNA, 219 bp, Shigella boydii
atgttgattccgtggcaagacctctcccccgaaacgctggaaaatttaattgaaagctttgtgttacgtgaaggcaccgattatggtgaacatgagcgtacacttgaacagaaagtcgccgacgtcaaacgccagctacagtgcggagaagcggtgctggtatggtcggagctgcacgaaacggtcaatattatgccgcgcagtcagtttcgcgaataa

SEQ ID NO: 459893 - DNA, 870 bp, Shigella boydii
atgtctgccaaacatccggtcattgcggtaacaggatccagcggcgcggggaccaccaccaccagcctcgcgtttcgtaaaatattcgcgcagttaaatctgcatgcagctgaggtggaaggcgacagtgttcaccgttacacccgcccggaaatggacatggcgatccgcaaagcgcgcgacgccgggcggcatatcagctacttcggccccgaagcgaacgacttcggcctgctggaacaaaccttcattgaatacggtcagagcggcaaagggaaatctcgcaaatatctgcatacctacgacgaagccgtaccgtggaatcaggtaccgggaacattcaccccctggcaacctttaccagaacccactgatgtactgttttatgaaggtttacacggcggcgtagtcacgccacagcataacgttgcgcagcatgtggacttactggtcggcgtagtgcctatcgttaaccttgagtggattcaaaaactgatccgcgacaccagcgagcgcgggcactcacgagaagcagtgatggactcagtagtgcgttcaatggaagactatatcaactacatcacaccgcagttttcccgcacccatcttaacttccagcgcgttcccaccgtcgacacttcaaacccgttcgcggcaaaaggtatcccgtcgctggatgaaagctttgtggtgatccattttcgtaatctggaagggatcgatttcccctggctgctggcgatgttgcaaggctcattcatttcccacatcaatacgttagtggtaccgggcggcaaaatgggtctggcaatggaattaattatgctgccgctggtgcaacgattgatggaaggaaagaaaatcgagtaa

SEQ ID NO: 459894 - DNA, 405 bp, Shigella boydii
atgcaagcgcgagtgaagtgggtcgaagggttaacttttctgggcgaatccgcctctggtcatcagattttaatggacggcaactcaggcgataaagcaccaagtccgatggaaatggtgttgatggcggcggggggttgcagtgccatcgatgtggtttcgatcctgcaaaaagggcgtcaggatgtggtcgattgtgaagtaaaattgacctctgaacgccgcgaagaggcaccacgcctgtttacgcacattaatctgcattttatcgtcaccggtcgcgacctgaaagacgcagcggttgcgcgtgcggttgatctctctgccgagaaatattgttcagtggcgttgatgctggaaaaagcggtgaatattactcactcgtatgaagtggttgccgcgtga

SEQ ID NO: 459895 - DNA, 192 bp, Shigella boydii
atgcttgacaacttaataggggcaccccccttctggcaactggcgcacagtagcgcagacaattttccggcactgacggtcagccattttattaccgccaatctgctcccggtgatgctgggtaatattatcggcggtgcagtgctggtgagtatgtgttatcgggctatttatttacgtcaggaatcctga

SEQ ID NO: 459896 - DNA, 1062 bp, Shigella boydii
atgctcgaaatgttgatgcaatggtatcgccgccgttttagcgacccggaagcgattgccttgctggttattttagttgccggatttggcattatctttttctttagtggcctgcttgctccgttgctggtggctattgtgctggcctatttgctggaatggccaaccgtgcgcctgcaatctattggctgctcccgccgctgggcgacgtcgattgtattggtggtttttgtcggtatattgctactgatggcgttcgtggtactgcctatcgcctggcaacagggcatctacttaatccgcgatatgccggggatgctcaataagctttctgactttgccgccacgttgccgcgccgctatccggcgttaatggacgcgggcattattgatgcaatggccgaaaatatgcgcagtcggatgctgaccatgggcgattcggtggtgaaaatttccctcgcctcgctggtcggtttgctgaccattgccgtctatctggtgctggtgccattgatggtcttcttcctgctgaaagacaaagagcagatgctgaacgccgttcgtcgggtgctgccgcgcaaccgtggactggcaggacaggtgtggaaggagatgaatcaacaaatcaccaactatatccgcggcaaagtgctggagatgatcgtggtggggatcgccacctggctggggttcttgctctttgggctgaactattcgctgctgctggcggtgctggtcggcttctcggttcttattccgtacattggcgcatttgtggtgaccattccggtggttggcgtggcgctattccagtttggcgcaggcacggaattctggagctgcttcgcggtgtatctgattattcaggcgctggacggcaacctgctagtaccggtgttgttctccgaagcggttaacctgcatccgctggtgattattttatcggtggtgatcttcggtggtttgtggggattctggggcgtattcttcgccattccattggcgacgctgatcaaagccgtgatccacgcctggcccgatgggcaaatcgcgcaagaataa

SEQ ID NO: 459897 - DNA, 1464 bp, Shigella boydii
atgttcaggcagttgaaaaaaaacctggttgcaaccctcattgctgctatgaccattggtcaggtagccccggcgtttgccgacaacgcagacaccttgccggatatgggaacctccgcaggaagcacgctttccattggtcaggaaatgcagatgggcgactattatgtccgccagctacgcggcagcgcgccgttaattaatgacccgctgttaacgcaatatattaattcgctggggatgcgtctggtttcgcatgccaattcggttaagacaccgtttcatttttttctaatcaacaacgacgaaattaacgcctttgctttctttggcggcaacgtggtgctgcactctgccctgttccgttattccgataacgaaagtcaactggcttcagttatggcgcacgaaatctcccacctcacccaacgtcacctggcgcgagcgatggaagatcagcagcgcagcgcgccgctgacctgggtcggcgcgttaggttctattttactggcgatggccagtccgcaggcggggatggcggcgctgaccggtacactggcgggaacgcgtcaggggatgatcagtttcacccagcaaaatgaacaggaagcggaccgcattggtattcaggtgctgcaacgctcgggattcgatccgcaggcgatgccaaccttcctcgaaaaattactcgatcaggcgcgttactcctcgcgcccgccggaaattttattgactcacccgttgccggaaagtcgtctggcagatgcccgcaaccgtgctaatcagatgcgaccgatggtggtgcagtcgtcggaagatttctatctggcgaaagcgcgcacactggggatgtataattccggacgtaaccagctcaccagtgatttgctggatgaatgggcgaaaggaaacgttcgtcagcaacgagcggcgcaatatggtcgtgctttacaggcgatggaagccaataaatacgacgaggcgcgtaaaacgctgcaaccgttactggcggcagaacctggcaacgcatggtatctcgatctggctaccgatatcgatcttgggcaaaacaaagccaatgaggcaatcaatcgcctgaaaaatgcccgtgatttgcgcaccaatccggtgttgcagctcaacctggcaaacgcttatctgcaaggcggtcaaccacaagaagcggccaatattctcaatcgctacacctttaataataaagatgacagcaacggctgggatttactggcacaggcggaagccgcgctaaataaccgcgatcaggagctggctgcgcgagcagaaggttatgcgctcgccggacgactcgatcaggccatttcgctgttgagtagcgccagttcgcaggtgaaattaggcagcctgcaacaagcgcgttacgatgcgcgcatcgaccagttgcgccagctgcaggaacgctttaagccttataccaagatgtaa

SEQ ID NO: 459898 - DNA, 360 bp, Shigella boydii
atgaccaaacaggtaaaaatctaccataacccacgctgttcaaagagccgggaaacgctgaacctgctgaaagaaaacggcgtggagccagaagtggtactctaccttgagacacccgccgatgcggcaacgctgcgcgatttgctgaaaatgctggggatgaatagcgcccgtgaattgatgcgccagaaagaggatctttataaagaactgaacctggctgacagttcgcttagcgaagaggcgctgattcaggcaatggtggataatccgaagctgatggagcgcccgattgtggtcgcgaatggcaaagcgcggattggtcgtccaccggagcaggtactggaaatcgtgggttaa

SEQ ID NO: 459899 - DNA, 747 bp, Shigella boydii
gtggtaaacttctcgcgattttgtgaaatcctggttgaggtatctctgaacacaccggcacagctctctttgccactttatcttcctgacgacgaaacctttgcaagtttctggccgggggataactcctctttactggccgcgctgcaaaacgtgctgcgtcaggaacatagcggttacatctatctctgggcacgcgaaggcgcggggcgcagccatctgctgcacgcggcttgcgcggaattgtcgcagcgtggcgatgcggtgggctatgtcccgctggataaacgcacctggtttgttccggaagtgctcgacggtatggagcatttgtcgctggtttgtatcgacaacattgagtgtattgcaggcgatgagttgtgggagatggcgattttcgatctctacaatcgaattctggaatcgggcaaaacacggttgttgatcaccggcgatcgtccaccgcggcagttgaatctgggattaccggatctcgcgtcgcgactcgactgggggcagatctacaaattgcagccactttctgatgaagataagttgcaggcgctacagttacgcgcgcgtttgcgtggttttgaactgccggaagatgtggggcgtttcttgctgaagcggctcgacagagaaatgcgcacgctatttatgacgttggatcagttggatcgtgcgtcgattaccgcgcaacgtaagctgaccattccgtttgtgaaagaaattctgaagttgtag

SEQ ID NO: 459900 - DNA, 1290 bp, Shigella boydii
atgacgcgccgtgctatcggggtgagtgaaagaccgccacttttacagacaatcccgcttagtttgcaacatttgttcgccatgtttggtgcaaccgtcctggtgcccgtcttatttcatattaacccggcgactgtactgttatttaacggtattggaacgctgctgtatctcttcatctgtaaagggaaaattccggcttatcttggttccagctttgcctttatttcaccggtattgttactgttgccgttagggtatgaagtcgcgctgggcggctttattatgtgcggcgtgctgttctgcctggtttcttttatcgtgaagaaagcggggaccggctggctggacgtgctgtttccacctgcggcaatgggcgcaatcgttgccgtcatcggtctggagctggcgggcgtagctgccggtatggcgggtttactcccggctgaagggcaaacgccagactccaaaaccatcatcatctctattaccaccctggcggtcacggttttaggttctgtgctgtttcgtggtttcctggcaattatcccgattttaattggcgtgctggtgggctacgcgctctctttcgcaatgggaattgtcgataccacgccgattattaatgctcactggtttgcgctgccaaccctctatacgccgcgcttcgagtggtttgccattctgactattctgccagcggcgttagtggttattgccgaacacgtagggcacctggtagtaacggctaatatcgtcaaaaaagatctgctgcgcgatccaggtctgcaccgttcgatgtttgctaacggcctgtcgaccgtgatctccggcttctttggctccacgccaaataccacttacggagaaaacattggcgtgatggcgatcacccgtgtttacagtacctgggttatcggcggggcggcgattttcgctatcctgctttcctgcgtcggtaaactggctgccgctatccagatgatcccattgccggtgatgggcggcgtttcactgctgctttatggtgtcatcggtgcttccggtattcgtgttttgatcgaatcgaaagtggattacaacaaagcacagaacctgatcctgacttccgtgattttgatcatcggcgtcagtggcgcgaaggtaaacatcggcgcggcggagttaaaaggtatggcgctggcgaccatcgtcggtatcggcttaagtttgattttcaaactgatcagtgtgctgcgccctgaagaagtggtgctggacgcagaagaggcggatataacagacaaataa

SEQ ID NO: 459901 - DNA, 627 bp, Shigella boydii
atgaagatcgtggaagtcaaacacccactcgtcaaacacaagctgggactgatgcgtgagcaagatatcagcaccaagcgctttcgcgaactcgcttccgaagtgggtagcctgctgacttacgaagcgaccgccgacctcgaaacggaaaaagtaactatcgaaggctggaacggcccggtagaaatcgaccagatcaaaggtaagaaaattaccgttgtgccaattctgcgtgcgggtcttggtatgatggacggtgtgctggaaaatgttccgagcgcgcgcatcagcgttgtcggtatgtaccgtaatgaagaaacgctggagccggtaccgtacttccagaaactggtttctaacatcgatgagcgtatggcgctgatcgttgacccaatgctggcaaccggtggttccgttatcgcgaccatcgacctgctgaaaaaagcgggctgcagcagcatcaaagttctggtgctggtcgctgcgccagaaggtatcgctgcgctggaaaaagcgcacccggacgtcgaactgtataccgcatcgattgatcagggactgaacgagcacggatacattattccgggcctcggcgatgccggtgacaaaatctttggtacgaaataa

SEQ ID NO: 459902 - DNA, 1038 bp, Shigella boydii
gtgaccgataaaacctctcttagctacaaagatgccggtgttgatattgacgcgggtaatgctctggttggaagaatcaaaggcgtagtgaagaaaacgcgtcgtccggaagtgatgggcggtctgggcggcttcggtgcgctgtgtgcattgccgcaaaaatatcgtgaacccgtgctggtttccggcactgacggcgtaggtaccaagctgcgtctggcaatggacttaaaacgtcacgacaccattggtattgatctggtcgccatgtgcgttaatgacctggtggtgcaaggtgcagaaccgctgtttttcctcgactattacgcaaccggaaaactggatgttgataccgcttcagcggtgatcagcggcatcgcggaaggttgtctgcaatcgggctgttcactggtgggtggcgaaacggcagaaatgccggggatgtatcacggtgaagattacgatgtcgcgggtttctgcgtgggcgtggtagaaaaatcagaaatcatcgacggctctaaagtcagcgacggcgatgttctgattgcactcggttccagcggtccgcactcgaacggctattcgctggtgcgcaaaattcttgaagtcagcggttgtgatccgcaaaccaccgaacttgatggtaagccattagccgatcatctgctggcaccgacccgcatttacgtgaagtcagtgctggagttgattgaaaaggtcgatgtgcatgccattgcgcacctgaccggcggcggcttctgggaaaacattccacgcgtattgccagataatactcaggcagtgattgatgaatcttcctggcagtggccggaagtgttcaactggctgcaaacggcaggtaacgttgagcgccatgaaatgtatcgcaccttcaactgcggcgtcgggatgattattgccctacctgctccggaagtggacaaagccctcgccctgctcaatgccaacggtgaaaacgcgtggaaaatcggtatcatcaaagcctctgattccgaacaacgcgtggttatcgaataa

SEQ ID NO: 459903 - DNA, 639 bp, Shigella boydii
atgaatattgtggtgcttatttccggtaacggaagtaatttacaggcaattattgacgcctgtaaaaccaacaaaattaaaggcaccgtacgggcagttttcagcaataaggccgacgcgttcggccttgaacgcgcccgccaggcgggtattgcaacgcatacgctcatcgccagcgcgtttgacagtcgtgaagcctatgaccgggagttgattcatgaaatcgacatgtacgcacccgatgtggtcgtgctggctggttttatgcgcattctcagcccggcgtttgtctcccactatgccgggcgtttgctgaacattcacccttctctgctgccgaaatatcccggattacacacccatcgtcaggcgctggaaaatggcgatgaagagcacggtacatcggtgcatttcgtcaccgatgaactggacggtggcccggttattttacaggcgaaagtcccggtatttgctggtgatacggaagatgacgtcaccgcccgcgtgcaaacccaggaacacgctatttatccactggtgattagctggtttgccgatggtcgtctgaaaatgcacgaaaacgccgcgtggctggatggtcaacgtctgccgccgcagggctacgctgccgacgagtaa

SEQ ID NO: 459904 - DNA, 2067 bp, Shigella boydii
atgggtcaggaaaagctatacatcgaaaaagagctcagttggttatcgttcaatgaacgcgtgcttcaggaagcggcggacaaatctaacccgctgattgaaaggatgcgtttcttggggatctattccaataaccttgatgagttctataaagtccgcttcgctgaactgaagcgacgcatcattattagcgaagaacaaggctccaactctcattcccgccatttactgggcaaaattcagtcccgggtgctgaaagccgatcaggaattcgacggcctctacaacgagctattgctggagatggcgcgcaaccagatcttcctgattaatgaacgccagctctccgtcaatcaacaaaactggcttcgtcattattttaagcagtatctgcgtcagcacattacgccgattttaatcaatcctgacactgacttagtgcagttcctgaaggatgattacacctatctggcggtggaaattatccgtggagacaccatccgttacgcgctgctggagatcccatcagataaagtgccgcgctttgtgaatttaccgccagaagcgccgcgtcgacgcaagccgatgattcttctggataacattctgcgttactgccttgatgatattttcaaaggcttctttgattatgacgcgctgaatgcctattcaatgaagatgacccgcgatgccgaatacgatttagtgcatgagatggaagccagcctgatggagttgatgtcttccagtctcaagcagcgtttaactgctgagccggtgcgttttgtttatcagcgcgatatgcccaatgcgctggttgaagtgttacgcgaaaaactgactatttcccgctacgactccatcgtccccggcggtcgttatcataattttaaagactttattaatttccccaatgtcggcaaagccaatctggtgaacaaaccactgccgcgtttacgccacatttggtttgataaagcccagttccgcaatggttttgatgccattcgcgaacgcgatgtgttgctctattatccttatcacacctttgagcatgtgctggaactgctgcgtcaggcttcgttcgacccgagcgtactggcgattaaaattaacatttaccgcgtggcgaaagattcacgcatcatcgactcgatgatccacgccgcacataacggtaagaaagtcactgtggtggttgagttacaggcgcgtttcgacgaagaagccaacattcactgggcgaagcgcctgaccgaagcaggcgtgcacgttatcttctctgcgccggggctgaaaattcacgccaaactgttcctgatttcacgtaaagaaaacggtgaagtggtccgttacgcacacatcgggaccgggaactttaacgaaaaaaccgcgcgtctttatactgactattcgttgctgaccgcagatgcgcgtatcaccaacgaagtacggcgggtatttaactttattgaaaacccataccgcccagtgacatttgattatttaatggtgtcaccgcaaaactctcgccgtctgttatatgaaatggtagaccgcgaaatcgccaacgcgcagcaagggctgcccagtggtatcaccctgaagctaaataaccttgtcgataaaggcttggttgatcgtctgtatgcggcctccagctccggcgtaccggttaatctgctggttcgcggaatgtgttcgctgatccccaatctggaaggcattagcgacaacattcgtgccatcagtattgttgaccgttaccttgaacatgaccgggtttatatttttgaaaatggcggcgataaaaaggtctacctttcttccgccgactggatgacgcgcaatattgattatcgtattgaagtggcgacaccgctgctcgatccgcacctgaagcagcgggtgctggacatcatcgacatattgttcagcgatacggtcaaagcacgttatatcgataaagaactcagtaatcgctacgttccccgcggcaatcgccgcaaagtacgggcgcagttggcgatttacgactacatcaaatcactcgaacaacctgaataa

SEQ ID NO: 459905 - DNA, 1542 bp, Shigella boydii
atgccaatacacgataaatcccctcgtccgcaggagtttgctgcggtcgatcttggttcaaacagttttcacatggtcatagcccgtgtggtagatggtgccatgcagattattggccgcctgaaacagcgagtgcatctggcggacggcctggggccagataatatgttgagtgaagaggcaatgacgcgcggtttgaactgtctgtcgctgtttgccgaacggctacaagggttttctcctgccagcgtctgtatagtcggcacccatacgctgcgtcaggcgctgaacgccactgactttctgaaacgcgtggaaaaggtcattccctacccgattgaaattatttccggtaatgaagaagcccgtctgatttttatgggcgtggaacatacccaaccggagaaaggtcgcaaactggttattgatattggcggcggatctacggaactggtgattggtgaaaatttcgaaccgattctcgttgaaagccgccggatgggttgtgtcagctttgcccagctttacttccctggcggggtcatcaataaagagaattttcagcgcgctcgtatggcggcagcacaaaaactggaaactttaacctggcaattccgtattcagggctggaacgtggcaatgggcgcttccggtaccataaaagccgcccatgaagtgttaatggaaatgggcgagaaagacgggataattaccccggaacgtctggaaaaactggtaaaagaagttttacgtcaccgtaatttcgcatcgctgagtttaccgggtctttccgaagagcggaaaacagtcttcgttcctggactggcgattttatgcggtgtgtttgatgctttagccatccgtgaactgcgcctttctgacggggcgttacgcgaaggcgtactgtacgaaatggaaggacgtttccgtcatcaggatgtgcgtagtcgcaccgccagcagcctcgccaaccagtatcacatcgacagcgaacaggcccgacgggtgctggataccactatgcaaatgtacgaacagtggcgggaacagcaaccgaagctggcgcatccgcaactggaggcgctactgcgatgggccgccatgctgcatgaggtcgggttgaatatcaaccacagcggtttgcatcgccactccgcttatattctgcaaaacagtgacttgccgggttttaatcaggaacagcagctgatgatggcgacactggtgcgctatcaccgcaaagcgattaaactcgacgatctgccgcgctttaccttgtttaagaagaaacagttcctgccactgattcagctattgcgccttggcgtattactcaacaatcaacgtcaggcaaccaccacaccgccaacattgacactgattactgatgacagtcactggacactgcgtttcccgcatgactggtttagtcagaatgcgttggtactgcttgatctggaaaaggagcaagaatactgggaaggcgtggctggctggcggttgaaaattgaagaagaaagtacacctgaaatcgccgcttaa

SEQ ID NO: 459906 - DNA, 297 bp, Shigella boydii
ttgcagcatcttcaggaattaggctgccagattgcgattgatgatttcggcaccggctacgccagctatgcacggcttaaaaatgtgaatgccgatctgcttaaaattgacggcagttttatccgcaatattgtgtcaaatagtctggattatcagatagtggcatcgatttgccacctggcgcgaatgaagaaaatgcgggtagtggcagagtacgttgaaaacgaagagatccgcgaggcggtgctctctttggggatcgattatatgcagggttatcttattggtaagccgtag

SEQ ID NO: 459907 - DNA, 1866 bp, Shigella boydii
atgaaactgaatgcaacttatataaaaatacgtgataaatggtgggggcttccgctattcctgccttttttaatcttgcccattttcgcccacattaatactttcgcgcatatttcttccggtgaggtttttctcttttatctgcctctggcactgatgatcagcatgatgatgtttttcagctgggcggcattgccagggatcgccttagggatttttgtccgcaaatatgcagagctgggtttttacgaaacgctatcattaacggctaattttattatcattatcattctctgttggggcggttacagggtctttactccccggcgtaacaacgtttcacatggtgatacccgtttaatttcccagcgtatattctggcagattgtgtttcctgcaacgctgtttctgatacttttccagtttgctgcatttgtaggattactggcgagcagagaaaatctggtcggtgtcatgccttttaacctcgggactttaatcaattatcaggccttactggtgggtaatctgatcggtgtcccgctgtgctacttcatcattcgggtagtgcgaaatccattttatttacgtagctattattcgcaattaaaacagcaggttgatgccaaagtcaccaaaaaagagttcgcgctctggctactggcattaggtgctttattgttgctgttatgcatgccgttaaatgaaaaaagcacaatttttagcaccaattataccttatcattattgctgcccctgatgatgtggggagcgatgcgctatggttataagctgatttctctgctctgggcggtcgtgttgatgatcagcatccacagctatcaaaattacattcccatttatcctagctataccacgcagctgaccataacctcctccagttatctggtattctcttttattgtcaattatatggctgtactggcaacccgtcagagagcggtagtcagacgcattcagcggcttgcgtatgtggacccggtggttcatctgccaaatgttcgcgccctgaattgcgcgttgcgtgatgccccctggtctgcgctttgttatttacgcatccctggcatggaaatgctggttaagaactatggcatcatgctgcggattcaatacaagcaaaaactttctcactggctgtcacccttgctggaaccgggtgaagatgtttatcagctttcgggtaacgatctcgcgctgcgactgaatacagaatcgcaccaggagcgcattaccgcactggatagccatctcaagcaatttcgtttcttttgggatggcatgccgatgcaaccgcagattggcgtcagttactgctatgtgcgctcgccagtgaatcatatctacctgctgctgggagagctaaatacggtcgccgaactttccatcgtgaccaacgccccggaaaatatgcagcgtcgcggggcaatgtatttgcaacgcgaattgaaagataaagtcgcgatgatgaatcgactacagcaggcgctggaacacaaccattttttcctgatggcccagccgattaccggtatgcgtggtgatgtttaccatgaaattcttctgcgcatgaaaggtgagaatgatgaactgatcagccccgatagcttcttgccggtcgcgcacgaatttggtttatcgtcgagtatcgacatgtgggtcattgagcatacgctgcaatttatggctgaaaacagagcgaagatgcccgctcaccgttttgctattaatctgtctccaacctcggtatgtcaggctcgttttccttttgaagtcagttgctggctaaatatcagattgaagcgtggcaacttatttttgaagtcaccgaaagtaatgctctga

SEQ ID NO: 459908 - DNA, 1677 bp, Shigella boydii
atgctggttaataccagtaattataatgagggagtccaaaaaacaatgaccaacatcaccaagagaagtttagtagcagctggcgttctggctgcgctaatggcagggaatgtcgcgctggcagctgatgtacccgcaggcgtcacactggcggaaaaacaaacgctggtacgtaacaatggttcagaagttcagtcattagatccgcacaaaattgaaggtgttccggagtctaatatcagccgagacctgtttgaaggcttactggtcagcgatcttgacggtcatccggcacctggcgtcgctgaatcctgggataataaagacgcgaaagtctggatcttccatttgcgtaaagatgcgaaatggtctgatggtacgccagtcacagcacaagactttgtgtatagctggcaacgttctgttgatccgaacactgcttctccgtatgccagttatctgcaatatgggcatatcgccggtattgatgaaattcttgaagggaaaaaaacgattaccgatctcggcgtgaaagctattgatgatcacacattagaagtcaccttaagtgaacccgttccgtacttctataaattacttgttcacccatcaacttcaccggtgccaaaagccgctatcgagaaattcggcgaaaaatggacccagcctggtaatatcgtcaccaacggtgcctataccttaaaagattgggtcgtaaacgaacgaatcgttcttgaacgcagcccgacctactggaacaacgcgaaaaccgttattaaccaggtaacctatttgcctattgcttctgaagttaccgatgtcaaccgctaccgtagtggtgaaatcgacatgacttataacaacatgccgatcgaattgttccagaagctgaaaaaagagatcccggacgaagttcacgttgatccatacctgtgcacttactattacgaaattaacaaccagaaaccgccattcaacgatgtgcgtgtgcgtaccgcactgaaactaggtatggaccgcgatatcattgttaataaagtgaaagcgcagggcgacatgcccgcctatggttacactccaccgtatactgatggcgcaaaattgactcagccggaatggtttggctggagccaggaaaaacgtaacgaagaagcgaaaaaactgctggctgaagcgggttataccgcagacaaaccgttgaccatcaacctgttgtataacacctccgatctgcataaaaagctggcgattgctgcctcttcattgtggaagaaaaacattggtgtaaacgtcaaactggttaaccaggagtggaaaacgttcctcgacacccgtcaccagggtacttttgatgtggcccgtgcaggctggtgtgctgactacaacgaaccaacttccttcctgaacaccatgctttcgaacagctcgatgaataccgcgcattataagagcccggcctttgacagcattatggcggaaacgctgaaagtgactgacgaggcgcagcgcacagctctgtacactaaagcagaacaacagctggataaggattcggccattgttcctgtttattactacgtgaatgcgcgtctggtgaaaccgtgggttggtggctataccggcaaagatccgctggataatacctatacccggaatatgtacattgtgaagcactaa

SEQ ID NO: 459909 - DNA, 921 bp, Shigella boydii
atgttaaaatttattctacgtcgctgtctggaagcgattccgacgctatttattcttattactatttcgttctttatgatgcgcctcgcgccgggaagcccttttaccggcgaacgtactttaccgccagaagtgatggccaatatcgaagcgaaatatcatcttaatgatccgatcatgacacagtatttcagctacctgaaacaactggcgcacggtgatttcggtccatcgtttaaatataaagattattcggtcaatgacttggttgcatccagttttcccgtttctgccaaactgggagccgcagcatttttccttgcggtaatactgggtgttagtgctggcgttattgccgcattaaaacaaaacaccaaatgggactataccgtgatggggctggcaatgaccgggattgttatccccagttttgtggttgcaccattattagtcatgatatttgcgatcattttgcattggctgccgggcggtggctggaatggtggggcgcttaaattcatgatattgccgatggtggcgttgtcactcgcttatatcgccagtattgcgcgtattacccgtggctctatgattgaagtattacactccaattttattcgtactgcccgggcgaaagggttacctatgcggcggatcattttacgtcacgcattaaaacctgctctgttacccgtgctctcttatatgggccccgcatttgtcggcattattaccggttctatggttatcgaaaccatttatggtttgccggggattggacaactgttcgttaatggcgcattgaaccgtgactattccttagtgttaagcctgaccatcctggttggtgctttaaccattttgtttaatgccattgtcgatgtgctatatgcggttatcgacccgaaaatccgttactga

SEQ ID NO: 459910 - DNA, 909 bp, Shigella boydii
atgatgttaagtaagaaaaacagcgagacgctggaaaatttcagtgaaaagctggaggtcgaagggcgcagcttgtggcaggacgcacgtcgacgttttattcataaccgtgcggcggttgccagtctgatggtgctggtgctgatcgcgttatttgtaatcctggcaccgatgctttcccagtttgcctatgacgatactgactgggcgatgatgtccagcgccccggatatggagtccggtcactactttggtactgactcatccggtcgcgacctgcttgtgcgcgttgcgattggtgggcgtatctcactcatggtcggtgttgctgcggcactggtggctgtggtcgtcgggacactttatggttcgctttccggttatctgggcggtaaagtggattcggtaatgatgcgtctgctggaaatcctcaactccttcccattcatgttcttcgtcattttgctggtgacctttttcggtcaaaacatcctgctgattttcgtggcgataggcatggtttcctggctggatatggctcgtattgtgcgtgggcaaaccctgagtctgaagcgcaaagagtttattgaggcggcacaagttggcggtgtatcgacatcgggcattgttattcgccacattgtgccgaatgtactcggtgtggtggtggtctacgcatcacttctggtgcccagcatgatcctctttgaatctttccttagcttcctggggttgggtacgcaagagccgttaagcagctggggtgcattgctgagtgatggcgcgaactcgatggaagtctctccatggttattgttgttcccagcgggattcctcgtggtgacgctgttttgtttcaactttatcggcgatggcttgcgtgatgccctcgacccgaaagatcgttaa

SEQ ID NO: 459911 - DNA, 1014 bp, Shigella boydii
atgagcgtaattgaaactgcaactgtgccgctcgcacaacaacaggctgacgcactgctgaacgtgaaagatttgcgtgtcacctttagtaccccggacggcgacgtcacggcggtcaatgatttgaatttttccctacgtgccggagaaacgctgggtattgtaggtgagtctggttcgggtaaatcgcaaactgcatttgcgttgatgggcctgttggctgccaacggacgtattggcggatcggcaaccttcaatgggcgtgaaatcctcaatttgccagagcatgaactcaataaactgcgcgctgaacaaatctcaatgatttttcaggacccaatgacttcgttgaatccctatatgcgcgtcggtgagcagttgatggaagtgctgatgctgcataagaacatgagcaaagctgaggcgtttgaagagtcggtgcggatgctcgatgcggtaaaaatgccggaagcacgtaaacgcatgaaaatgtacccgcacgagttttctggtggcatgcgtcagcgagttatgattgcgatggcattgctatgtcgacctaagctgctgattgcggatgaacccactacagcgctggacgtcaccgtacaggcgcagatcatgacgctattaaatgaactgaaacgggaatttaataccgccatcattatgattacccacgatcttggcgtggtggcggggatctgtgacaaagtgctggtaatgtacgccgggcgcacgatggaatatggcaacgcgcgcgatgtcttttatcaacccgttcatccttattctatcggtttgctcaacgcggtgccgcgtctcgatgcggaaggtgaaacaatgttgaccatcccgggtaatccgccaaacctgctgcgattaccgaaaggttgcccgttccagccacgttgtccgcatgcgatggaaatttgtagtagcgcaccgccgctggaagagtttacgcctggccgtctgtgtgcttgctttaaaccggtggaggaactgttatga

SEQ ID NO: 459912 - DNA, 1005 bp, Shigella boydii
atgaatgctgtaaccgaaggaagaaaagtcctccttgaaatcgccgatctgaaagtgcactttgaaatcaaagatggcaaacagtggttctggcaaccgccgaaaacgctcaaagccgtcgatggtgtcacgcttcgcctgtatgaaggggaaacattaggtgtggtaggggaatcgggatgcggtaagtccacctttgctcgcgccatcattggcctggttaaagcgaccgacggtcatgttgcctggttaggtaaagagttgctgggcattaagcccgatgaatggcgtgccgttcgcagtgatattcagatgattttccaggatccattggcatcgctaaacccgcgcatgaccatcggcgagatcatcgctgaaccactgcgtacttatcatccgaaaatgtcacgtcaggaagttcgcgagcgcgtgaaggcgatgatgctgaaagtcgggttattgcctaacctgattaaccgctatccgcatgagttctccggtgggcagtgccagcgtatcgggattgctcgtgctcttattcttgaaccgaagctgattatctgtgatgagccggtgtcggcgctggacgtgtcaattcaggcgcaggtggtcaacctgctccagcagctgcaacgtgagatgggattgtcattaatttttattgctcatgacctggccgtggtaaaacacatttccgatcgtgtgttggtgatgtatctcggccatgcggtagaactggggacctatgatgaggtctaccacaatccactacatccttacaccagggcattgatgtcggcagtccccatacctgatccggatctggagaagaacaaaaccatccagttactggaaggggaattaccgtcgccgatcaacccgccttccggttgtgttttccgtacccgttgcccgattgccggtccggagtgcgccaaaacacgtcctgtgctggaagggagtttcagacacgccgtttcttgcctgaaagtcgatccgctttaa

SEQ ID NO: 459913 - DNA, 330 bp, Shigella boydii
atggatatggatctaaacaatcgcctgactgaagatgaaacgcttgagcaggcctacgatatttttctcgaactggctgccgacaatctcgacccagctgatgttctgctgttcaatcttcagtttgaagagcgcggcggcgcggagttattcgatccggcggaagactggcaggaacatgttgatttcgatttgaacccggacttttttgccgaagtggtgattggtctggcggacagtgaggatggtgaaatcaacgatgttttcgcccgcattctgttatgccgcgaaaaagatcacaaactttgccatatcatctggcgggaataa

SEQ ID NO: 459914 - DNA, 1461 bp, Shigella boydii
atgacaaccgtttatacgttggtgagttggttggccattctgggatactggttgctcattgcaggcgtaactttacgcattctaatgaaacgacgcgcagttccctccgcgatggcctggctgttgattatttacattctgccgttagtcggaattattgcctatcttgccgttggcgagctccatttaggcaaacgccgcgctgagcgcgccagagcgatgtggccttccaccgcaaaatggcttaacgaccttaaagcctgtaagcatatcttcgccgaagaaaatagcagtgtcgctgcgccattattcaagctttgcgagcgtcgtcaggggatcgctggggtcaaagggaatcagctacaactgatgaccgagtcagatgatgtgatgcaggcgttaatccgcgacatccagctcgcgcgccataatattgagattgtgttttatatctggcagcccggcggcatggcggaccaggtggctgaatcattaatggccgctgcgcgacgcggcattcattgccgattgatgctcgactccgccgggagtgtggcttttttccgcagcccgtggcccgagctaatgcgtaatgccggtattgaagtggtcgaagccttaaaggtcaatctgatgcgtgtgtttttacgccgtatggacctgcgccaacatcgcaagatgatcatgatcgataattacatcgcgtacaccggcagcatgaatatggtcgatcctcgctacttcaaacaagatgcgggcgtagggcaatggattgatctgatggcgcgtatggaaggccccatcgccaccgcgatggggattatttattcctgcgactgggagattgaaaccggaaaacgtattctgccgccaccaccagatgtcaatattatgccgtttgaacaggccagcggtcacaccattcacacaattgcttctggccccggctttccggaagatctcattcaccaggcattattgactgcggcttattcggcgcgtgaatatttgatcatgaccacgccctactttgtgccaagcgatgatttacttcatgcgatttgcacggcggcacagcgcggggtggatgtcagtattatccttccgcgaaaaaatgactcgatgctggtcggctgggccagtcgcgcattctttacggaacttcttgctgctggggttaaaatttatcagtttgaaggcgggttactgcataccaagagcgtgctggtcgatggcgaactaagtctggttggcaccgttaaccttgatatgcgtagtctgtggctgaatttcgagattaccctggcaatcgacgataaaggttttggtgcagaccttgccgccgttcaggacgattatatttcgcgttcacgtctgctcgatgcccgtttatggctaaaacgtccattatggcatcgtgtcgccgagcgactgttttacttcttcagcccgttgctgtaa

SEQ ID NO: 459915 - DNA, 1254 bp, Shigella boydii
gtgagtcactgggctacattcaaacaaacagcaacaaatttatgggtgaccctacggcacgacattctcgcgctggccgtctttttaaatggattgcttatttttaaaacaatctatggtatgtcggtcaatttgctagatattttccatatcaaagcattttcagagttggatctctccttgctggcaaacgccccactatttatgctcggcgtctttcttgtcctgaactccattggcttactgttccgggcaaagctcgcatgggcaatcagtatcattttgttgttgatagcgctaatttataccctgcatttttatccctggttgaaatttagtattggattttgcatttttacgctggtgtttttgctgatactgcgcaaagacttctcccacagtagcgccgcagccgggacaatttttgcatttattagtttcacgacattactgttttactcaacctacggtgcgctttatttaagcgaaggttttaatccgcgaatagaaagtttgatgaccgcgttctatttttcgatagaaaccatgtcaaccgtcggctatggcgatattgtccctgtttctgaatcagcacgattgttcactatttcggtcattatttccggtattaccgtttttgccacatctatgacctcaatttttggtccgcttatccgcgggggattcaacaaacttgtaaaaggaaacaatcatacaatgcatcgtaaagatcattttattgtttgcggacattcgattctcgccatcaatacgattctgcaactgaatcaacgcggacaaaacgtaacggttatcagcaacttgcctgaagatgatatcaagcaacttgagcaacgcttaggcgataacgctgatgttatccccggtgacagtaatgacagttcagtattaaagaaagcgggaatcgatcgttgccaggccattctggcgctgagtgataacgatgcagataacgcgtttgttgtactctcggcaaaagatatgagcagtgatgtcaaaacagttctcgccgtcagtgatagcaaaaacctgaataagattaagatggtacatccggatatcattctctcaccgcaactgtttggcagcgaaattctggcgcgagttttaaatggtgaagagattaataatgatatgctcgtttcaatgttgttgaactccggtcatggcattttcagcgataacgatgaacaagaaacgaaagctgacagtaaagaatcggcgcaaaaatag

SEQ ID NO: 459916 - DNA, 297 bp, Shigella boydii
gtgttgtatgttatttacgctcaagacaaagctgatagcctcgaaaaacgcctttccgttcgtccggcacatttagcacgtttacagttactgcatgatgaaggtcgtttgttgacagctggtccaatgccagcggtagacagtaacgatccaggggctgcgggatttactggctcaaccgttattgctgaatttgaatcgctggaagcagctcaggcctgggccgatgctgacccgtacgtagcggcaggagtctatgaacacgtttcagtgaaaccatttaagaaagtgttctga

SEQ ID NO: 459917 - DNA, 720 bp, Shigella boydii
atgacccttgatttacctcgccgcttcccctggccgacgttactttcggtctgcattcatggtgctgttgtggcgggtctgctctatacctcggtacatcaggttattgaactacctgcgcctgcgcagccaatttctgtcacgatggttgcgcctgctgatctcgaaccgccacaagccgttcagccgccaccggagccggtggtagagccagaaccggaacctgagccgatccccgaaccgccaaaagaagcaccggtggtcattgaaaagccgaagccgaaacctaagccaaaaccgaagccggtgaaaaaggtacaggagcagccaaaacgcgatatcaaacccgtagagtcgcgtccggcatcaccgtttgaaaatacggcaccggcacgcctgatatcaagtacagcaacggctgcaaccagcaagccggttaccagtgtggcttcagggccacgcgcattaagccgtaatcagccgcagtatccggcacgagcacaggcattgcgcattgaagggcaggttaaagttaaatttgacgtcacgccggatggtcgcgtggataacgtacaaatcctctcagccaagcctgcgaacatgtttgagcgtgaggtgaaaaatgcgatgcgcagatggcgttatgagccgggtaagccaggcagtgagattgtggtgaatatcctgtttaaaattaacggcaccaccgaaattcagtaa

SEQ ID NO: 459918 - DNA, 399 bp, Shigella boydii
atgtctacaacacataacgtccctcagggcgatcttgttttacgtactttagccatgcccgccgataccaatgccaatggtgacatctttggtggttggttaatgtcacaaatggatattggcggcgctattctggcgaaagaaattgcccacggtcgcgtagtgaccgtgcgggttgaaggaatgactttcttacggccggttgcggtcggcgatgtggtgtgctgctatgcacgctgtgtccagaaagggacgacatcggtcagcattaatattgaagtgtgggtgaaaaaagtagcgtctgaaccaatcgggcaacgctataaagcgacagaagcattatttaagtatgtcgcggttgatcctgaaggaaaacctcgcgccttacctgttgagtaa

SEQ ID NO: 459919 - DNA, 540 bp, Shigella boydii
atgaagcagtttcttgattttttaccgctggttgtctttttcgcgttttacaagatttatgacatctatgcggctactgcggcgctgatcgtcgccacggcgattgtgcttatctatagctgggttcgctttcgtaaggttgagaagatggccctgatcacttttgttctggtggtcgtcttcggtggcttgacgctgttcttccacaatgatgagtttattaaatggaaggttacagtcatttatgctctgtttgcgggagccctgttagtcagccaatgggtgatgaaaaagccgctaattcagcggatgctgggtaaagaactcacgctgccgcaaccggtatggtcgaagctgaatctggcctgggctgttttctttatcctttgcggtctggcaaacatctacatcgcattctggctgccgcaaaatatttgggtcaactttaaagtctttggactgaccgcccttaccttaatcttcacattgttaagcggtatctatatctaccgccacatgccgcaggaagataaatcctaa

SEQ ID NO: 459920 - DNA, 744 bp, Shigella boydii
atgtctatcacggcgcagtccgtataccgtgacaccggaaatttcttccgtaatcaatttatgaccattctgttggtatcgttgctatgtgcgtttatcacagtggtgttagggcatgttttctcacccagtgatgcacagcttgcgcagctcaatgacggcgtgcccgttagcggcagtagtgggttgttcgacctggttcagaatatgtcaccggaacagcaacaaattttgctgcaggcttcagcggcgtccactttttcaggattaatcggtaacgccattctcgccggaggcgtaatattaattatccagctggtgtctgcgggtcagagagtcagtgcgctgcgagctattggtgccagtgcgccgatattgccaaagttatttattctgatttttctgactacccttttagtacagattggcatcatgctagtggtcgttccgggaattatcatggccattttactggccctggcaccggtgatgctggtacaggacaaaatgggcatttttgcctcgatgcgtagcagtatgcggctgacttgggcgaatatgcgtctggtggcacccgcagtactgagctggttgctggcaaaaacactgttgctgctttttgcctcttcttttgccgcattaaccccggaaattggtgccgtactggcgaacaccttgagcaacctgatttcagccgtattgctcatctatctgttccgtctgtatatgttgattcgccaataa

SEQ ID NO: 459921 - DNA, 639 bp, Shigella boydii
atgaaaaagttaacagtggcggctttggcagtaacaactcttctctctggcagtgcctttgcgcatgaagcaggcgaattttttatgcgtgcaggttctgcaaccgtacgtccaacagaaggtgctggtggtacgttaggaagtctgggtggattcagcgtgaccaataacactcaactgggcttgacgtttacttatatggcgaccgacaacattggtgtggaattactggcagcgacgccgttccgccataaaatcggcacccgggcgaccggcgatattgcaaccgttcaccatctgccaccaacactgatggcgcagtggtattttggtgatgccagcagcaaattccgtccttacgttggggcaggtattaactacaccaccttctttgataatggatttaacgatcatggcaaagaggcagggctttccgatctcagtctgaaagattcctggggagctgccgggcaggtgggggttgattatctgattaaccgtgactggttggttaacatgtcagtctggtacatggatatcgataccaccgccaattataagctgggcggtgcacagcaacatgatagcgtacgcctcgatccgtgggtgtttatgttctcagcaggatatcgtttttaa

SEQ ID NO: 459922 - DNA, 414 bp, Shigella boydii
atgaattttaaggaaaaactcgaagagcattttaagcagttcgaagcatccccagtgttatttgtcggctccggtgtgtctcgtcgttatcttggtgtgccatgttggcaagaccttttgaagcattttgctgaggcaattgaggaaaatcatataaaattaaaaacaaaatctaatggtgacttacccgaatatgcacaattattggtgtctgcatatgctgagaaatggtgggatactgaagaaggacaattagcattaagtgaaaaagaacaggagaaaactttcattaacgaacagtctcctttgaagttgtcaatatctaaatatattgagaatgcacataaaaatattatagataatgatgagttaaaacatgaaatttctggtaatgctgccaacttactgatttag

SEQ ID NO: 459923 - DNA, 1269 bp, Shigella boydii
atggccctaacggatactaaagttcgctctgcgaaacctgaggagaaagagtattcacttgttgacggcgacggcatgtccttacttgtaaaacctggcggttcaaagtattggcgatttcgtttccgttttggcggtaaacaacatttgatggcgttcggcgtttacccggatgtttcgctggcggatgcgcggaagaaaagggaagaggccagaaagctggtagctgctggtatcgatcctcgtgagcataagcgtgctgtgaaagaagagcaggcgaaagagattattactttcgagaaggttgccagagagtggctcgtaaccaaccaaaaatggtcggaagagcatgctaatcgtgtaaaaaagagcctggaggacaatatcttcccggcaattggttcccacaatattgctgaactgggcacccgcgatctgttaattcctattaaagccgtggagaaatccggacgtcttgaagtggcttcccgccttcaacagcgcaccacggccatcatgcgttatgcagtgcaaagcgggttaattgattacaatccggcgcaagagatggcgggggcggtagcttcctgtaatcgacagcatcgtccggcgctggagttaaagcgtatcccggaattactccagaaaatcgatgaatacaccggcaggccactaacccgctgggcaaccgaacttaccctgcttatttttattcgatccagtgagctgcgttttgctcgctggtcagaaatcgattttgaaacgtcaatgtggaccatcccgcctgagcgagaacctattcccggtgtgaaacattctcagcgaggagcaaagatgcgtacacctcatctggtgccgctttcaaagcaggcgctagcgatcctgaagcagataaaacagttctgtggcgaacatgagctgatttttattggcgatcacgatccgagtaagcccatgagtgaaaacacggtgaacagtgcattgcgggtgatgggctatgacaccaaggttgaggtttgcggccacggcttccgcactatggcctgtagctcattgattgagtcagggttatggtcgaaggatgcggtggaaaggcagatgagccatatggaacgcaattcggtgagggcggcgtatatccataaagcggaacatctggatgagcgcaagctgatgttgcagtggtgggctgattttctggatgcgaaccgggagaaggggattacgccgtttgactatgcgaagatcaatcggggtaatggcgagtga

SEQ ID NO: 459924 - DNA, 1020 bp, Shigella boydii
atgtcgatgataaaaagctatgccgcaaaagaagcgggcggcgaactggaagtttatgagtacgatcccggtgagctgaggccacaagatgttgaagtgcaggtggattattgcgggatctgccattccgatctatcgatgatcgacaatgaatggggattttcacaatatccgctggttgccgggcatgaggtgattgggcgcgtggtggcactcgggagcgccgcgcaggataaaggtttgcaggtcggtcagcgtgtcgggattggctggacggcgcgtagctgtggtcactgcgacgcctgtattagcggtaatcagatcaactgcgagcaaggtgcggtgccgacgattatgaatcgcggtggctttgccgagaagttgcgtgcggactggcaatgggtgattccactgccagaaaatattgatatcgagtccgccgggccgctgttgtgcggcggtatcacggtctttaaaccactgttgatgcaccatatcactgctaccagccgcgttggggtaattggtattggcgggctggggcatatcgctataaaacttctgcacgcaatgggatgcgaggtgacggcctttagttctaatccggcgaaagagcaggaagtactggcgatgggtgccgataaagtggtgaatagccgcgatccgcaggcactgaaagccctgtcggggcagtttgatctcattatcaatactgtgaacgtcagcctcgactggcagccttattttgaggcgctgacctatggcggtaatttccatacggtcggtgcggttctcacgccgctgtctgttccggcctttacgttaattgcgggcgaccgcagcatctctggttctgctaccggcacgccttatgagctgcgaaagctgatgcgctttgccgcccgtagcaaggttgcgccgaccaccgaactgttcccgatgtcgaaaattaacgatgccatcaagcatgtgcgcgacggtaaggcgcgttaccgcgtggttctgaaagccgacttctga

SEQ ID NO: 459925 - DNA, 1503 bp, Shigella boydii
atgagcgaacccctattaattgcccgcacgccggacacagaactttttttactgccgggaatggctaaccgtcacgggctgattactggcgcaacggggacgggtaaaaccgttacgctgcaaaaactggcagagtcattgtcggaaatcggcgtgccggtgtttatggctgatgtgaaaggcgatctgaccggtatcgcgcaggcaggaacggcgtcggaaaaactgctcacaaggcttaaaaatatcggcgtcaatgactggcaaccgcatgctaatccggtggtggtgtgggatatctttggcgagaaaggccatccggtgcgggcgacggtttcagacctggggccgctgttgctggcgcggctgttgaatctcaacgatgtgcaatctggcgtgctgaatatcatcttccgtattgctgacgatcagggattgttgctgctcgactttaaagatctgcgggcgattacccagtacatcggcgataacgccaaatctttccagaatcagtacggtaatatcagtagcgcatcggttggtgccatccagcgcggtttactgtcgctggaaaagcaaggtgcggcgcatttctttggcgagccgatgctggatatcaaagactggatgcgcaccgataccaacggtaaaggcgttatcaatatcctcagcgccgagaagctttatcagatgccgaaactgtacgccgccagcctgctgtggatgctttcagagttgtatgaacaattgccggaagcgggcgatctggagaaaccaaaactggtgtttttcttcgacgaggcacatctgctgtttaacgatgcaccgcaggtactgctggataagattgagcaggtaataaggcttattcgctcaaaaggcgtgggcgtctggttcgtttcgcaaaacccgtctgatattccggataatgtgctcgggcagctcggtaatcgcgttcaacacgctttgcgggcttttacgcccaaagatcagaaagcggtaaaagctgcggcgcaaaccatgcgggccaatccggcgtttgataccgaaaaggcaatccaggaactggggaccggcgaggcgttaatctcgtttctcgatgcaaaaggaagtccttctgtggtggaacgggcgatggtgattgcgccttgttcgcggatgggaccggtgacggaagatgagcgcaatggcttgattaaccactccccggtgtatggcaagtacgaggatgacgtggaccgggaatccgcctatgagatgttgcaaaaaggctttcaggccagtaccaagcagcaaaataatcctcccgcgaaagggaaagcggtggcggtggatgacggtattcttggtggattgaaggatattttgtttggcactaccggaccacgcggcgggaagaaagatggtgtggtgcaaacaatggcgaaaagcgccgcccgccaggtgacgaatcagattgtacgtgggatgttggggagtttgctggggggaagaagaaggtaa

SEQ ID NO: 459926 - DNA, 1083 bp, Shigella boydii
atgcaaccttttggcgtacttgaccgctatatcggtaaaactattttcaccaccatcatgatgacgctgttcatgctggtgtcgctgtcgggcattatcaaatttgtcgatcagctgaaaaaagccgggcaggggagttacgacgcgttaggcgcaggaatgtataccttgctgagcgtgccgaaagatgtgcaaacattcttcccgatggcggctctgcttggggcgttgcttggtcttgggatgctggcgcagcgcagcgaactggtggtgatgcaggcttctggtttcacccgtatgcaggttgcgctgtcggtgatgaaaaccgccattccgctggtcttgctgacgatggcgattggtgaatgggtcgcgccgcagggcgagcagatggcgcgtaactaccgtgcgcaggcgatgtacggcggctcgttgctctctacccagcaaggcttatgggcgaaagatggcaacaacttcgtttacattgagcgggttaaaggtgacgaagagttaggtggcatcagtatttatgcctttaacgagaatcgtcgtctgcaatccgtacgctatgccgctactgcgaagtttgacccggaacataaagtctggcgtctgtcgcaggttgatgaatctgatctgaccaatccgaaacagatcaccggttcgcagacggtgagcggcacctggaaaaccaacctcacgccggacaaactgggcgtggtggcgctggacccggatgcactctcaatcagcggtttgcacaactacgtgaagtatctgaagtcgagcggtcaggatgccggacgttatcagctcaatatgtggagcaaaatcttccagccgctatccgtggcggtgatgatgctgatggcgctgtcgttcatctttggcccactgcgtagcgtaccgatgggcgtgcgtgtggtcaccggtatcagcttcggttttgtcttctacgtactggaccagatcttcggcccgctgacgttggtttatggcatcccgccgatcatcggcgcactgttgccaagcgccagcttcttcttaatcagcctgtggctgttaatgagaaaatcgtaa

SEQ ID NO: 459927 - DNA, 1080 bp, Shigella boydii
gtgcgggagacgctcaaaagccagctggcgatactcttcatcttgcttttgatcttcttctgtcaaaagttagtgaggatcctcggcgcagcggttgacggcgatattccggcgaatctggtgctctcccttctcgggttgggcgtgccggaaatggcgcagcttatcctgccattaagcctgttcctcgggctgctgatgacgctgggcaaactgtataccgaaagtgaaattacggtaatgcatgcctgcggcctgagcaaagcggttctggtgaaagcggcaatgatccttgcggtattcactgcaatcgtcgcggcggttaacgtgatgtgggcgggaccgtggtcatcgcgtcatcaggatgaagtgttagcagaagcgaaagcgaaccctggcatggcggcgctggcgcaagggcaattccagcaagcgactaatggcagctcggtgctgttcatcgaaagcgttgacggcagcgatttcaaagatgtgttcctcgcgcaaattcgaccaaaaggtaatgcacgtccttctgtggtggtggccgattccggacatttaacccagctgcgcgacggctcccaggtcgtcactctcaaccagggaacgcgcttcgaaggcactgcactgttacgtgatttccgcattacggacttccaggattatcaggcgatcattggtcaccaggcggtagcgctcgacccgaacgataccgaccagatggacatgcgtacattgtggaacactgacaccgatcgtgcccgcgcagaactgaactggcgtatcacgttggtattcaccgtgtttgtgatggcacttatggtcgtaccgctgagcgtggttaacccgcgtcagggacgcgtactatcgatgctgccagccatgctgctgtatctacttttcttcctgatccagacctccctgaaatcgaacggcggtaaaggtaagctggacccgacgctgtggatgtggaccgttaacctgatttatctggctttggcgattgttctcaacctttgggacaccgtgccggtccgctgcctgcgcgccagtttttcgcgtaaaggagcggtgtga

SEQ ID NO: 459928 - DNA, 1512 bp, Shigella boydii
atggagtttagtgtaaaaagcggtagcccggagaaacagcggagtgcctgcatcgtcgtgggcgtcttcgaaccacgtcgcctttctccgattgcagaacagctcgataaaatcagcgatgggtacatcagcgccctgctacgtcggggcgaactggaaggaaaaccggggcagacattgttgctgcaccatgttccgaatgtactttccgagcgaattctccttattggttgcggcaaagaacgtgagctggatgagcgtcagtacaagcaggttattcagaaaaccattaataccctgaatgatactggctcaatggaagcggtctgctttctgactgaactgcacgttaaaggccgtaacaactactggaaagtgcgtcaggctgtcgagacggcaaaagagacgctctacagtttcgatcagctgaaaacgaacaagagcgaaccgcgtcgtccgctgcgtaaaatggtgttcaacgtgccgacccgccgtgaactgaccagcggtgagcgcgcgatcctgcacggtctggcgattgccgccgcgattaaagcagcaaaagatctcggcaatatgccgccgaatatctgtaacgccgcttacctcgcttcacaagcgcgccagctggctgacagctacagcaagaatgtcatcacccgcgttatcggcgaacagcagatgaaagagctggggatgcattcctatctggcggtcggtcagggttcgcaaaacgaatcgctgatgtcggtgattgagtacaaaggcaacgcgtcggaagatgcacgcccaatcgtgctggtgggtaaaggtttaaccttcgactccggcggtatctcgatcaagccttcagaaggcatggatgagatgaagtacgatatgtgcggtgcggcagcggtttacggcgtgatgcggatggtcgcggagctacaactgccgattaacgttatcggcgtgttggcaggctgcgaaaacatgcctggcggacgagcctatcgtccgggcgatgtgttaaccaccatgtccggtcaaactgttgaagtgctgaataccgacgctgaaggccgcctggtactgtgcgacgtgttaacttacgttgagcgttttgagccggaagcggtgattgacgtggcgacgctgaccggtgcctgcgtgatcgcgctgggtcatcacattaccggtctgatggcgaaccataatccgctggcccatgaactgattgccgcgtctgaacaatccggtgaccgcgcatggcgcttaccgctgggtgacgagtatcaggaacagctggagtccaattttgccgatatggcgaacattggcggtcgtcctggtggggcgattaccgcaggttgcttcctgtcgcgctttacccgtaagtacaactgggcgcacctggatatcgccggaaccgcctggcgttctggtaaagcaaaaggcgccaccggtcgtccggtggcgttgctggcacagttcctgttaaaccgcgctgggtttaacggcgaagagtaa

SEQ ID NO: 459929 - DNA, 444 bp, Shigella boydii
atgaaaaacgcgacgttctaccttctggacaatgacaccaccgtcgatggcttaagcgccgttgagcaactggtgtgtgaaattgccgcagaacgttggcgcagcggtaagcgcgtgctcatcgcctgtgaagatgaaaagcaggcttaccggctggatgaagccctgtgggcgcgtccggcagaaagctttgttccgcataatttagcgggagaaggaccgcgcggcggtgcgccggtggagatcgcctggccgcaaaaacgcagcagcagcccgcgcgatatattgattagtctgcgaacaagctttgcagattttgccaccgctttcacagaagtggtagacttcgttccttatgaagattctctgaaacaactggcgcgcgaacgctataaagcctaccgcgtggctggtttcaacctgaatacggcaacctggaaataa

SEQ ID NO: 459930 - DNA, 2856 bp, Shigella boydii
atggaaaagacatataacccacaagatatcgaacagccgctttacgagcactgggaaaagcagggctactttaagcctaatggcgatgaaagccaggaaagtttctgcatcatgatcccgccgccgaacgtcaccggcagtttgcatatgggtcacgccttccagcaaaccatcatggataccatgatccgctatcagcgcatgcagggcaaaaacaccctgtggcaggtcggtactgaccacgccgggatcgctacccagatggtcgttgagcgcaagattgccgcagaagaaggtaaaacccgtcacgactacggccgcgaagctttcatcgacaaaatttgggaatggaaagcggaatccggcggcacgattacccgtcagatgcgccgtctcggcaactccgtcgactgggagcgtgaacgcttcacgatggacgaaggcctgtccaatgcggtgaaagaagttttcgttcgtctgtataaagaagacctgatttaccgtggcaaacgcctggtaaactgggatccgaaactgcgcaccgctatctctgacctggaagtggaaaaccgcgaatcgaaaggttcgatgtggcacatccgctatccgctggctgacggcgcgaaaaccgcagacggtaaagattatctggtggttgcgactacccgtccggaaaccctgttgggcgataccggcgtggccgttaacccggaagatccgcgttacaaagacctgattggcaaatatgtcattctaccgctggttaaccgtcgtattccgatcgttggcgacgaacacgccgacatggaaaaaggcaccggctgcgtgaaaatcactccggcgcacgactttaacgactatgaagtgggtaaacgtcacgcgctgccgatgatcaacatcctgacctttgacggcgatatccgtgaaagcgcccaggtgttcgataccaaaggtaacgaatctgacgtttattccagcgaaatcccggcagagttccagaaactggagcgttttgctgcacgtaaagcagtcgttgctgcggttgacgcgctcggcctgctggaagaaattaaaccgcacgacctgaccgtgccttacggcgaccgtggcggcgtagttatcgaaccgatgctcaccgaccagtggtacgtgcgtgccgatgtactggcgaaaccggcggttgaggcggttgagaacggcgacattcagttcgtaccgaagcagtacgaaaacatgtacttctcctggatgcgcgatattcaggactggtgtatctctcgtcagctgtggtggggtcaccgtatccctgcatggtacgacgaagcaggtaacgtttatgttggccgcaacgaagaagaagtgcgcaaggaaaataacctcggtgccgacgttgccctgcgtcaggacgaagacgttctcgacacctggttctcttctgcgctgtggaccttctctaccctaggctggccggaaaacaccgacgcactgcgccagttccacccaaccagcgtgatggtatctggtttcgacatcattttcttctggattgcccgcatgatcatgatgaccatgcacttcatcaaagatgaaaatggcaaaccgcaggtgccgttccacaccgtttacatgaccggcctgattcgtgacgacgaaggccagaagatgtccaaatccaagggtaacgttattgacccgctggatatggttgacggtatttcgctgccggaactgctggagaaacgtaccggcaatatgatgcagccgcagctggcggacaaaatccgtaagcgcaccgagaaacagttcccgaacggcattgagccgcacggcaccgatgccctgcgcttcaccctggcggcgctggcttctaccggtcgtgacatcaactgggatatgaaacgcctggaaggctaccgtaacttctgtaacaagctgtggaacgccagccgctttgtgctgatgaacacggaaggtcaggattgcggcttcaacggtggtgaaatgacgctgtcgctggcggaccgctggattctggcagagttcaaccagaccatcaaagcgtaccgcgaagcgctggacagcttccgcttcgatatcgctgcaggcattctgtatgagttcacctggaaccagttctgcgactggtatctggagctgactaagccggtaatgaacggtggaaccgaagccgaactgcgcggtactcgccatacgctggtgactgtactggaaggtctgctgcgcctcgcgcatccgatcattccgttcatcaccgaaaccatctggcagcgtgtgaaagtactttgcggtatcactgccgacaccatcatgctgcagccgttcccgcagtacgatgcatctcaggttgatgaagccgcactggctgacaccgagtggctgaaacaggcgatcgttgcggtacgtaacatccgtgcagaaatgaacatcgcgccgggcaaaccgctggtgctgctgctgcgtggttgcagcgcggatgcagaacgtcgcgtaaatgaaaaccgtggcttcctgcaaaccctggcgcgtctggaaagcatcaccgtgctgcctgccgatgacaaaggtccggtttccgttacgaagatcatcgacggcgcagagctgctgatcccgatggctggcctcatcaacaaagaagatgagctggcgcgtctggcgaaagaagtggcgaagatcgaaggcgaaatcagccgtatcgagaacaagctggcgaatgaaggctttgtcgcccgcgcaccggaagcggtcatcgcgaaagagcgtgagaagctggaaggctatgcagaagcgaaagcgaagctgattgaacagcaggctgttatcgccgcgctgtaa

SEQ ID NO: 459931 - DNA, 327 bp, Shigella boydii; identical to SEQ ID NO: 5975

SEQ ID NO: 459932 - DNA, 309 bp, Shigella boydii
atgaaaaaaagaaattttagcgcagagtttaaacgcgaatccgctcaactggttgttgaccagaaatacacggtggcagatgccgccaaagctatggatgttggcctttccacaatgacaagatgggtcaaacaactgcgtgatgagcgtcagggcaaaacaccaaaagcctctccgataacaccagaacaaatcgaaatacgtaagctgaggaaaaagctacaacgcattgaaatggagaatgaaatattaaaaaaggctaccgcgctcttgatgtcagtgaaccgccccgggaatcctggagactaa

SEQ ID NO: 459933 - DNA, 1005 bp, Shigella boydii
atgacaaacttcacgaccagcacgccacatgacgcattatttaaatcctttctcactcaccctgacaccgcgcgggattttatggagatccacatacccaaagatttacgtgaactgtgcgatctcgacagcttaaaactggaatccgccagctttgtcgatgaaaaattgcgggtgctacactccgatattctgtggtcggtaaagacccgtgaaggtgatggttatatttacgtagtgattgaacatcagagccgcgaggatattcatatggcatttcgcctgatgcgatattccatggcggtgatgcagcgccatatcgagcatgataaacgccggccgctaccgctggttatcccgatgctgttttatcacggtagccgtagtccttacccctggtccctgtgctggctggacgaatttgccgccccgactaccgcacggaaactttatagcgcagcgttcccgctggtggatgtcactgtcgtgccagacgacgagattgtgcagcatcgcagagtcgccctgttggagttgatccaaaagcatattcgccagcgcgatttgatggggcttattgaccaactggtagtattactggttacagagtgtgctaatgacagccagataactgcgctgttaaattacattttactgactggcgatgaagcgcgttttaaggcgtttatcagcgaacttaccaggcgaatgccacaccacagggagcgaataatgacaattgcagagcgaattcataatgatggatggctgttgggaagggagagggggaggaaagaagggaaagtagaaggggaacggagcctcctccgattgttgttgcagaatggggccgatcctgaatggatacaacgatataccggactttcggcagagcaaatgcaggcattagatctgaagtggcacactgaatttggccacctgaacagaggtgatatgctcacctcagaacaacacaggtgctccaatgaaaaaaagaaattttag

SEQ ID NO: 459934 - DNA, 1233 bp, Shigella boydii
atgccacgtttttttgcccgccatgccgccacgctgtttttcccgatggcgttgattttgtatgactttgccgcgtacctgtcgacggatctgatccagccggggatcattaatgtggtccgtgattttaatgccgatgtcagtctggccccggcagccgtcagtctctatctcgcgggcggtatggcgttacagtggctgctggggccgctttccgacaggattggccgcaggccggtgctgattaccggggcgctaatatttacccttgcctgcgctgcgacaatgttcacaacgtctatgacacagtttcttatcgcgcgtgcaattcagggcaccagtatctgttttattgccaccgttggttatgtcacggtgcaggaggcgttcggccagacaaaagggatcaagttgatggcgattatcacctccatcgtactgattgcgccgattattggcccgctttccggcgcagctctgatgcactttgtgcactggaaagtcctttttgccatcattgcagttatgggttttatctcatttgttggcttactgctggcgatgccagagacggtgaagcgcggcgcggttccatttagcgccaaaagcgtctttcgcgattttcgtaatgtcttttgcaatcggctgttcctctttggcgcagcaaccatctctttaagctatatcccaatgatgagttgggtggctgtctcgccggtgatcctgatcgacgcgggcagcttaacaacttcgcagttcgcctggacacaggttccggtgttcggcgcggtgattgtcgcgaatgccatcgtggcgcgtttcgttaaagatccgaccgaaccgcgctttatctggcgtgctgtacccattcaactggtcggcctcgcgctgttgattatcggcaatctgctgtcaccgcacgtctggctgtggtcggtgctgggcaccagtttgtatgctttcgggattggtttgatcttcccgaccttattccgctttacgcttttttccaataacttaccgaaagggaccgtctccgcatcgctgaatatggtgatcctgatggtgatgtctgtctcggtcgaaatcggccgctggctgtggtttaacggcggtcgcttgccgtttcatctgttagccgtcgtggcgggcgttatcgtcgttttcaccctggcaggattgcttaatcgcgtgcgccaacatcaggctgccgagctggcggaggagcggtga

SEQ ID NO: 459935 - DNA, 1281 bp, Shigella boydii
atgaataaactcattgaactcagacgcgccaaaatgttggcgctctctttactgcttatcgccgctgctacctttgtcgttacgctgtttttgccgcccaatttttgggtgagcggcgtgaaggcgattgctgaagcggcgatggtcggcgcgctggcggactggtttgcggtggtggcgctgtttcgccgcgtgccgattccgatcatttctcgtcatacggcgattatcccgcgtaataaagaccggattggcgaaaatctcggtcagttcgtgcaggaaaaatttctcgatacccagtcgctggtggcattgattcgacgtcacgaaccggcgttgttgattggcaactggtttagtcagccggagaacgcccgccgcgttggtcagcatctgttgcagatcatgagcggttttcttgaactgaccgatgatgcgcgtattcagcgcctgcttaagcgcgcggtccatcgggcgattgataaggtcgatctttccggaaccagtgcgttgatgctggagagtatgaccaaaaacgatcgtcatcaggtgctgctcgatacgctgatcgcacagttgatcgcccttctccagcgcgataaatcgcgcaagtttattgcccagcaaattgttcgctggctggagagcgagcatccgctgaaagccaaaattttgcctactgaatggctgggcgaacatagcgcggagttggtttctgacgcggtgaattctttgcttgatgatatcagccgcgatcgtgcgcatcagatccgtcatgcgtttgatcgcgccacttttgccctgatcgacaagctgaaaaacgatccggaaatggcagcgcgagccgatgccgtaaaaagttatctgaaagaagatgaagcttttaaccgctatctcagtgaattgtggggggatttacgggaatggctgaaagcggatatcaacagtgaagattctcgtgtgaaagaacgtatcgcgcgggcgggtcaatggtttggcgaaacgttaattgccgatgatgccttgcgggcatcgttaaatggtcacctggaacaagccgcgcaccgcgtcgcgcctgagttttccgcattcctgacgcgccacatcagcgatacagtaaaaagctgggatgctcgggatatgtcgcggcaaatcgagttaaatatcggcaaagatctgcagtttatccgtgtcaacggtacgctggttggcggttgtattgggctaattttatatttgttgtcgcagctcccggccttgttccccctcagcaatttttag

SEQ ID NO: 459936 - DNA, 888 bp, Shigella boydii
atgtcacttatcaccgatctacccgccattttcgatcagttctctgaagctcgccagaaaggctttctcaccgtcatggatctcaaggagcgcggcattccgctggttggcacttactgcacctttatgccgcaagagatcccgatggcagccggtgcggttgtggtttcgctctgttctacctctgatgaaaccattgaagaagcggagaaagatctgccgcgcaacctctgcccgctgattaaaagcagctacggcttcggcaaaaccgataaatgcccctacttctacttttcggatctggtggtcggtgaaaccacctgcgacggcaaaaagaaaatgtatgaatacatggcggagtttaagcccgttcatgtgatgcagttgccgaacagcgttaaggacgatacctcgcgtgcgttatggaaagccgagatgctgcgcttgcaaaaaacggtagaagaacgttttgggcacgagattagcgaagatgctctgcgcgatgccattgcgctgaaaaaccgcgaacgtcgcgcactggccaatttttatcatcttgggcagttaaatcctccggcgcttagcggcagcgacattctgaaagtggtctacggcgcaaccttccggttcgataaagaggcgttgatcaatgaactggatgcaatgaccgcccgcgttcgtcagcagtgggaagaaggccagcgactggacccgcgtccacgcattttaatcaccggctgcccgattggcggcgcagcaaaaaaagtggtgcgggcgattgaagagaatggcggctgggttgtcggttatgaaaactgcactggggcgaaagcgaccgagctaatgcgtggcggaaacgggcgatgtctacgacgcgctggcggataa

SEQ ID NO: 459937 - DNA, 306 bp, Shigella boydii
gtggcggaaacgggcgatgtctacgacgcgctggcggataaatatctggcgattggctgctcctgtgtttcgccgaacgatcagcgcctgcaaatgctcagccagatggtggaagaatatcaggtcgatggcgtagttgatgtgattttgcaggcgtgccatacctacgcggtggaatcgctggcgattaaacgtcatgtgcgtcagcagcacaacattccttatatcgctattgaaacagactactccacctcagatgtcgggcagctcagtacccgtgtcgcggcctttattgagatgctgtaa

SEQ ID NO: 459938 - DNA, 768 bp, Shigella boydii
gtgacatattcgattggcattgattctggttctaccgccaccaaagggatcttactggcagacggcgtgattacgcgccgtttcctcgttccaacaccctttcgtccggcaacagcaattactgaagcctgggaaactctgcgcgaagggttagagacaacgccgtttctgacgctcaccggctatggacggcaactggtggattttgccgataaacaagtgacggaaatctcctgtcacgggctgggcgcacggtttcttgcgccagcaacgcgcgcggtaatcgacatcggtggtcaggacagcaaagtgattcagcttgatgatgacggtaacctgtgcgatttcctgatgaatgacaaatgcgcggcgggcaccgggcgtttcctggaagtgatctcgcgcacgcttggcaccagcgtcgagcaactcgacagcattaccgaaaatgtcacgccgcatgccatcacgagtatgtgcacagtgtttgccgaatcagaagtgatcagcctgcgctcagcgggcgtcgcgccagaagcgattctcgccggagtgattaacgcgatggcgcggaggagtgccaatttcattgctcgtctctcctgtgaagcgccgattctgtttactggtggcgttagtcattgccagacgtttgcccggatgctggaatctcacctgggaatgccggtaaatacccatcctgatgcgcaatttgctggcgcaattggcgcggcggtaattggtcaacgagtgaggacacgccgatga

SEQ ID NO: 459939 - DNA, 258 bp, Shigella boydii
atgaaagagtttttatttttatttcactccacagtcggcgtcatacaaacccgcaaagcgttgcaggcagcgggcatgacttttcgcgtcagcgatattccccgtgatttacgcggcggctgcgggttatgcatttggctgacctgtccccccggcgaggaaatacaatgggtgatccctgggctgactgagtcaatttattgccagcaggatggtgtctggcgctgcattgcacattaccgggtttctccgcgttaa

SEQ ID NO: 459940 - DNA, 972 bp, Shigella boydii
atggtgtctggcgctgcattgcacattaccgggtttctccgcgttaaggattcattaaggtcgctacgtatacttctcgatatcttattgatttgccttaaagggattaccgtgacaaaaagtatttcgttaagtaaacgcatctccgttattgtgattctttttgccattgtggcagtgtgtactttcttcgtgcaatcttgcgcccgtaaaagcaatcatgcagcatcatttcagaattaccacgccaccattgacggcaaagaaattgcaggcataacgaataatatctcttcgctgacctggtcggcacaaagcaatactctttttagcactatcaacaaacctgccgccattgttgaaatgaccaccaatggtgattttatccgcacaattcctctggattttgttaaggatctcgagacgatcgaatacattggcgataatcagtttgtcattagcgatgagcgcgattacgccatttatgtgatttcactgaccccaaactcggaagtaaaaatcctcaaaaaaataaaaatcccgctgcaagactccccaaccaattgcggttttgaagggttggcttattctcgccaggatcacactttctggttttttaaagagaaaaatccgattgaggtctacaaagttaacgggctgttaagtagcaatgaattacacatcagcaaagacgaggcactacaacggcaatttactttagatgatgtgtccggcgcagaatttaaccagcaaaaaaatacgcttctggtgctgtctcatgaatctcgcgcactccaggaagtaaccctggttggcgaggttatcggtgaaatatcactaaccaaaggtagtcgaggtttgtcgcataacatcaaacaggccgaagggattgcgatggatgcctctggtaatatttatatcgttagcgaaccaaatcgtttttatcgctttacccctaaatcatcgcattaa

SEQ ID NO: 459941 - DNA, 1179 bp, Shigella boydii
atgccttcgtcctcgcatcccgtagaacgcttttctttcagcaccgcgcttttcgggatgctggttctgaccctaggtatgggattaggtcgcttcctttatacgcctatgttgcccgtcattatggcggaaggggcgttttcatttagccagctctcgtggattgccagcggcaactatgcggggtatctggctggcagtctgctattttcgtttggcgcatttcaccagccgtcgcgcctacgcccatttctgttggtttctgccctggcgagcgggttgttgatcctcgcaatggcatggttgccgccatttattctggtgttattgattcgcttcctggcgggtgtcgccagcgccggtatgctgatttttggttcgacgctgattatgcagcacacgcgccatccttttgtgctggcagctttgttttctggcgttggcattggcattgcactgggcaacgaatatgttctggcaggcctgcattttgccttctcctcgcaaacgttatggcaaggcgccggggcgctttctggcatgatgctgattgcacttacgcttttaatgccctcgaaaaaacacgccatcgcaccaatgccattggcaaaaacggagcaacagataatgagctggtggttactggctattctgtacggccttgcgggatttggttatatcatcgtcgcgacttacctgccgctcatggcgaaagatgcaggctcaccattgttaaccgcccatctctggacgttagtcggcttatcaattgtgccaggctgctttggctggctatgggcagcaaaacgttggggggctttgccttgcctgacggcgaatttgctggtgcaggctatcagtgtgctgcttactctcgccagcgactctcctctcttgcttatcattagtagtatcggttttggcggtacctttatgggcacgacatctctggtgatgactatcgcccgccaactgagcgttccgggaaatctcaatcttttaggctttgtgacgctcatttacggcattggacaaatcctcggcccggcgctgaccagtatgctcggcaatggaacatcggcgcttgccggcgccactctctgcggcgcggcggcgttgtttattgctgcgcttatcagcacagtacaattatttaagctgcaagtggtcacttcatga

SEQ ID NO: 459942 - DNA, 555 bp, Shigella boydii
atggcaaagcacaacgaaaaagagctggcggatacgagcaagtttttaagttttgtcctccgacacaaaccggaggcgattggtatcgtactggaccgtgaaggatgggcggatatcgataagctcatactttgtgcccaaaaagcgggcaagcgattaacccgtgcattgctggataccgtggtcgcaaccagcgataaaaagcgttttagttattccagtgatggtaggtgcatccgcgcggttcaggggcattcgacttcgcaggtcgctatttcctttgccgaaaaaacaccgccacagtttctctaccacggtacggcaagccgtttccttgacgagataaaaaaacaggggctgattgcaggggatcgtcattacgtgcatctctctgctgatgaagcaacggcacgcaaagtgggagcaagacacggatcgccggttgtcttaaccgtcaaagcacaggaaatggcgaaacgaggcattcctttctggcaagcggaaaacggagtctggctgacatcaacggttgcggtcgaatttcttgagtggtaa

SEQ ID NO: 459943 - DNA, 684 bp, Shigella boydii
atgacacaacaaggggatgctgtagccggggagctggcgacagaaaaagtgggcattaaagggtatctggctttttttctcaccataatctttttttccggtgttttttccggaacagacagctggtggcgcgtttttgatttttccgttctgaacggatcgtttgggcaactgcctggtgcgaacggagccaccacctcatttcgcggcgcgggtggtgcgggggctaaagatggctttctctttgcgctggagctggcaccgtcagtcattctctctctggggattatttcaattaccgatggtcttggtggattacgcgccgcgcagcagttaatgacacctgtgctaaaaccgttgttgggcattccagggatctgctcgctggcgctgatcgctaacttgcaaaacactgatgccgccgccggtatgaccaaagagctggcgcaggaaggtgaaattaccgaacgcgataaagtgattttcgccgcatatcaaaccagcggtagcgccatcatcaccaactacttctcttccggcgtcgcggtgttcgcctttctgggcacgtccgtaatcgtacctttagccgtcatcctggtgtttaaatttgtcggagccaacattttgcgcgtctggcttaacttcgaagaacgtcgcaacccaacgcaaggagcgcaagcatga

SEQ ID NO: 459944 - DNA, 462 bp, Shigella boydii
atgacaactcaggtccgcaaaaacgtcatggatatgtttatcgatggcgcgcgccgtggctttactatcgccacgaccaacctgctgccaaacgtggtgatggcgtttgtcatcattcaggcgctgaaaattaccggcctgctcgactgggtggggcatatctgtgaacccgtaatggcgctgtggggattacccggtgaagcggcaaccgtccttttagccgcattaatgagtatgggtggcgcagtcggtgttgccgccagtctggcaaccgctggcgcattaaccggtcacgatgtcaccgttttactgcccgcgatgtatttaatgggcaacccggtgcaaaatgtcggtcgctgcctggggacagccgaagtgaatgccaaatattacccgcatatcattacggtctgcgtgattaacgcattgctgtcgatctgggttatgcagcttattgtttaa

SEQ ID NO: 459945 - DNA, 1173 bp, Shigella boydii
atgattgattataccgcagccggttttaccctgctgcagggagcgcatttgtatgcaccggaagatcggggaatttgcgatgtcctcgtcgctaacggcaaaattatcgccgttgccagcaatatcccttctgacattgtaccgaactgcacggttgtcgatctcagtgggcagatcctctgcccaggttttattgatcaacacgtccatttgattggcggtggcggcgaagcaggtcccacgacgcgcacgccggaagtggcgctaagtcgcctgacggaagcgggcgtcacgtcagtggttggtctgctgggcaccgactctatctctcgccacccggaatccctgctcgccaagacccgtgcgctcaatgaagaaggcatcagcgcctggatgctgaccggcgcttatcatgtcccttcccgcactattacgggttccgtggaaaaagacgtggcgattatcgatcgtgtgattggcgtgaaatgcgccatctctgatcaccgttctgccgcaccggacgtttatcacctggctaatatggcggcagaatcccgcgttggcggtttgctcggcagtaaacctggcgtcaccgtgttccacatgggcgacagtaaaaaggcgttacagcctatttatgacctgctggaaaactgcgatgtgccgatcagcaagctgctgccgacccacgttaaccgcaacgtaccgttgtttgagcaggcgctggagttcgcgcgcaaaggcggcaccatcgatatcaccagcagcattgacgaaccggtcgcccctgccgaaggtattgcccgcgccgttcaggcgggtattccgctggcacgcgtcaccctcagctccgacggcaacggtagccagccgttcttcgatgacgaagggaatttaacccatatcggtgttgcaggttttgaaacgttgctggaaaccgtgcaggtgctggtcaaagactatgatttcagtatcagcgatgccctgcgcccgctcaccagtagcgtagccggtttccttaacctgagcgggaaaggcgaaattctgcctggcaatgacgcagacttactagtcatgacgccagaattgcgcattgagcaggtatatgctcgcggcaaactgatggtcaaagacggcaaagcctgcgtgaaaggaacgtttgaaacggcttaa

SEQ ID NO: 459946 - DNA, 912 bp, Shigella boydii
atggatgactgtggtgcggttttgcataatattgaaaccaaatggctttatgattttctgaccctggaaaaatgccgcaatttttcccaggcggcagtcagtcgtaacgtctcgcaaccggcattcagccgccgcatccgcgcgctggaacaggcgattggcgttgaattgtttaaccgccaggtgacgccgctgcaactctcagaacaagggaaaatcttccattcgcagatccgccatctgttgcaacagttagaaagtaaccttgcagagctgcgtggcggcagcgattacgcgcaacgtaaaatcaagatagccgctgcacactctctttccctcggtctgttaccgtccattatcagccagatgccgccgctctttacctgggcgattgaagctattgatgtcgatgaagcagtcgataaactgcgtgaagggcaaagtgactgtattttttcctttcacgacgaagatttgctggaagcaccgtttgaccacattcgcttatttgaatctcaattgttccccgtttgcgccagtgacgaatacggagaagcaatttttaacctcgcgcagccacactttccgttactgaattacagccgcaactcctatatggggcgattgattaatcgcaccctgacgcgccacagcgagttaagtttcagcaccttttttgtctcttcgatgagcgagctattaaagcaggttgccctcgacggctgtgggattgcctggctgccggagtatgccatccaacaagaaattcgcagcgggcaactcgttgtgctgaatcgggacgaactggtgatcccgattcaggcctacgcataccgtatgaatacccgcatgaatccagttgccgaacgcttctggcgtgaactgcgcgagctggagattgtgcttagctga

SEQ ID NO: 459947 - DNA, 393 bp, Shigella boydii
atgatgcgccaatcacttcaggctgttttacctgaaatttcaggcaataaaacgtcattgctgcgtaaatcggtatgcagcgatctcctcactctttttaattctcctcattcggcattaccgtcattacttgtttcaggcatgcccgagtggcaagtgcataacccgagcgacaaacatctccagagctggtattgccgtcagctgcgttctgcactgttatttcatgagccacggattgcggcgttgcaggttaatttgaaagaagcgtactgccacactctggcgatcagccttgagataatgctgtaccacgacgatgaaccgctaacgtttgatctggtctgggataatggcggttggcacagtgcgacgcttgagaatgtcagctaa

SEQ ID NO: 459948 - DNA, 2784 bp, Shigella boydii
atgagaaacctctgtttcttactgacgttagtggcaactctgttgctccccgggcggctgattgccgccgccttaccgcaggatgaaaagttaattaccgggcaactggacaatggcttgcgatatatgatttatccgcatgctcaaccaaaggatcaggtaaatttatggctgcaaattcataccggttcattgcaggaagaagacaatgagcgcggcgtggctcattttgtagaacatatgatgtttaacggcacaaaaacatggccgggtaataaagtcatcgaaacatttgagtcaatgggcctgcgttttggtcgcgatgttaatgcctataccagctatgacgaaacggtgtatcaggtgagtttgccgactacgcagaaacaaaatctgcaacaagtgatggcaatcttcagtgaatggagtaatgccgcaacctttgaaaaactcgaagtagacgctgaacgtggcgtaattactgaggaatggcgtgcccatcaggatgcgaaatggcgcacctctcaggcgcgccgccctttcctgctggctaatacccgtaatttagaccgtgaacctatcggcctgatggatactgtcgccacggtcacaccggcacaattgcgccaattttatcaacgctggtatcaaccaaataatatgacctttatcgtggtcggcgatatcgacagtaaagaagcgctggcgctgataaaggataatttaagtaagcttccggctaacaaagcagctgaaaatcgcgtctggccgacaaaagccgaaaaccacctgcgctttaatatcattaatgataaagaaaaccgggtgaacggcatcgcactctattatcgcctgccaatggtacaagtgaacgatgagcaaagctttatcgaacaagctgaatggagcatgttagttcagctgttcagtcaacgtctgcaggaacgcatacagtcgggcgagttgaagactatttctggcggcactgcgcgcagcgttaaaattgcacccgattatcagtcgctgtttttccgtgtaaatgcacgagacgataatatgcaggatgctgcgaatgcattaatgtcagagttggcaaccattgatcagcatggtttttctgctgaagaactcgatgatgtcaaatctacccgcctcacctggctgaaaaatgcggttgatcagcaagctgaacgtgatttacgtatgctgaccagtcgcctagcatccagctcattaaataatacgccgttcttgtcgccggaagagacatatcaactttcgaaacgtctgtggcagcaaattaccgtgcaaagtctggcggaaaaatggcagcagttaagaaagaaccaggacgcattttgggagcaaatggtaaacaatgagcttgccgccaaaaaagcattgtctcctgcggctatcctggcgctggaaaaagagtacgccaacaaaaagctggcggcttacatcttcccaggcagaaatttatcgttaacagtagacgctgacccacaggcggaaattagcagcaaagaaacgctggctgagaatctgacatcattaacactttccaatggtgccagggttattctggcaaaatccgcgggtgaagagcaaaagctacaaattactgccgtatcgaataaaggcgatttaagtttccctgcgcagcaaaaatcacttatcgcgctggcaaataaagcagtaagcggaagcggcgttggtgagctctcctcttccagcctgaaacgctggagtgcggaaaattcggtaaccatgagcagtaaagtcagtggcatgaatacgttgctctccgttagcgcgcggactaataaccctgaacctggttttcagttgattaaccagcgaatcacccacagcacgattaacgacaatatttgggcatcgctacaaaatgctcaaattcaggcgttgaaaacgctcgaccagcgtccagcggagaaattcgcccagcagatgtatgagacgcgctatgctgatgaccgcacgaaattactgcaagaaaatcagattgtacagtttactgccgcagatgcgctggctgccgatcgccagttgttttcatctccagcggatatcacgtttgtcattgtcggtaatgtctcagaagacaaactcgtggcgttaattacgcgttacttaggatcaatcaaacactctgattcgccattagccgcaggtaaaccattaactcgcgcgacggacaacgcatcggttactgtaaaagaacaaaatgaacctgtggcacaggtttcacagtggaagcgttatgattcccggacacctgttaatctggcgacgcgtatggcgctcgatgcttttaacgtcgcactggcaaaagatctacgtgttaatattcgtgaacaggcatctggagcatacagcgtttcttctcgcctctcggttgatcctcaggccaaagatatcagtcatttgctggcttttacttgtcaaccagaacgacatgatgaactgttaacgttagcgaatgaagtgatggttaagcgtctggctaaagggatcagtgagcaagaactgaatgaataccagcaaaacgttcagcgcagcctcgatatccaacagcgtagcgttcaacaattagcgaacactattgtaaatagtcttattcaatatgacgatcctgcagcatggactgagcaggagcaattgttgaaacaaatgacggtagagaatgttaacactgccgttaaacaatatctttctcatccggtaaatacttataccggagtattattgccaaaataa

SEQ ID NO: 459949 - DNA, 2373 bp, Shigella boydii
atgaagcgagttcttattcctggcgtcattttatgtggtgctgatgtggcgcaggccgtcgatgacaaaaacatgtacatgcatttttttgaagagatgacggtctatgctcctgtccctgtacccgtaaacggcaacacgcattacaccagtgaaagcatcgagcgtttaccgaccgggaatggcaatatcagcgatctgctgagaaccaaccctgcggtacgcatggattcaacgcaaagtacctcgttgaaccagggagatattcgccctgagaaaatctctattcacggtgcgtcgccctaccagaatgcctatttgattgacggtattagtgcaactaataacctgaacccagcgaatgagtccgatgccagtagtgcaaccaatattagcgggatgtcacaggggtattatcttgatgtcagcttactggacaatgtgacgctttatgacagttttgtgccggttgaatttggtcgcttcaatggcggggtaattgatgcaaagatcaaacgcttcaacgctgatgatagcaaggtgaaattgggttatcgcactacgcgttcggactggttaacatcgcatatcgatgagaataacaagagcgcatttaatcaaggttcttcaggaagtacttatttctctccagattttaaaaagaacttttataccttgtcgtttaatcaggagctggctgataactttggcgttaccgccggtttatcgcgccgccagtctgatatcacccgcgcggattatgtttcgaatgacggcattgtcgccggtcgggcacagtataaaaacgttatcgatactgcattgagcaaatttacctggtttgccagcgaccgctttacccacgatttaaccttaaaatataccggctccagccgtgattataataccagcaccttcccgcagtctgatcgcgaaatgggtaataaatcctatggtcttgcatgggatatggatacgcaactcgcatgggccaaactacgtaccaccgttggttgggatcatattagtgattatacccgtcacgatcatgacatctggtacaccgaactttcatgtacatatggtgatattacagggcgttgtacccgtggcggattaggacacatttcccaggctgtagataattacaccttcaaaacacgcctggactggcaaaaattcgccgtgggtgatgtttcgcatcaaccctactccggcgcggaatacatctattccgatgcatggactgaacgccataaccagtctgaatcctatgtgattaatgctgcaggaaagaaaactaaccataccatttaccataaaggtaaaggcagcctaggaattgacaactacacgctgtatatggcggatcacattagctggcggaatgtgtcgttaatgcccggtgtgcgttatgactatgacaactatctgtcaaaccacaatatctccccgcgctttatgacggaatgggatatttttgctgatcaaacctcaatgattaccgccggttataaccgttactatggcgggaatattcttgatatgggattacgtgatatccgcaatagctggacggaatcggtatcaggtaataaaaccctgacgcgttatcagaatttgaaaacgccttataacgatgaactggcaatgggattgcagcaaaaaatcggtaagaacgttattgcacgcgcaaactatgtttaccgtgcagcgcatgatcaaatcagcaaaagcagtcgtaccgacagcgcgactaaaaccaccattactgaatataacaacgatggcaaaaccaaaacgcattcgtttaacctcagttttgaactggccgaacccctgcatatccgccaggtagatattaacccgcaaattgtctttagctatatcaagagcaagggcaacttgtcgttaaacaatggttatgaggagagcaataccggtgataaccaggtggtttataacggtaatctggtctcttacgatagcgttccagtggcagattttaataacccattaaagatctccttaaacatggatttcacgcatcaaccgagcgggttagtgtgggcgaatacgctggcctggcaagaagcgcgtaaagctcgcattatccttggtaagacaaatgcgcaatacatcagcgaatattcagattacaagcagtatgttgacgaaaaactggatagcagcctgacctgggacacccgcttgtcctggacgccacaatttctgaaacaacaaaacctgacgatcagtgccgatattctcaatgtactggatagcaaaaccgctgttgatacaacgaataccggtgtggcgacctacgccagtggccgtactttctggcttgatgtcagcatgaaattttaa

SEQ ID NO: 459950 - DNA, 1659 bp, Shigella boydii
atgttgatagcaaagtatctctgtctgctgaagcccttttggctgcgtaagaataataaaacttcagtgttgttaatcattattatcctcgcaatgatccttggcgtggttaaaattcaggtctggttaaacgactggaataatgattttttcaatgcgctaagccagaaagaaaccgataagctttggcagcttgttctttggttccctgccctgctggggatctttgtattaatatccgcaaacaaaacatggttaattaaactactgactattcgctggcgcgaatggttaacagattactaccttaatcgctggtttgcagataaaaactactacttcacgcagatctacggcgagcataaaaatacagataaccctgaccaacgtatcgctgaagacattctcttactgatcagcaaaacgctcagtctttcatttggcttcatccagtcacttagcatgctgatcacctttaccgttattctttggcaaagcgcgggtacgctctcattcactgttggtggaacagaatggaatatccaggggtatatggtctataccgtcgtgctcattgtgatcggtggaactttatttacccataaggttggtaagcgtattcgtccgcttaatgtggaaaaacaacgtagcgaagcgacatttcgaactaatcttgtgcagcataataagcaggcagaactgattgctctaagcaatgctgagtctctacaacgccaggagttgcgcgacaattttcataccattaaagagaactggcatcgtttaatgaatcgtcagcggtggcttgattactggcaaaatatttattcgcgctcgcttagcgttcttccctactttctgttattgccgcagtttattagcgggcagatcaatctgggcggactgatgaaatcgcgccaggcatttatgctagtatcgaacaatttaagctggtttatttataaatatgacgaacttgctgaactggctgcggttatcgatcgcttgtatgagttccatcaactcactgaacagcgccctacgaataagcctaaaaattgccaacatgcggtacaagtggctaatgcgagtattcgtacgcctgataataagatcatattagagaacttgaactttcatgtttcgccaggcaaatggctattactgaaaggctactctggtgcgggaaaaaccacactgcttaaaacattatcccactgctggccgtggtttaaaggtgatattttttctcctgctgacagttggtatgtgtcacaaacaccgttaatcaaaaccggcttactgaaagagattatttgtaaagcacttcccctgcccgtagacgataaatcgttgagcgaagtactgcatcaggttggtcttgggaaattggctgcgcgtattcatgaccacgatcgctggggagatattctttccagcggcgaaaaacaacgtatcgccctggcacgattaattttacgacgtccgaaatggatatttcttgacgaaactacctctcatcttgaggaacaagaggctatccgcttactgcgtttagtgcgtgaaaaactatccacaagcggcgtcattatggttacacatcaacccggtgtctggaacctggccgatgatatttgtgacattagcgcggttttataa

SEQ ID NO: 459951 - DNA, 612 bp, Shigella boydii
atgcaatttatcgaattgctcgaaaccgggacgccgaatattgatttcagtggtcatagtgagaacacattccgtatcattgatttttctgtgcctcccacggcttatggcaagtttatgtcaaccatttttatgcaatgggttaaaaacgatgtgggtgaaattttcattcgtcagtttgaaagctttgtcagccgttttttggggaatgggcatacaagttgtattttccaggagtcctgcaaggataatctggttgttgaaagtaatggagacatttacgaatgcgaccattttgtctatccacagtacaaaattggaaacattaataaatctgaactcaaaacgatgaacagtgtacaactgacagcgcaaaaaaaacggatttcagcgaaatgtcagcaatgtgcatataaacctatctgcaatggcggttgtcctaagcatcgtattactaaagtaaacaatgagactgtttcttatttttgcgaaggttataaaatccttttttcaaccatggtaccttatatgaacgccatggttgagttagctaagaacagagtaccgctttaccacattatggatgttgcaaaacaaatggagaataattaa

SEQ ID NO: 459952 - DNA, 762 bp, Shigella boydii
atgtcgctcgtttgttctgttatatttattcatcatgccttcaacgctaacattttagataaagattacgccttctctgacggcgagatcctgatggtagataacgctgttcgtacgcattttgaaccttatgagcggcattttaaagagatcggatttactgaaaataccattaaaaaatatctacaatgcactaacatccagacagtgacggtgcctgttcctgcgaagtttttacgtgcttcaaatgtaccgactggattgcttaatgaaatgattgcttatctcaactcggaagaacgcaatcatcataatttttcagaacttttgcttttttcttgcctgtctatttttgccgcatgcaaaggtttcattacactattaactaacggtgtgctatccgtttccggaaaagtgagaaatattgtcaacatgaagctggcgcacccatggaagctgaaagatatttgtgactgcctgtacatcagtgaaagcctgttgaagaaaaaactaaagcaagagcaaacgacattctcacagattctattagatgccagaatgcagcacgcaaaaaatttgatacgcgtagaaggttcagtcaataaaattgccgaacaatgtggttatgccagtacttcttattttatttatgcgttccgcaaacatttcggcaacagtccgaagagagtttctaaggagtaccgttgtcaaagtcacacgggtatgaatacgggcaacacgatgagtgctttagctatttga

SEQ ID NO: 459953 - DNA, 198 bp, Shigella boydii
atgcatgcgaccacagtgaaaaacaaaatcacgcaaagagacaactataaagaaatcatgtctgtaattgtggttgtcttattactgacccttacgttgatagccattttttcggcaattgatcagctgggtatttcagaaatgggtcgcattgcaagagatcttacacatttcattatcaatagtttgcaagactga

SEQ ID NO: 459954 - DNA, 2280 bp, Shigella boydii
atgaagaaaaaaattgaatcctaccagggtgctgcaggtggttggggtgctgttaaatccgtagcgaatgcagtacgtaagcagatggatatacgccaggatgttattgccatgtttgacatgaataagccagagggctttgactgtccgggttgtgcatggccagatcctaagcacagtgcgtcattcgacatttgtgaaaacggcgcaaaagcaatcgcctgggaagtcacggataagcaggtaaatgcctctttctttgctgagaatacggttcaatcattacttacctggggagatcacgagcttgaggctgcgggacgtctcactcagcctttgaaatatgatgccgtcagcgactgttacaagccattaagctggcaacaagctttcgacgaaattggcgcacgccttcaaagctatagtgatcccaatcaggttgaattctatacttcgggccgcacttccaatgaagctgcctttctttatcagctttttgcccgtgaatacgggagcaataactttcccgactgctccaacatgtgccatgaaccgaccagtgtgggtttggcagcgagtatcggcgtgggtaaagggactgtgttgctggaagactttgagaagtgcgatttagtcatttgcattgggcataaccctggtacaaaccacccccgcatgctgacttcgttgcgcgctttagtgaaacggggagcgaaaatgatcgccatcaatcctctacaggaacgtggcctggagcgatttaccgcaccgcaaaacccgtttgaaatgctgacgaactctgagactcagttggccagtgcgtactacaacgtgcgcattggtggcgatatggcgttgctcaaggggatgatgcgcctgttaattgagcgcgatgatgctgcaagtgccgcaggtcggccctcattgcttgatgacgaatttattcaaacgcataccgtcggctttgacgagctacgccgtgacgttctcaattccgagtggaaagatatcgaacgtatttctggactaagtcagacacaaatcgccgaactggctgacgcatatgccgctgccgatcgcaccattatctgttacggaatagggatcactcagcacgaacatggtacccagaatgtacagcaactggtcaatctgttgttgatgaaaggtaacattggcaagcctggtgcgggtatctgcccactacgaggtcactctaatgtacagggcgaccgaaccgtcggtatcaccgagaaaccgtctgcagagtttctggctcgcctgggtgagcgctatggcttcaccccacctcatgcacctggacatgctgcaattgccagcatgcaagcaatatgcacggggcaggctcgagcattgatctgcatggggggcaactttgcactggcaatgccagatcgggaagcgagcgctgtaccgttaacgcaattagatttggcggtacacgtagccactaagcttaaccgctctcatctgctgaccgcacggcatagctatattctgccggttctggggcgtagcgagattgacatgcaaaaaagcggtgcgcaggcggtaaccgttgaggattcaatgtcgatgattcatgcctcgcgtggcgtgttaaaacccgccggtgtaatgctgaaatcagagtgtgcagtggtcgcgggaatcgcgcaggcagcactaccccagagcgtggtagcctgggagtatctggtggaagattatgatcgcattcgcaatgacattgaagctgtgttaccagagttcgccgactataaccagcgcatccgacatcctggaggttttcacctgataaatgcagctgctgaaaggcgctggatgacgccgtcaggtaaggctaatttcattaccagcaaagggctgttagaagatccctcttcagcgtttaacagtaagctggtcatggcgacagtacgcagccacgatcagtacaacacgacgatttatggtatggatgatcgctatcgaggggtattcggtcaacgagatgtggtctttatgagtgctaaacaagctaaaatttgccgtgtaaaaaacggcgaaagagttaatcttattgcgcttacgccagacggtaagcgcagctcacgccgcatggatagattaaaagtggtcatttaccctatggctgaccgctcactggtgacctattttccagaatcgaatcacatgctaactcttgataaccacgatccattaagtggcattcctggttataaaagtattccggttgaattagaaccatcaaattaa

SEQ ID NO: 459955 - DNA, 210 bp, Shigella boydii
atgagtccactacggtatcagaaatgggaagtgggtgtctctctgatgcgtaatggaaaaatactggctacgggagaaaatgtctccctggggacagtaaataaaagcaaagtatctctgggtttaagcgcaacctatggacaaacaggaaacaaggttgcagccggaaccgtccagtcagtcattggtgtcacttttatctatgaataa

SEQ ID NO: 459956 - DNA, 489 bp, Shigella boydii
atggcgtttttgatggggtccagcgaggcgcttcgcgatcgttatgattttatgaaattccaggtcttccagtggttgattggcgcaacggatggccatgcaaaaaacttctccgtatttattcaggctggcggcagttatcgactcacgccattttacgacatcatttcagcatttccggtccttggcggtacgggaatacacatcagcgatctcaaactggcaatggggcttaacgcatccaaaggcaaaaaaatggcaatcgataaaatttatccgcgacattttttggcgacagcaacggtgctgagattcccggaagtgcagatgcatgaaatcctaagtgactttgccagaatgattccggcagcactggataacgtgaagacttcattaccgacagattttccggagaacgtggtgacggcagttgaaaccaatgtgttgaggttgcatggacggttaagccgagaatacggtagtaagtga

SEQ ID NO: 459957 - DNA, 354 bp, Shigella boydii
gtgagcgcaaccgccaggacagatgtagagctggatggcgataatagccgctttggggtgaaaacctacctgaacagccatcaccagcgtgacgatggtaaacagcgtgagttccagccttacattgaagcgaattggatcaacaacagcaaagtctacgccgtgaagatgaatggtcaaaccgtaggccgtgaaggtgcgcgtaatctcggtgaagtacgtaccggggttgaggcgaaagtaaataacaaccttagcctgtgggggaatgtcggtgtgcaactaggtgataaaggctatagcgatactcagggcatgctgggagtgaaatttaccttcatctgtgaaatatga

SEQ ID NO: 459958 - DNA, 819 bp, Shigella boydii
atgctgcttattatttctgcaaaagtggcgcattcactctggcgctatttctccttttctgcggaatatacggctgtttccccatcggcgaataaaccgccccgtgcggatgcaaaaacgttcgataaaaatgacgtgcaattaatcagccagcaaaactggtttggcaaatatcagcccgtcgccacgccggtaaaacaacccgaacctgtgcctgtggcagaaacgcgtcttaatgtggtgctgcgcgggatcgcctttggtgccagacccggcgcggttattgaagaaggcggtaaacagcaggtctatttgcagggtgaaacgcttggctcgcacaacgcggtgattgaggaaatcaatcgcgaccatgtgatgctgcgctatcagggaaaaatagagcgcctgagcttggctgaagaggagcgttccaccgttgccgcgaccaacaaaaaagctgtcagtgacgaagcaaagcaagctgttgctgaacctgctgtcagtgcgccagttgagataccgactgccgtgcgtcaggcactggcgaaagatccgcagaaaatttttaactatatccagcttacgcctgtgcgtaaggagggaattgtcggttatgcagtgaagccgggggcagatcgttctctgttcgatgccagcggtttcaaggaaggcgatatcgccattgcgctaaatcagcaggatttcactgatccacgagcaatgattgctctgatgcgacagttaccttcaatggattccattcaacttacggttttacgcaagggtgcgcgccacgacatttccatcgcgctgcgctaa

SEQ ID NO: 459959 - DNA, 1065 bp, Shigella boydii
gtgttttggcgtgatattacgttgtcggtctggcgtaagaagacaactggcctcaaaacaaaaaagcgtttactgccgctggtgctggcagcggcattatgcagttcaccggtctgggcggaagaagccactttcaccgctaattttaaagataccgacctgaaatcgttcatcgaaaccgtcggcgctaaccttaataaaaccatcattatggggccgggcgtacaggggaaagtgagtattcgcaccatgaccccgctcaatgaacgccagtattaccagctattccttaacctgctggaagcacaggggtatgccgtcgtaccgatggaaaacgacgtgctgaaggtggtgaaatccagcgctgcgaaagtcgagccgctgccgctggtcggtgaaggcagcgacaactacgcgggcgatgaaatggtcaccaaagtagtgccggtacgtaatgtgtcggtacgcgagctggcaccgattctgcgccagatgatcgacagcgcaggctcaggcaacgttgttaattacgatccctccaacgtgattatgctcaccggacgcgcctccgttgtggagcgcctgacggaagtgatccagcgcgtggatcacgcgggtaatcgcaccgaagaggtgatcccgctggataacgcctcggcttcggaaatcgcccgcgtgctggaaagcctgacgaaaaacagcggcgagaaccagcctgcgacgctgaaatctcaaattgtcgccgacgaacgcaccaacagtgtgattgtcagtggtgacccggccacgcgggacaaaatgcgccgcctgatccgtcggctggactcagaaatggaacgcagcggcaacagccaggttttctatctcaaatacagcaaagccgaagatctggtcgatgtgctgaaacaggtcagcggcacgctcacggcggctaaagaagaggcggaaggcacggtcggtagcgggcgtgaggttgtatccatcgccgccagcaaacacagtaatgccctgattgtaaccgcgccgcaggacatcatgcagtcgctgcaaagcgtaattgaataa

SEQ ID NO: 459960 - DNA, 339 bp, Shigella boydii
gtgcagtgggcgtcgaaagatgccggattaatgcagtttgctaatggtacgcagatccctatcggtacgctgggggcagccatttctcaggcgaaaccgcagaaaggctcgacggtgatcagtgaaaacggcgctaccaccattaatccggataccaacggcgatctctccacactcgcccagcttctttctggatttagcggtacggcggttggcgtggtgaaaggcgactggatggcactggtgcaggcggttaaaaacgactccagctcgaacgttctctccacgccgagcatcactacgctggacaaccaggaagccttcttcatggtgggctag

SEQ ID NO: 459961 - DNA, 495 bp, Shigella boydii
atgctgaaagtcacgccgcagattaacgaaggtaacgcggtacagatggtgattgagcaggaagtctcgaaggtggaaggacagaccagcctcgacgtggtgtttggtgagcgcaaactgaaaaccaccgtgctggctaacgatggtgagctgattgtgcttggtggtctgatggacgatcaggcgggagaaagcgtggcgaaagtgcctctgctgggcgatatcccattgattggtaacctgtttaaatcgacggcggataaaaaagaaaaacgtaacctgatggtgtttatccgcccgaccattctgcgtgacggtatggcggcagacggcgtgtcgcagcgcaaatataactatatgcgcgccgaacagatctatcgtgatgagcaaggtttaagcctgatgccgcacaccgcacagccggtactgccagcgcaaaaccaggccttaccgccggaagttcgcgcgttcctcaatgccgggagaacgcgttaa

SEQ ID NO: 459962 - DNA, 1353 bp, Shigella boydii
atggtgcctgtagcacaggaaaccaccgccaacaccgtgcgtctgccctacagtttcagccgtcggtttagcctggtggcatggtgcgaagcgtcgctggagatcctccacgttcatccgctatcgctctctgttttgcaggagctgcagcgggggctgaacgcgccctttacgctgcggcaaatcgacgaggccgaatttgaacagcggctgaatgcggtctggcagcgggactcttccgaggctcgccagctgatggaagatctcggttctgctgaggacttttttactctcgcggaagaactgccagaaacggaagatctgctggaaagtgacgacgatgcgccgatcatcaaactgatcaacgccatgctggcagaggcgattaaagaaggcgcttcggatatccacatcgagacgtttgaaaagagtctggtgatccgttttcgcgttgacggcacattacatgaaatgctgcgcccggggcgcaaactggcctcgctgctggtatcgcgtatcaaggtgatggcacggctggatatcgccgaaaagcgcgtaccgcaggatggacgtattgcgctgctgctgggcggccgggcgattgacgtgcgtgtctccaccatgccttctgcctggggcgagcgcgtggtgctgcgactgctggacaaaaaccaggcccgcctgacgctggagcgtctggggcttagccagcaactgaccgtgcagttgcgccagctgttacacaaaccgcacggcatctttctggtgacggggccgacgggttccggcaaaagcaccacgctgtacgccggattgcaggagctgaacaaccattcgcgtaacattctcacggttgaagaccccatcgaatacatgattgaagggatcggtcagacacaggttaacacccgcgtcggcatgaccttcgcccgtggcctgcgcgcgattttgcgtcaggacccggatgtggtgatggtcggtgaaatccgcgataccgaaaccgcagaaatcgctgttcaggcatcgcttaccggacacctggtcctttccacgctgcataccaacacggcggtgggggcgatcacgcgtttgcaggatatgggcgtggagcctttcctgctctcttccagtctgacgggcgtgatggcgcagcgactggtccgcacgctgtgtcccgactgccgtcaggccgcgcctgccactgacgaagaaaaacgcctgctgggcattactgatgcgcgaaccgtcactctgtaccatccgcagggctgccccgcctgtaatcacaaaggtttccgcggacggactgccatccatgagctgacgtggtggatgccacattgcgtgatttga

SEQ ID NO: 459963 - DNA, 168 bp, Shigella boydii
gtggtggatgccacattgcgtgatttgatccaccgtcaggccggggagctggagctggaacgttatgtccggcaacactctgcgggtatccgcagcaacggcattgagaaagtgctcgccggagaaacctctctcgatgaagttctgcgggtaaccatggaggcgtaa

SEQ ID NO: 459964 - DNA, 1224 bp, Shigella boydii
atggcactgttttactatcaggcgctggagcgtaatggtcgcaaaaccaaaggcatgattgaggcggattccgcgcgtcatgcccgccagttgttgcgcggtaaagagcttatccccgtgcacattgaagccaggatgaatgcatcggcagggggaatgttgcagcgtcggcggcacgcacatcgtcgcgtggcggcggcagatctggcgctgttcacgcgccaactggcaatgctggtgcaggcagcaatgccgttggaaacctgcttgcaggcggtcagtgagcaaagtgaaaaactgcatgtgaagagcctcggaatggcgctgcgcagccggattcaggaaggttataccctgtcggacagcctgcgcgaacatccccgcgtctttgattccctgttttgttcgatggtcgctgccggagaaaaatccgggcatctcgacgtggtgctcaatcgcctggcagattacaccgaacagcgacagcgcctgaaatcacgtctattgcaggccatgctctatccgctggttatgctggtggtggcaacgggcgtggtcactattttgctgacggcagtggtgccgaaaatcatcgaacagtttgatcatctcggacacgcgctaccctcctccacccgtgcgcttatcgccatgagtgatgcgttacaggccagcggcgtttactggctggcgggattgctggcgcttctggtgctggggcaatggctacttaaaaatccgactatgcgcctgcgctgggataaaaccttgctgcgtctgcccgtgacgggccgtgttgcgcgcgggctgaatacggcgcgtttttcccgcacattaagcatcctcaccgccagcagtgttccgctactggaaggcattcagaccgctgccgccgtgtcggcaaatcgctatgtcgaacaacaactgctgctggcggcagatcgcgtccgcgaaggaagcagtctgcgcgccgcgctggtggagttgcgcctgttcccgccgatgatgctgtacatgatcgcttccggcgaacagagcggcgaactggaaaccatgcttgagcaggccgctgttaaccaggaacgggaatttgatacccaggtggggctggcgttggggctgtttgagcctgcgctggtggtgatgatggcgggcgtggtgctgtttattgtcatcgccatcctcgagccgatgctgcaactgaataatatggttggaatgtaa

SEQ ID NO: 459965 - DNA, 456 bp, Shigella boydii
atgaattcgttatcccgcacacacaaaccacgggcaggttttaccctgctggaagtgatggtggtgattgttattcttggcgtcctggcaagtctggtggtgcctaacctgttgggcaacaaagagaaagccgatcggcaaaaagccatcagcgatatcgtggcgctggaaaacgcactagatatgtaccgactggataacgggcgttatccgaccacagaacaggggctggaagcgctgatccagcagccagccaatatggcggactcccgcaactaccgtactggtggatacatcaaacgactgccaaaggatccgtggggcaatgattatcagtatctcagcccgggtgaaaaaggactgtttgatgtttataccctgggggcggatggtcaggaaaacggggaaggcgctggcgcagatatcggtaactggaatttgcaggagtttcagtaa

SEQ ID NO: 459966 - DNA, 564 bp, Shigella boydii
gtgcctgaacgcggattcacacttctggaaatcatgctggtgattttccttatcggccttgccagtgcgggcgtggtacagacgtttgcgaccgattctgaaccgcccgcgaaaaaagcggcacaggattttctgactcgctttgcgcagtttaatgacagggcagtgattgaaggacagacactcggtgtgctaatcgacccgcctggctatcagtttatgcagcgtcgtcaggggcagtggttgcccgtttctgcgacccggttatcggcacaggttacggtgccgaaacaggtgcagatgctgttacaacccggaagtgatatctggcagaaggaatatgcgctggagctgcaacgtcgtcgcctgacgctgcacgatattgaactggagttgcaaaaagaggcgaaaaagaagacgccgcagatccgtttttcgccttttgaacccgccacgccgtttacgctgcgcttctactcggcggcgcaaaacgcatgttgggcggtaaagctggcacacgatggcgcgttatccctcaatcaatgtgatgagaggatgccatga

SEQ ID NO: 459967 - DNA, 372 bp, Shigella boydii
atgaagcgcggatttaccttgctggaagtgatgctcgtgctggcgatttttgcgctggctgccacggcggtgttacagattgccagcggtgcgctgagtaatcagcacgttcttgaggaaaaaacggtagcgggctgggtagctgaaaaccagactgcgctgctctacctgatgacccgtgagcagcgggcggtcaggcatcagggcgagagcgatatggcaggaagccgctggtactggcgaacaatcccattgaatacaggcaacgcgctgctccaggcggtggatattgaagtcagccgtcacgaagacttttcgtcggtgattcagtcacgacgcgcctggtttagcgccgtgggaggccaacagtga

SEQ ID NO: 459968 - DNA, 600 bp, Shigella boydii
gtgagaaggactcgcgctggtttcacgttactggaaatgttggtggcaattgccatttttgcctcgctggcactgatggcgcagcaggtgactaacggcgtcacgcgcgtgaatagcgccgtcgccgatcacgatcaaaaactaaacctcatgcagcaaacgatgagttttctgacccacgatctgacccaaatgatgccgcgtccggtaagaggcgatcagggccagcgtgaaccagctttactggctggcgctggcgtgctggcgtctgagagtgaaggaatgcgttttgtgcgcggcggtgtggttaacccgttgatgcgtctgccgcgcagcaatctgctcaccgtcggttaccgcattcatgacggttatctcgaacggttagcctggccgctgaccgatgccgcaggcagcgtgaagccgacaatgcaaaagttgattccggccgattcgctccgtttgcagttctacgacggcacgcgctggcaggagagctggtcgtcagtacaggcgatccctgtggcggtacgcatgaccctgcattcgccgcaatggggcgagattgaacgcatctggttgttacgcgggccgcaataa

SEQ ID NO: 459969 - DNA, 978 bp, Shigella boydii
atgatcacctcaccaccaaaacgcggaatggcactggtcgtggtgctggtattgctggcggttatgatgctggtaaccatcacgctttccgggcggatgcagcaacaacttgggcgaacgcgcagccagcaggagtaccagcaggcgctgtggtacagcgccagtgcggaaagcctggcgctgagcgcgctcagtctgagcctgaaaaatgaaaagcgcgtgcatctggcacagccgtgggcatccggccctcgtttcttccctctgccgcaggggcaaattgcggtcaccctgcgtgacgcacaggcttgctttaacctgaatgcccttgctcagccgacaacggcgtcgcgtccgcttgcggtacaacagttgattgccctgatctcgcgcctggatgtgcctgcttatcgggccgaactgatagccgaaagcctgtgggagtttattgacgaggaccgcagcgtgcagacacgtctgggccgtgaagacagcgagtatctcgcccgttcggtgccgttctacgccgccaatcaaccgctgtctgatatcagtgagatgcgcgtggtacagggaatggacgccgggctttatcaaaaactgaaaccgctggtctgtgcgctgccgatgatccgccagcaaatcaacatcaatactttagacgtcacgcaaagtgtgattcttgaggcgctgtttgacccgtggttaagccccgttcaggcgcgggcgttattacaacaacgtccggcgaagggctgggaagatgtcgatcagtttcttgcacagccgctacttgctgacgtcgatgagcgtactaaaaaacagctaaaaaccgtcctgagcgtggacagcaattacttctggctgcgttcagatatcaccgtgaatgagattgaactgacgatgaactcgttaattgtccgcatgggcccacaacacttttcggttctctggcatcagacaggagaaagtgagtga

SEQ ID NO: 459970 - DNA, 1179 bp, Shigella boydii
gtgagttccatccttgagatttttttcccgctttgcgccgctgatcccatccattggcagcgccgtacacccgatgtggagcacggtatctggtctgacgttgctaacgaacagctccagcaatggctgcaaaccgatgcgattcgactctacattcccggcgaatggatcagcgtctggcaggttgaactgcctgatgtcgcccgtaagcagataccgaccattctgcccgccttactggaagaagagctgaaccaggatatcgatgaactgcatttcgccccgttgaatatcgaccagcaactggcaaccgtagcagtgattcaccaacagcatatgcgcaacattgcgcagtggttgcaggaaaacggcatcacccgcgctaccgtcgcgccagactggatgtccattccttgtggggttatggctggcgatgcgcaacgggttatctgccgcattgatgaatgccggggatggagcgccgggcgggcgctggctccggtcatgttccgcgcccagctcaatgagcaggatttaccgctttcgctaaccgtagtcggcattgcaccggaaaagctatcagcatgggctggcgcagacgctgaacgcctgaccgttacagctctgcccgccgttaccacttatggcgaaccggaagggaacctgctgacagggccgtggcagcctcgcgtcagctaccgaaaacagtgggcgcgctggcgggtgatgattctgccgatattgctgattctagttgcgctggcagtggagcggggcgtgacgttatggagcgtcagcgaacaggtggcgcaaagccgcacccaggcggaggaacagttcttaacgttgttcccggagcagaagcggattgtgaatttacgctctcaggtgacgatggcgctgaaaaaatatcgcccacaggccgacgatacccggctgctcgccgagttgtcagcgatagccagcaccctgaaatcagcgtcactttccgacatcgaaatgcgtggttttacctttgatcaaaaacgccagatacttcacctccagctacgggccgcgaactttgccagtttcgacaaactgcgtagtgcactggcaaccgattatgttgtgcaacaggacgcgttacagaaagagggtgatgcggtttccggcggcgtaacgttgcggaggaaataa

SEQ ID NO: 459971 - DNA, 537 bp, Shigella boydii
atgttacgcgataaatttattcactattttcagcaatggcgtgaacgccagttaagccgtggcgaacactggctggcacaacacctggcggggcgttctccgcgtgaaaagggcatgttactggcagcggtggtgttcctgtttagcgtcggatattacgtcctcatctggcagccgttgagcgaacggatagtacaacaggagacaatgttgcagcaactggtggcgatgaacaccagactgaggagcgccgcgccggatattattgcggcgcgaaaatccgccacaacaacgcctgcgcaggtatcgcgggttatcagtgacagtgcttccgcgcactcggtagtcatcaagcggatagccgagcgtggggagaatattcaggtctggatagatccggtggtgtttaatgacctgctgaactggttaaacgcgctggatgaaaagtatgcgctgcgggtgacacaaattgatgccagtgctgctgagaagactgggatggtgaatgtgcagcggctggagtttggacgggggtaa

SEQ ID NO: 459972 - DNA, 708 bp, Shigella boydii
gtggtcatcggcccttttatcaacgctagtgcagtcttactgggtggcgttctcggcgcactgctcagccaacgcttaccggaacgtatccgcatctccatgacatctatttttggtctggcatcgctggggattggtattttactggttgtgaaatgcgccaaccttccagcgatggttttagctacgctacttggcgctctaattggcgaaatttgtttgctggagaaaggtgtcaatacagcagtcgccaaagcacaaaatctgtttcgtcactcacgtaagaagccaacgcatgaatcttttattcagaattatgtcgcgattattgtcctgttttgcgccagcggcaccgggatcttcggggcgatgaacgaagggatgaccggcgatccgagtattttaatcgccaagtcatttcttgatttctttacggcgatgatcttcgcctgctcgctgggtattgcggtgtcggtaattagtatcccattactgatcatccagttaacgctggcgtgggctgccgcgctgatattaccgctgaccacaccgtcgatgatggcagacttcagcgccgtaggcggtttattgctgctggcaaccggattacgcatctgtggcattaaaatgttcccggtggtcaacatgcttccagcactccttctggcaatgccgctttccgccgcctggaccgcctggtttgcctga

SEQ ID NO: 459973 - DNA, 537 bp, Shigella boydii
atgaaatcaatgaatattgccgccagtagtgaactggtatcccgactttcttctcatcgtcgcgtggtggcgttgggagatactgattttacggacgtcgcggcagtcgtcattaccgctgcggatagtcgcagtggcattcttgcgttgcttaagcgcaccggttttcatctaccggtgtttttgtattccgaacatgctgttgaattacctgcgggcgttacggcggtaatcaacggcaacgagcagcagtggctggagctggaatccgcagcctgtcagtatgaagagaatttgctgccaccgttttatgacacgctgacgcagtacgttgagatgggcaacagcacctttgcttgccctggacatcaacatggtgcgttttttaaaaagcatcctgccggacgccatttttacgatttctttggtgagaacgtctttcgcgccgatatgtgtaacgctgacgtaaaattgggcgatctgcttattggcgaaagatgcgcagaaattcgcagccaaagtctttcatgccgataa

SEQ ID NO: 459974 - DNA, 309 bp, Shigella boydii
atgattattatggcgctggtcattgccatttgtgccattgtgatgggctctggcaatgcgccgtttatgtcatttgccagtcttattccgaatatcgcagccggactacatgtaccagcggttgtaatgattatgccgatgcattttgccacgacgctagcgcgcgcggtttcgccgattactgcggtggtggtcgttacgtcaggaattgcaggcgtttcgccttttgcggtggtgaagcgaacagcgatccccatggcagtcggtttcgtggtgaatatgattgccacaatcacgctattttattaa

SEQ ID NO: 459975 - DNA, 498 bp, Shigella boydii
atggatttgtcacagctaacaccacgtcgtccctatctgctgcgtgcattctatgagtggttgctggataaccagctcacgccgcacctggtggtggatgtgacgctccctggcgtgcaggttcctatggaatatgcgcgtgacgggcaaatcgtactcaacattgcgccgcgtgctgtcggcaatctggaactggcgaatgatgaggtgcgctttaacgcgcgctttggcggcattccgcgtcaggtttctgtgccgctggctgccgtgctggctatctacgcccgtgaaaatggcgcaggcacaatgtttgagcctgaagctgcctacgatgaagataccagcatcatgaatgatgaagaggcatcggcagacaacgaaaccgttatgtcggttattgatggcgacaagccagatcacgatgatgacactcatcctgacgatgaacctccgcagccaccacgcggtggtcgaccgacattacgcgttgtgaagtaa

SEQ ID NO: 459976 - DNA, 639 bp, Shigella boydii
atggctgtcgctgccaacaaacgttcggtaatgacgctgttttccggtcctactgacatctatagccatcaggtccgcattgtgctggctgagaaaggtgtaagtttcgagatcgaacacgtggaaaaggacaatccgcctcaggatctgattgacctcaacccgaatcagagcgttccgaccctggtggatcgtgagctgaccctgtgggaatctcgcatcattatggaatatctggatgagcgtttcccgcatccgccactgatgcctgtttacccggtagctcgcggtgaaagccgtctgtacatgcatcgcatcgaaaaagactggtacacgctgatgaacaccatcatcaacggttcagcttctgaagcagatgccgcacgtaagcaactgcgcgaagaactgctggcgattgcgccggtcttcggtcagaagccgtacttcctgagcgatgagttcagcctggtcgattgctatcttgctccgctgctgtggcgtctgccgcaactgggcatcgagttcagcggcccgggtgcgaaagagctgaaaggctatatgacccgcgtctttgagcgtgactctttccttgcttctttaactgaagcagaacgtgaaatgcgtctgggccggagttaa

SEQ ID NO: 459977 - DNA, 393 bp, Shigella boydii; identical to SEQ ID NO: 1060

SEQ ID NO: 459978 - DNA, 429 bp, Shigella boydii
atgaaaacttttacagctaaaccagaaaccgtaaaacgcgactggtatgttgttgacgcgaccggtaaaactctgggccgtctggctactgaactggctcgtcgcctgcgcggtaagcacaaagcggaatacactccgcacgtagataccggtgattacatcatcgttctgaacgctgacaaagttgctgtaaccggcaacaagtgtactgacaaagtgtactatcaccacaccggccacatcggtggtatcaaacaagcgacctttgaagagatgattgctcgccgtcctgagcgtgtgattgaaatcgcggttaaaggcatgttgccaaaaggcccgctgggtcgtgctatgttccgtaaactgaaagtttacgcgggtaacgagcacaaccacgcggcacagcaaccgcaagttcttgacatctaa

SEQ ID NO: 459979 - DNA, 1128 bp, Shigella boydii
atgcaaagcgttaccccaacatcgcaatacctgaaggcgctcaatgaaggcagccatcaacccgacgacgttcaaaaagaggccgtcagccgcctggaaattatttatcaagaactcatcaatagcaggccaccagcccccaggacgagtgggctaatggcgcgggtcggtaagctgtggggtaaacgcgaagacacaaagcatacgccagtgcgtggcttatatatgtggggcggtgtaggacgcgggaaaacctggctgatggaccttttctatcaaagcctgccgggagagcggaaacagcgcctgcactttcaccgttttatgctgcgggtgcacgaagagctaactgccttacaggggcagaccgatccgctggaaattattgccgatcgctttaaagccgaaactgacgtgctctgttttgacgaattttttgtttctgatattaccgacgccatgctacttggcggtctgatgaaagccctgttcgcccgcggtattaccctggtagcgacgtcaaatattccgccggacgaactttatcgaaatggcttgcaacgtgcgcgttttctgcctgcaatcgatgccattaaacagcattgtgatgtaatgaacgtggacgctggtgttgattatcgactgcgtacactcactcaggcgcatctgtggctttcgccactccacgatgaaacccgggcacaaatggataaactatggttggcgctggcgggagcgaaacgcgaaaattcaccgacgttagaaatcaaccatcgaccgctggcgacaatgggcgctgagaatcagacgcttgctgtctcttttaccaccttgtgtgtcgatgcccgcagccagcatgactatattgcgctctcacgcctctttcatacggtcatgttgtttgatgtaccagttatgacgcggttgatggagagcgaagcgcggcgctttattgcgctggtggatgagttttacgagcgccatgtcaaattagtggtgagtgcagaagtgccgctgtatgaaatttatcagggcgatcggctgaagtttgagttccagcgttgcctgtcacgtctgcaagagatgcaaagcgaagagtatctgaagcgcgagcatttggcgggttaa

SEQ ID NO: 459980 - DNA, 399 bp, Shigella boydii
atgacctgggaatatgcgctaattgggttagtcgtcggcatcattattggtgctgtggccatgcgttttggtaatcgtaaactacgccagcaacaggcgttgcagtacgaactggaaaagaataaagctgaactggacgagtatcgcgaagagctggttagccactttgcccgcagcgcggaattactggataccatggcgcacgactatcgccagctgtatcagcacatggcgaaaagctccagcagcctgctgccggaactgtctgctgaagcaaacccgttccgtaatcgtctggcagagtctgaagccagcaacgatcaggcaccggtgcagatgcctcgcgactattctgaaggtgcatccggcctgctgcgtactggcgcgaagcgcgactaa

SEQ ID NO: 459981 - DNA, 1368 bp, Shigella boydii
atgaaaaaacaaacccagctgttgagtgcattagcgttaagtgtcgggttaactctctcggcgtcatttcaggccgtcgcgtcgattccaggccaggttgccgatcaggcccctctccccagtctggctccaatgctggaaaaagtgcttccggcagtggtgagcgtacgggtggaaggaacggccagtcagggacagaaaatcccggaagaattcaaaaagttttttggtgatgatttaccggatcaacctgcacaacccttcgaaggtttaggttccggtgtcatcatcaacgccagtaaaggctatgtgctgaccaacaaccatgtgattaatcaggcacagaaaatcagtattcagctcaatgatgggcgcgagtttgatgccaaactgattggtagcgatgaccagagcgatatcgccctgttacaaattcaaaacccgagcaaattaacgcaaatcgctattgccgactccgataaattgcgcgtcggtgattttgccgtagcggtcggtaacccatttggccttgggcaaaccgccacctctggcattgtttccgcattaggccgcagcgggttgaatcttgaaggtctggaaaactttatccagacagatgcttccattaaccgcggtaactccggcggtgcactattaaaccttaacggtgagttaattggcatcaacactgcaatccttgcgcctggcggcgggagcgtcgggattggatttgccatccccagtaatatggcgcgaacactggcgcagcagcttatcgactttggtgaaatcaaacgcggtttgttaggcatcaaaggcaccgagatgagtgccgatatcgccaaagccttcaaccttgacgtgcagcgtggcgcgtttgtcagcgaagtgttgccaggttctggctcggcaaaagcgggcgtcaaagcgggcgatattattaccagcctcaacggcaaaccgctgaatagctttgctgagttgcgctctcgtatcgcgactacagagccgggcacgaaagtgaagcttggcctgctgcgtaacggcaaaccactggaagtagaagtgacgcttgataccagcacctcttcgtcggccagcgctgaaatgatcacgccagcgctggaaggtgcaacgttgagcgatggtcagctaaaagatggcggcaaaggtattaagatcgatgaagttgtcaaaggaagcccagctgctcaggcaggcttgcaaaaagacgatgtgatcattggcgtcaaccgcgatcgggtgaactcgattgctgaaatgcgtaaagtgctggcggcaaaaccggccatcatcgccctgcaaattgtacgcggcaatgaaagcatctatctgctgatgcgttaa

SEQ ID NO: 459982 - DNA, 1068 bp, Shigella boydii
atgtttgtgaagctcttacgttccgttgcgattggattaattgtcggcgctattctgctggttgccatgccttcgctgcgcagccttaacccgctttccactccgcaatttgacagtaccgatgagacgcctgccagctataatctggcggttcgccgcgccgcgccagcggtggttaacgtttacaaccgtggtgtgaacaccaactctcacaaccagcttgagatccgcaccctgggatccggtgtaatcatggatcaacgcggttatatcatcaccaataaacacgtcatcaacgacgccgatcagatcatcgtcgccttacaggatggacgtgtatttgaagcattgctggtgggatctgactctctaaccgatctggcggtacttaaaattaatgccactggcggtttacctaccattccaattaatgcacgtcgcgtaccgcacattggcgacgtagtactggcgatcggtaacccgtacaacctcgggcagaccattacccaagggattattagtgccacgggtcgaatcggtctgaaccctaccgggcggcaaaacttcctacaaaccgatgcttccattaaccacggtaactctggtggcgcgctggtgaactcgctgggagaactgatgggcattaacacgctgtcgtttgataagagtaacgatggcgaaacgccggaaggtatcggctttgcgattcctttccagttagcaaccaaaattatggataagctgatccgcgatgggcgcgtgatccgcggctacattggcattggtggacgtgagatcgcaccactgcacgcgcagagcggtggtatagatcaactgcaagggatcgtggttaatgaagtgtcacctgacggcccggcggcgaatgcgggtattcaggtcaacgatctgattatttcggtggataacaaaccggccatctctgctctggagacgatggatcaggtggcagaaattcgccctggttcggtgatcccggttgtagtgatgcgtgatgataagcagttaacgctgcaggtcaccattcaggaatatccggcaaccaattaa

SEQ ID NO: 459983 - DNA, 939 bp, Shigella boydii
atgaaagtcgcagtcctcggcgctgctggcggtattggccaggcgcttgcactactgttaaaaacccaactgccttcaggttcagaactctctctgtatgatatcgctccagtgactcccggtgtggctgtcgatctgagccatatccctactgctgtgaaaatcaaaggtttttctggtgaagatgcgactccggcgctggaaggcgcagatgtcgttcttatctctgcaggtgtagcgcgtaaaccgggtatggatcgttccgacctgtttaacgttaacgccggcatcgtgaaaaacctggtacagcaagttgcgaaaacctgcccgaaagcgtgcattggtattatcactaacccggttaacaccacagttgcaattgctgctgaagtgctgaaaaaagccggtgtttatgacaaaaacaaactgttcggcgttaccacgctggatatcattcgttccaacacctttgttgcggaactgaaaggcaaacagccaggcgaagttgaagtgccggttattggcggtcactctggtgttaccattctgccgctgctgtcacaggttcctggcgttagttttaccgagcaggaagtggctgatctgaccaaacgtatccagaacgcgggtactgaggtggttgaagcgaaagccggtggcgggtctgcaaccctgtctatgggccaggcagctgcacgttttggtctgtctctggttcgtgcactgcagggcgaacaaggcgttgtcgaatgtgcctacgttgaaggcgacggtcagtacgcccgtttcttctctcaaccgctgctgctgggtaaaaacggcgtggaagagcgtaaatctatcggtaccctgagcgcatttgaacagaacgcgctggaaggtatgctggatacgctcaagaaagatatcgccctgggcgaagagttcgttaataagtaa

SEQ ID NO: 459984 - DNA, 471 bp, Shigella boydii
atgcgaagctcggctaagcaagaagaactagttaaagcatttaaagcattacttaaagaagagaaatttagctcccagggcgaaatcgtcgccgcgttgcaggagcaaggctttgacaatattaatcagtctaaagtctcgcggatgttgaccaagtttggtgctgtacgtacacgcaatgccaaaatggaaatggtttactgcctgccagctgaactgggtgtaccaaccacctccagtccattgaagaatctggtgctggatatcgactacaacgatgcagttgtcgtgattcataccagccctggcgcggcgcagttaattgctcgcctgctggactcactgggcaaagcagaaggtattctgggcaccatcgctggcgatgacaccatctttaccacccctgctaacggtttcaccgtcaaagacctgtacgaagcgattttagagctgttcgaccaggagctttaa

SEQ ID NO: 459985 - DNA, 264 bp, Shigella boydii
atgaaaatcaaaaccactgtagctgcattaagcgtactttctgttctctctttcggtgcattcgctgccgactccattgatgctgcacaagcacaaaatcgtgaagcaatcgggaccgtatccgtaagtggtgtggcgtcttcgccaatggatatgcgtgaaatgctgaacaaaaaagcggaagagaaaggcgcaacggcctaccagattactgaagctcgtagcggtgacacctggcacgctacggctgaactgtacaaataa

SEQ ID NO: 459986 - DNA, 273 bp, Shigella boydii
atgaatatttatacctttgattttgatgagattgagagtcaggaggatttttatcgtgactttagccaaacctttggtctggcgaaagataaggtacgcgatctcgactcactatgggatgtgttaatgaacgatgtcctgccgctaccacttgagattgaatttgttcatctgggagagaaaacgcgtcgccgttttggcgcgttaatattgctatttgatgaggcagaggaagagctggaagggcatttgcgttttaatgttcgtcattag

SEQ ID NO: 459987 - DNA, 1968 bp, Shigella boydii
atgggtattttctccattgctaaccaacatattcgctttgcggtaaaactggcgaccgccattgtactggcgctgtttgttggctttcacttccagctggaaacgccacgctgggcggtactgacagcggcgattgttgccgccggtccggcctttgctgcgggaggtgaaccgtattctggcgctattcgttatcgtggctttttgcgcatcatcggcacatttattggctgtattgccggactggtgatcatcattgcgatgatccgcgcaccattattgatgattctggtgtgctgtatctgggccggtttttgtacctggatatcctcgctggtacgaatagaaaactcgtacgcgtgggggctggccggttataccgcgctgatcattgtgatcaccattcagccggaaccattgcttacgccgcagtttgccgtcgaacgttgtagcgagatcgttatcggtattgtgtgtgcgattatggcggatttgctcttttctccgcgatcgatcaaacaagaagtggatcgagagctggaaagtttgctggtcgcgcaatatcaattaatgcaactctgtatcaagcatggcgatggtgaagttgtcgataaagcctggggcgacctggtgcgacgcaccacggcgctacaaggcatgcgcagcaacctgaatatggaatcttcccgctgggcgcgggccaatcgacgtttaaaagcgatcaatacgctatcgctgacgctgattacccaatcctgcgaaacttatcttattcagaatacgcgcccggaattgatcactgatactttccgcgaattttttgacacgccggtagaaaccgcgcaggacgtccacaagcagctcaaacgcctgcggagagttatcgcctggaccggggaacgggaaacgcctgtcaccatttatagctgggtcgcggcggcaacgcgttatcagcttctcaagcgcggcgttatcagtaacacaaaaatcaacgccaccgaagaagagatcctgcaaggcgaaccggaagtcaaagtagagtcagccgaacgtcatcatgcgatggttaacttctggcgaaccacactttcctgcattctgggcacgcttttctggctgtggacgggctggacttccggcagtggtgcaatggtgatgattgcggtagtgacgtcactggcaatgcgtttgccgaatccacgcatggtggcgatcgactttatctacgggacgctggccgcgctgccgttagggctgctctactttttggtgattatccctaatacccaacagagcatgttgctgctgtgtattagcctggcagtgctgggatttttcctcggtatagaagtacagcaacggcgactgggctcgatgggggcgctggccagcaccataaatattatcgtgctggataacccgatgactttccatttcagtcagtttctcgacagcgcattagggcaaatcgtcggctgtgtgctcgcgttcaccgttattttgcttgtgcgggataaatcgcgcgacaggaccggacgtgtactgcttaatcagtttgtttctgccgctgtttccgcgatgactaccaatgtggcacgtcgtaaagagaaccacctcccggcactttatcagcagctgtttttgctgatgaataagttcccaggggatttgccgaaatttcgcctggcgctgacgatgattatcgcgcaccagcgcctgcgtgatgcgccgatcccggttaacgaggatttatcggcgtttcaccgacaaatgcgccgcacagcagaccatgtgatatctgcccgtagcgatgataaacgtcgtcggtactttggccagttgctggaagaacttgaaatctaccaggaaaagctacgcatctggcaagcgccaccgcaggtgacggaaccggttcatcggctggcgggtatgctccataagtatcaacatgcgttgaccgatagttag

SEQ ID NO: 459988 - DNA, 753 bp, Shigella boydii
gtgaatgttcatgataaccagctggtgaaaaaaggacagatactgttcaccatcgaccagccgcgctatcaaaaggcgcttgaggaagcgcaagccgatgttgcttattatcaggtactggcacaggagaaacgccaggaggccggacgtcgtaaccgtctcggtgtgcaggcgatgtctcgcgaagagatcgaccaggctaacaacgtactacaaacggttctgcatcagttagcgaaagcgcaggcgacccgcgatctggcaaaactggatcttgaacgcacggtgatccgcgcgccagcagatggctgggtgaccaacctcaacgtctataccggtgagtttattactcgaggatcaacggcggttgcgctggtgaaacagaactccttctatgtactggcctatatggaagaaactaagctggaaggggtgcgtccggggtatcgtgcagagatcacgccgcttggcagtaacaaagtgctgaaagggactgttgatagtgttgccgcaggggtcaccaacgccagcagcacgcgtgacgacaaagggatggcgactatagactctaaccttgaatgggtgcgtcttgcgcaacgtgttccggttcgtattcgtctcgacaaccagcaagagaacatctggcctgcgggcaccactgctacagtggtggtcactggcaaacaagatcgcgacgaaagccaggattcgttcttccgtaaaatggcccatcgcctgcgtgagtttggttaa

SEQ ID NO: 459989 - DNA, 204 bp, Shigella boydii
atgagtctgtttcccgttatcgtggtgtttgggctgtccttcccaccgatattttttgaattgcttttatcactggcgattttctggctggtgcgccgggtacttgtgccaacaggtatctacgactttgtctggcatccggcgttgtttaacaccgcgctctattgctgcttgttttatttgatatcgcgactgttcgtttga

SEQ ID NO: 459990 - DNA, 1008 bp, Shigella boydii
atgccattctatttcaggaaggagtgtccgttaaactcaggctacctcaacattctactcaccctttgcacctcacttctgcttaccaacgttgcggcacacgccaaagaagtcaaaataggtatggcgattgatgatctacgtcttgaacgctggcaaaaagatcgagatatttttgtgaaaaaggctgaatctctcggtgcgaaagtatttgtacagtctgcaaatggcaatggagaaacacaaatgtcgcagattgaaaacatgattaaccggggtgtcgatgttcttgtcattattccgtataacggccaggtattaagtaacgttgtaaaagaagccaaacaagaaggtattaaagtattagcttacgaccgtatgattaacgatgcggatatcgatttttatatttctttcgataacgaaaaagtcggtgaactgcaggcaaaagccctggtcgatattgttccgcaaggtaattacttcctgatgggcggctcgccggtagataacaacgccaagctgttccgcgccggacaaatgaaagtgttaaaaccttacgttgattccggaaaaattaaagtcgttggtgaccaatgggttgatggctggttaccggaaaacgcgctaaccgccaataataacaaaattgatgctgtagttgcctcaaacgatgccaccgcaggtggggcaattcaggcattaagcgcgcaaggtttatcagggaaagtagcaatttccggccaggatgcggatctcgcaggtattaaacgtattgctgccggtacgcaaactatgacggtgtataaacctattacattgctggcaaatactgccgcagaaattgccgttgaattgggcaatggtcaggagccaaaagcagatacctcactgaataatggcctgaaagatgtcccctcccgcctcctgacaccgatcgatgtgaataaaaacaacatcaaagatacggtaattaaagacggattccacaaagagagcgagctgtaa

SEQ ID NO: 459991 - DNA, 1542 bp, Shigella boydii
atgccttatctacttgaaatgaagaacattaccaaaaccttcggcagtgtgaaggcgattgataacgtcagcttgcggttgaatgctggcgaaatcgtctcactctgtggggaaaatgggtctggtaaatcaacgctgatgaaagtgctgtgtggtatttatccccatggctcctacgaaggcgaaattatttttgcgggagaagagattcaggcgagtcacatccgcgataccgaacgcaaaggtatcgccatcattcaccaggaattggccctggtgaaagaattgaccgtgctggaaaatatcttcctgggtaacgaaataacccacaatggcattatggattatgacctgatgacgctacgctgtcagaagctgctcgcacaggtcagtttatccatttcacctgatacccgcgttggcgatttagggcttgggcaacaacaactggttgaaattgccaaggcacttaataaacaggtgcgcttgttaattctcgatgaaccgacagcctcattaactgagcaggaaacgtcggttttactggatattattcgcgatctacaacagcacggtatcgcctgtatttatatttcgcacaaactcaacgaagtcaaagcgatttccgatacgatttgcgttattcgcgacggtcagcacattggtacgcgtgatgctgccggaatgagtgaagacgatattatcaccatgatggtcgggcgagagttaaccgcgctttaccctaatgaaccacataccaccggagatgaaatattacgtattgaacatctgacggcatggcatccggttaatcgtcatattaaacgagttaatgatgtctcgttttccctgaaacgtggcgaaatactgggtattgccggactcgttggtgccggacgtaccgagaccattcagtgcctgtttggcgtgtggcccggacaatgggaaggaaaaatttatattgatggcaaacaggtagatattcgtaactgtcagcaagccatcgcccaggggattgcgatggtacccgaagacagaaagcgcgacggcatcgttccggtaatggcggttggtaaaaatattaccctcgccgcactcaataaatttaccggtggcattagccagcttgatgacgcggcagagcaaaaatgtattctggaatcaatccagcaactcaaagttaaaacgtcgtcccccgatcttgctattggacgtttgagcggcggcaatcagcaaaaagcgatcctcgcccgctgtctgttactcaacccgcgcattctcattcttgatgaacctaccaggggtattgatattggcgtgaaatatgagatctacaaattaattaaccaactcgtccagcagggtattgccgttattgtcatctcttccgaattacctgaagtgctcggccttagcgatcgtgtactggtgatgcatgaagggaaactaaaagccaacctgataaatcataacctgactcaggagcaggtgatggaagccgcattgaggagcgaacatcatgtcgaaaagcaatccgtctga

SEQ ID NO: 459992 - DNA, 1182 bp, Shigella boydii
atgtcgaaaagcaatccgtctgaagtgaaattggccgtaccgacatccggtggcttttccgggctgaaatcactgaatttgcaggtcttcgtgatgattgcagctatcatcgcaatcatgctgttctttacctggaccaccgatggtgcctacttaagcgcccgtaacgtctccaacctgttacgccagaccgcgattaccggcatcctcgcggtaggaatggtgttcgtcataatttctgctgaaatcgacctttccgtcggctcaatgatggggctattaggtggcgtcgcggcgatttgtgacgtctggttaggctggcctttgccacttaccatcattgtgacgttggttctgggactgcttctcggtgcgtggaacggatggtgggtcgcgtaccgtaaagtcccttcatttattgtcaccctcgcgggcatgttggcatttcgcggcatactcattggcatcaccaacggcacgactgtatcccccaccagcgccgcgatgtcacaaattgggcaaagctatctccccgccagtaccggcttcatcattggcgcgcttggcttaatggcttttgttggttggcaatggcgcggaagaatgcgccgtcaggctttgggtttacagtctccggcctctaccgcagtagtcggtcgccaggctttaaccgctatcatcgtattaggcgcaatctggctgttgaatgattaccgtggcgttcccactcctgttctgctgctgacgttgctgttactcggcggaatgtttatggcaacgcggacggcatttggacgacgcatttatgccatcggcggcaatctggaagcagcacgtctctccgggattaacgttgaacgcaccaaacttgccgtgttcgcgattaacggattaatggtagccatcgccggattaatccttagttctcgacttggcgctggttcaccttctgcgggaaatatcgccgaactggacgctattgcagcatgcgtgattggcggcaccagcctggctggcggtgtgggaagcgttgccggagcagtaatgggggcatttatcatggcttcactggataacggcatgagtatgatggatgtaccgaccttctggcagtatatcgttaaaggtgcgattctgttgctggcagtatggatggactccgcaaccaaacgccgttcttga

SEQ ID NO: 459993 - DNA, 1179 bp, Shigella boydii
atgtttactaaacgtcaccgcatcacattactgttcaatgccaataaagcctatgaccggcaggtagtagaaggcgtaggggaatatttacaggcgtcacaatcagaatgggatattttcattgaagaagatttccgcgcccgcattgataaaatcaaggactggttaggagatggcgtcattgccgacttcgacgacaaacaaatcgagcaagcgctggctgatgtcgacgtccccattgttggggttggcggctcgtatcaccttgcagaaagttacccacccgttcattacattgccaccgataactatgcgctggttgaaagcgcatttttgcatttaaaagagaaaggcgttaaccgctttgctttttatggtcttccggaatcaagcggcaaacgttgggccactgaacgcgaatatgcatttcgtcagcttgtcgccgaagaaaagtatcgcggagtggtttatcaggggttagaaaccgcgccagagaactggcaacacgcgcaaaatcggctggcagactggctacaaacgctgccaccgcaaaccgggattattgccgttactgacgcccgggcgcggcatattctgcaagtatgtgaacatctacacattcccgtaccggaaaaattatgcgtgattggcatcgacaacgaagaactgacccgctatctgtcgcgtgtcgccctttcttcggtcgctcagggcgcgcggcaaatgggctatcaggcggcaaaactgttgcatcgattattagataaagaagaaatgccgctacagcgaattttggtcccacctgttcgcgtcattgaacggcgctcaacagattatcgctcgctgaccgatcccgccgttattcaggccatgcattacattcgtaatcacgcctgtaaagggattaaagtggatcaggtactggatgcggtcgggatctcgcgctccaatcttgagaagcgttttaaagaagaggtgggtgaaaccatccatgccatgattcatgccgagaagctggagaaagcgcgcagtctgctgatttcaaccaccttgtcgatcaatgagatatcgcaaatgtgcggttatccatcgctgcaatatttctactctgtttttaaaaaagcatatgacacaacgccaaaagagtatcgcgatgtaaatagcgaggtcatgttgtag

SEQ ID NO: 459994 - DNA, 825 bp, Shigella boydii
atgattttgactcccatacgacgatatggggcgatgattcttatgttactcactctggtgttttcgagtgaggtgttagcgaagacgcacacaacaacagcgagtcaaaagtcccacttaactaaagctagtaataaacaggtaagcagtaaacaagagtattctcgcaatagtgcaaagagtagttcacttcctgatttgcgaaaatacccttccggaacaccaaggaaaaaggcgtttctccggaccgtaatgccttacattaccagccaaaatgcagccattactgcagaacgtaactggctgatttcaaaacagtatcagggccaatggtcacctgctgagcgtgcgcgtctgaaagacatcgccaaacgctacaaggtgaagtggtctggtaatacgcgaaaaatcccgtggaataccttgcttgaacgcgtagacattatccctaccagtatggtggcgacgatggctgcagcagaaagcggttggggaacgtcgaagctggcgcgcaacaataacaatctgttcggcatgaaatgcatgaaaggacgttgtaccaatgcgccgggtaaagtgaaagggtactcacagtttagttctgtcaaagaatcggtgagcgcctatgtcactaacctgaatacgcacccggcttactcttcgttccgtaaatcgcgtgcgcagctgcgtaaagcggatcaggaagtgactgccacagcgatgattcacaagctgaagggctactcgaccaaagggaagagttataataactacctgttcgcaatgtaccaggataaccaacggttaatcgcggcgcatatgtaa

SEQ ID NO: 459995 - DNA, 2031 bp, Shigella boydii
atgaaactcgcctcctgttttctgacactccttcctggcttcgccgttgccgccagctggacttctccggggttccctgtctttagcgaacagggaacgggaacatttgtcagccacgcgcagttgcccaaaggtacgcgtccactcacgctaaattttgaccaacagtgctggcagcctgcagatgcgataaaactcaatcagatgctttccctgcaaccttgtagcaacacgccgcctcaatggcgattgttcagggacggcaaatatacgctgcaaatagacacccgctccggtacgccaacattgatgatttccatccagaacgccgccgaagcggtagcaaacctggtccgtgaatgcccgaaatgggatggattaccgctcacgctggatgtcagcgccactttcccggaaggagccgccgtacgggattattacagccagcaaattgcgatagtgaagaacggtcaaataacgttacaacccgctgctaccagcaacggtttactcctgctggaacgggcagaaactgacacatccgcccctttcgactggcataacgccacggtttactttgtgctgacagatcgtttcgaaaacggcgatcccagtaatgaccagagttacggacgtcataaagacggtatggcggaaattggcacttttcacggcggcgatttacgcgccctgatcaataaactggattacctccagcagttgggcgttaatgctttatggataagcgccccatttgagcaaattcacggctgggtcggcggcggtacaaaaggcgatttcccgcattatgcctaccacggttattacacacaggactggacgaatcttgatgccaatatgggcaacgaagccgatctacggacgctggttgatagcgcacatcagcgcggtattcgtattctctttgatgtcgtgatgaaccacaccggctatgccacgctggcggatatgcaggagtatcagtttggcgcgttatatctttctggtgacgaagtgaaaaaaacgctgggtgaacgctggagcgactggaaacctgccgccgggcaaacctggcatagctttaacgattacattaatttcagcgacaaaacaggctgggataaatggtggggaaaaaactggatcagaacggatatcggcgattacgacaatcctggattcgacgatctcactatgtcgctggcctttttgccggatatcaaaaccgaatcaactaccgcttctggtctgccggtgttctataaaaacaaaacggatactcacgctaaagtcatcgaaggctttacacctcgcgattacttaacccactggttaagtcagtgggtccgcgactatgggattgatggttttcgggtcgataccgccaaacatgttgagttgcccgcctggcagcaactgaaaaccgaagccagctccgcgcttcgcgaatggaaaaaaactagccccgacaaagcattagatgacaaacctttctggatgaccggtgaagcctggggccacggcgtgatgcaaagtgactactatcgccacggcttcgatgcgatgatcaatttcgattatcaggagcaggcggcgaaagcagtcgattgtctggcgcagatggatacgacctggcagcaaatggcggagaaattgcagggtttcaacgtgttgagctacctctcgtcgcatgatacccgtctgttccgtgaagggggcgacaaagcagcagagttattactattagcgccaggcgcggtacaaatcttttatggcgatgaatcctcgcgtccgttcggtcctacaggttctgatccgctgcaaggtacacgttcggatatgaactggcaggatgttagcggtaaatctgccgccaacgtcgcgcactggcagaaaatcagccagttccgcgcccgccatcccgcaattggcgcgggcaaacaaacgacactttcgctgaagcagggctacggctttgttcgtgagcatggcgacgataaagtgctggtcatctgggctgggcaacagtga

SEQ ID NO: 459996 - DNA, 1254 bp, Shigella boydii
atgacattctccctttttggtgacaaatttacccgccactccggcattacgctgctgatggaagatctgaacgacggtttacgcacgcctggcgcgattatgctcggcggcggtaatccggcgcagatcccggaaatgcaggactacttccagacgctactcaccgacatgctggaaagtggcaaagcgactgatgcactgtgtaactacgacggtccacaggggaaaacggagctactcacactgcttgccggaatgctgcgcgagaagttgggttgggatatcgaaccacagaatattgcactaacaaacggcagccagagcgcgtttttctacttatttaacctgtttgccggacgccgtgccgatggtcgggtcaaaaaagtgctgttcccgctggcaccggaatacattggctacgctgacgccggactggaagaagatctgtttgtctctgcgcgtccgaatattgaactgctgccggaaggccagtttaaataccacgtcgattttgagcatctgcatattggcgaagaaaccgggatgatttgcgtctcccggccgacgaatccaacaggcaatgtgattactgacgaagagttgctgaagcttgacgcgctggcgaatcaacacggcattccgctggtgattgataacgcttatggcgtcccgttcccgggtatcatcttcagtgaagcgcgcccgctatggaatccgaatatcgtgctgtgcatgagtctttccaagctggggctgcctggctcccgctgcggcattatcatcgccaatgaaaaaatcatcactgccatcaccaatatgaacggcattatcagcctggcacctggcggtattggtccggcgatgatgtgtgaaatgattaagcgtaacgatctgctgcgcctgtctgaaacagtcatcaaaccgttttactaccagcgtgttcaggaaactatcgccatcattcgccgctatttaccggaaaatcgctgcctgattcataaaccggaaggagccattttcctctggctatggtttaaggatttgcccattacgaccgagcagctctatcagcgcctgaaagcacgcggcgtgctgatggtgccggggcacaacttcttcccgggactggataaaccgtggccgcatacgcatcaatgtatgcgcatgaactacgtaccagagccggagaaaattgaggcgggggtgaagattctggcggaagagatagaaagagcctgggcagaaagtcactaa

SEQ ID NO: 459997 - DNA, 474 bp, Shigella boydii
atgaaccggtttattattgcggatgcgacgaaatgtatcggttgccgtacctgtgaagtggcttgcgcagtgtcgcatcaggagaatcaggattgcgctgcgttgtcaccagacgagtttatttcccgtattcgtgtcattaaagaccacagctggaccacggcagtagcctgtcatcagtgtgaagatgcaccgtgcgcgaatgtctgccctgttgacgcgataagccgcgaacatgggcatattttcgttgaacaaacacgttgcattggctgtaaaagctgtatgctggcttgcccgtttggtgcgatggaggtcgtttcttcgcgcaaaaaggcgagggcgattaagtgcgatctgtgctggcatcgggagacggggccggcctgtgttgaagcctgcccgacaaaggcgttgcagtgcatggatgtcgagaaagtgcagcggcatcggctacggcagcagcctgtttga

SEQ ID NO: 459998 - DNA, 849 bp, Shigella boydii
atggggaaagaagtgatgggaaaaaaagagaacgagatggcgcaggaaaaagagcgtccagccggaagccagagtctgtttcgcgggttgatgctgattgagattttgagcaactatccaaacggttgtccgttggcgcatctttcggagctggctggtttaaataagagtaccgtccatcgcttattgcagggattacagtcctgcggctatgtgaccaccgcgcccgccgcagggagttaccgcctgactaccaaatttattgccgtcgggcagaaggcgctgtcttcgctgaatatcattcatatcgccgctccgcatcttgaggcactgaacatcgccactggtgaaaccattaacttctccagccgcgaagacgatcacgctattttgatttataagctggaacccacaaccgggatgctgcgaacccgtgcctatattggccagcatatgccgctctactgttccgcaatgggcaagatctacatggcgtttggtcacccggactacgtgaagtcatactgggaaaaccatcagcatgagatccagccgttaacccgcaataccattaccgagctgcccgcgatgttcgacgaactggcgcacattcgtgaaagcggagcggcgatggacggagaagaaaacgaactcggcgtctcctgtattgctgttccggtgtttgatattcatgggcgggtgccgtacgccgtgtcgatttcgctttcgacatcacgtctgaaacaggtgggagagaaaaatctcctgaaaccactgcgtgaaaccgcgcaggctatttctaatgaactgggatttactgtcagggatgacctgggcgcgatcacataa

SEQ ID NO: 459999 - DNA, 990 bp, Shigella boydii
atgaaagtgacatttgagcagttaaaagcagcctttaatcgggtcttaatttcacgcggcgttgacagcgaaacggctgacgcctgtgcagagatgttcgcccgcaccaccgaatccggcgtttattctcacggcgttaatcgtttccctcgtttcattcaacaactggaaaacggcgatatcattcctgatgcccaacccaaacgtataaccagcctcggcgcaattgaacagtgggatgcccagcgttcgatcggcaacctgacggcgaaaaagatgatggatcgcgccattgaactggctgccgatcacggtattggtctggtggcacttcgtaatgccaaccactggatgcgcggcggcagctacggctggcaggcggcggaaaaaggctatattggcatttgctggaccaactccatcgccgtaatgccgccgtggggcgcaaaagagtgtcgcattggcactaacccgctgatcgtcgccattccttccacgccgatcaccatggtcgatatgtcgatgtcgatgttctcttacggcatgttagaagttaaccgcctggcgggccgtcagctcccggtcgatggtggctttgatgatgagggcaatttgaccaaagaacctggcgttatcgagaagaatcgccgcattttgccgatgggctactggaaaggttctggcatgtcgattgtgctggatatgatcgctactctcctttccgacggcgcatcggttgccgaagtcacccaggacaacagcgacgaatacggcatttcacaaatttttattgccattgaagtggacaagcttatcgacggtcccacccgcgatgccaagctgcaacgcatcatggattacgttactaccgctgaacgcgctgacgaaaaccaggccatccgcttacccggccacgaatttactaccctgctggccgaaaaccgccgtaacggcatcactgttgatgacagcgtgtgggccaaaatctag

SEQ ID NO: 460000 - DNA, 423 bp, Shigella boydii
atgatttttggacatatcgcgcagcccaatccgtgccgtttgcccgccgccattgaaaaggcgctcgattttctgcgcgctaccaacttcaacgtcctggagccgggcgttgtcgaaatcgacggcaagaatatttatgcgcaaattatcgatttaaccacacgcgaagcggtggaaaactgtccggaagtgcatcgtcggtatatcgatattcagtttctggcgtggggtcaagagaaaatcggcattgctattgatacaggaaataataaagtcagcgaatcactattagagcagcgcgatattattttttatcatgtcagtgaacatgaatcatttatagaaatgataccgggcagctacgctattttcttcccgcaggatgttcaccgaccaggttgtattctgcaaacaggcctctga

SEQ ID NO: 460001 - DNA, 510 bp, Shigella boydii
atgaatctacaacgatttgatgacagcaccctaatccgtatctttgcccttcatgagttacatcgactgaaagaacatggcttaacgcgcggggcgcttctcgattatcacagccgctataaactcgtctttctggcgcattctcagccggagtaccgcaaacttggcccgttcgtggctgatattcaccagtggcaaaatctggatgactattacaaccagtaccgccaacgcgtagttgttttgctttctcaccccgccaacccgcgcgatcacaccaatgttttgatgcacgttcagggttattttcgcccgcatattgattccacagaacgccagcagctggctgcgcttatcgacagttatcgccgtggcgagcaaccacttcttgcgccgctgatgcgtatcaaacactatatggcgctttatcctgacgcctggctttcagggcagcgttatttcgaactttggccgcgtgtgattaacttgcgccattcaggagttttatga

SEQ ID NO: 460002 - DNA, 1419 bp, Shigella boydii
atgactacccatctggtctggtttcgccaggatttacgtttgcacgataatctcgcactggctgccgcctgccgcaattcgtctgcacgcgtgctggcgttgtatatcgctacaccacgccagtgggcgacgcataacatgtcgccgcgtcaggctgaacttatcaatgctcaactgaatgggctacaaatagcgcttgcggaaaaaggtattcctttattgttccgtgaagtggatgactttatcgccagtgtcgaaatagttaaacaggtgtgcgcggaaaacagcgttacccacctgttttataactatcagtatgaagtgaatgagcgggcgcgggatgtggaagttgaaagagcgctgcgtaacgtggtgtgtgaaggatttgatgacagcgtgatcctgccgcctggcgcggtgatgaccggtaatcacgagatgtacaaagtctttacgccttttaagaatgcctggctgaaacggctgcgggaagggatgccggagtgcgtcgctgcgccaaaagttcgtagtagcggatcgatagagccctcgccatccattacgctgaattatcctcgtcagtctttcgatactgcgcatttcccggtggaagaaaaagcggcgattgcgcaattacgccagttttgccagaacggtgccggagaatatgagcaacaacgagattttccggcagtggaaggcaccagtcgtttgtccgccagcctagcaacgggcgggttatcgcctcgccagtgtttgcatcgcttgttggcggaacagccgcaggcgctggacggtggggccggtagtgtctggcttagtgagctgatctggcgcgagttctaccgtcatctgatgacgtattacccctcgttgtgtaaacattgtccgtttattgcctggacggatcgtgtgcagtggcagagcaatcccgcacatttacaggcctggcaggaaggcaaaacgggatacccgattgtcgatgctgccatgcgtcagcttaacagcactggctggatgcataaccggctacggatgattacagccagttttctggtgaaagatttgttgatcgactggcgcgaaggcgagcgatatttcatgtcgcagctgattgatggtgatttggcagccaataacggtggctggcagtgggccgcttcaaccggaaccgatgcagcgccgtattttcgtattttcaacccgacaacccagggcgagaaatttgaccgtgagggcgagtttattcgtcgatggttaccggagctgcgcgatgtaccagggaaagcggtgcatgagccgtggaagtgggcgcagaaagcaggtgtgatgctggattatccgcaaccgatagttgatcacaaagaggcaaggctgcgaacgctggcagcgtacgaagaagcgaggaaaggagcctga

SEQ ID NO: 460003 - DNA, 1482 bp, Shigella boydii
atgaataaacacgcatctcagccgcgcgctatttactatgtcgttgcgctgcaaatctgggaatattttagcttttacagcatgcgtgccctgctgattctctatctcaccaatcaactaaaatacaacgatactcacgcctacgagttatttagcgcctactgttcgctggtgtatgtcacgccaatcctcggtggctttttggcggataaagttctcggcaatcgcatggcggtgatgctgggggcgttattgatggcgatcggtcatgtggtgttgggtgccagtgagatccatccgtcattcctctatctgtccctggcgataatcgtttgtggctatggtctgtttaaatccaatgtcagttgcctgctcggcgagctgtatgagccaaccgatccgcgtcgtgatggcggtttctcgctgatgtatgcagcgggtaacgtggggtctattatcgcacctattgcctgtggctacgcccaggaagagtacagctgggcgatgggctttggcctggcggcggtgggtatgatcgcgggtctggtcattttcttatgtggcaatcgtcatttcacacatacccgcggcgttaataaaaaagtactgcgtgcgacaaactttctcctgcctaactggggatggctgctggttctgctggtggcaacgcctgcgctgattaccgtattgttctggaaagagtggtcggtatacgccttaattgtcgcgactattattggcctgggtgtactggcaaaaatttatcgcaaagcagaaaaccagaaacagcgtaaggagctggggctgattgtgacgctcaccttcttcaatatgttgttctgggccttcgcacaacagggcggcagctcgattagcctttatatcgaccgcttcgttaaccgcgatatgtttggttataccgttccgactgctatgttccagtcgattaatgccttcgcagttatgctgtgcggtgtgttcctggcgtgggtggttaaagaaagcgtcgcaggtaatcgtaccgtgcgcatctggggaaaatttgctcttggtctcggcctgatgagcgccgggttctgcattctgaccttaagcgcccgctggtccgcaatgtatggtcactcttctctgccactgatggtattaggcctggcggtgatgggctttgcggaactgtttatcgacccggttgccatgtcgcaaattacgcgcattgaaatccccggtgtgaccggcgtattaaccggcatttatatgctgctttccggcgcgattgcgaactatctcgcgggcgtgattgccgatcagacatcgcaggcttcgtttgatgcttccggggcgatcaactactccatcaatgcatatattgaagtatttgatcaaattacctggggcgcactggcgtgtgtaggactggtactgatgatttggctgtatcaggcgctgaaattcagaaaccgcgcgctggcgctggagtcataa

SEQ ID NO: 460004 - DNA, 744 bp, Shigella boydii
atgaaaaacaccgaactggaacaactgattaacgaaaaactgaacagcgcggcgattagtgattacgcgccgaatggtttgcaggtggaaggcaaagagacggtgcaaaaaattgttaccggtgtcaccgccagccaggctttgctcgatgaggcagtgcgtctgggcgcggatgcggtcattgtgcatcatggctacttctggaaaggagagtctccggtcattcgcggaatgaagcgtaaccgtttaaaaacgttgctggcgaatgatatcaacctgtatggctggcatttgccgcttgacgcacatcctgagctgggcaataacgcacagctggcggcgttactggggatcacggtcatgggcgaaattgagccgttggtgccgtggggagagctgaccatgcctgtgccgggactggaactagcctcctggattgaagcgcgtctgggacgtaagccgttatggtgtggcgataccggacctgaggtggtccagcgcgtcgcctggtgcacgggcggcgggcaaagttttatcgatagcgccgcgcgttttggcgtggatgcttttattactggcgaagtttctgaacagaccattcattcagcccgcgagcagggattgcatttttatgctgcaggtcaccatgccactgaacgtggtggtattcgcgcattgagcgagtggctgaatgaaaataccgatcttgatgtgacctttattgatattcctaatcctgcataa

SEQ ID NO: 460005 - DNA, 657 bp, Shigella boydii
gtgcaacgagcgcgttgttatctgataggtgaaacggcggtagtgctggaactggaaccgccggtgacgctggctagccagaaacggatctggcgactggcgcagcgtctggtggatataccgaatgtggttgaagccattcccggcatgaacaatatcacggtgattttgcgtaatcctgagtcgctggcgctggatgccatagagcgtttgcaacgctggtgggaggagagcgaggccctggaacctgagtctcgctttattgaaattccggtggtttacggtggtgcaggcggaccggatttggcggtggtcgcggcgcattgcgggttgagcgaaaaacaggttgttgaattgcactcctccgtggaatacgtggtctggtttttaggttttcaaccgggcttcccgtatctcgggagtttgccggaacaactacacacgccacggcgcgctgaaccgcgcttgctcgttccggcaggttctgtcgggatcggcgggccgcagactggtgtttatccgctggcaacgccgggtggctggcagttgattggtcatacctcactcagcctgtttgatccggcgcgtgacgaacccatcttattacgtccgggagacagcgtgcgctttgtaccgcagaaggagggagtatgctga

SEQ ID NO: 460006 - DNA, 933 bp, Shigella boydii
atgctgaagattattcgtgcgggcatgtataccactgtgcaggatggcggtcgtcacggttttcgccagtcgggtatcagccactgcggcgcactggatatgcctgcgttacgcattgctaacctgctggtgggtaatgacgccaatgcccccgcgctggagatcacgctcggtcagttaacggttgagttcgaaactgatgggtggtttgctctgacgggtgccggttgcgaagcgcggctggatgataacgccgtctggaccggctggcgcttgccgatgaaagcaggccagcgtttaacgcttaaacgcccgcagcacggcatgcgcagttatctggcggtcgcgggtggtattgatgttccgccggtaatggggtcatgcagcaccgatctcaacgtggggattggcgggctggaaggccgtttactgaaggatggtgaccgactcccgattggcaaatcgaagcgtgattttatggaagcgcagggcgttaaacagctgctgtggggcaaccgcattcgcgccttgccggggccggaatatcatgagttcgatcgcgcctcgcaggatgcattctggcgttcgccctggcagcttagcccgcaaagtaaccgcatgggctatcgcttacaggggcaaattttaaaacgcaccaccgatcgcgaactgttatctcacggtttgttaccgggtgtggtgcaggtgccgcataacgggcagccgattgtgttgatgaacgacgcacagaccaccggtggttacccgcgtattgcctgtatcattgaggctgatatgtaccatctggcgcaaattccgctcggtcagccgattcattttgtccagtgttcactggaagaggcactgaaagcgcggcaagatcaacaacgttatttcgaacaattagcgtggcggctacacaatgaaaattga

SEQ ID NO: 460007 - DNA, 735 bp, Shigella boydii
atgaaaattgacctgaacgccgatctgggcgaaggctgcgccagcgacgcagagctattaacgctggtttcctctgccaatattgcttgtggatttcatgcaggcgatgcccaaaccatgcaggcttgcgtgcgtgaagcaataaaaaatggtgtcgcgattggcgctcacccgagttttcccgacagggaaaattttggtcgcagcgccatgcagctgccgccagaaaccgtttacgcccagacgctgtatcaaattggcgcgctggcaacgattgcccgtgcgcaaggcggcgtaatgcgtcatgtcaaaccgcacggcatgttgtacaaccagacggcgaaagaagcacaactggcagacgccatcgccagagcggtatacgcttgcgatccagcattggttctcgttgggctggcaggaagcgagctgattcgtgcaggcaagcaatatggcctgacaacgcgcgaggaagtgtttgccgatcgcggttatcaggctgacggctcgctggtgccgcgaagtcagccaggcgcgttgattgaaaacgaagaacaggcgctggcgcaaacgctagagatggtgcaacacggcagagtcaaaagtatcaccggcgaatgggcaacggtcacggcgcaaacagtctgcctgcatggcgacggcgagcacgcactggcgttcgcccgccgactacgctctacatttgccgaaaaggagattgttgtcgcagcataa

SEQ ID NO: 460008 - DNA, 792 bp, Shigella boydii
atgcctgaaggcccggagatccgccgtgcagcggataacctggaggcggcgatcaaaggcaaaccactaactgatgtctggtttgccttcccgcagttaaaaacttatcaatcacaacttatcggtcaacacgttacccatgtgggaacgcgtggtaaggcgttgttaactcatttttccaacgacttaacgctctacagccataatcagctttacggcgtctggcgcgtggttgataccggcgaagagccgcagaccacgcgagtattgcgggtaaaactgcaaacggctgacaaaaccattctgctttatagcgcctcggatattgagatgttgaggccggaacaactgaccacgcatccgtttttacaacgcgttggtcccgatgtgctggatccgaatctgacgccggaggtggtaaaggaacggttattgtcaccgcgctttcgtaaccgtcagtttgcaggattactgctcgatcaggcgtttctggctgggcttggcaattatttgcgggtggagatcctctggcaggttgggttgactggaaatcataaagcgaaagatctcaatgcggcgcaactggatgcactcgcacacgcgttactggagattcctcggttttcttacgctacgcgggggcaggtggatgagaataagcatcatggggcgctgtttcgctttaaggtttttcatcgtgatggcgaactgtgcgaacgctgtggcggcatcattgagaaaaccacgttgtcctcgcgcccgttttactggtgtccaggctgccagcactag

SEQ ID NO: 460009 - DNA, 1047 bp, Shigella boydii
atgccagttttgcagtggggaatgttatgtgtgctatcacttatcctttctattggtttcctcgcggtacatctcccggcggcgctattacttgggccgatgatcgccgggatcatcttcagtatgcgcggaattactctgcaacttccccgctccgcttttctcgccgcgcaggccattcttggctgcatgattgcgcaaaacctcactggttcgattctcaccacgctggccgccaactggccgatcgtgcttgctattttactggtgacgctgctttccagcgccatcgtgggttggttattggtgcgctatagctcactgcctggaaataccggtgcctggggttcttctccaggcggcgcagcggcaatggtcgctatggcgcaagattacggcgcagatattcgcctggtggcgtttatgcaatatctgcgagtgctgttcgtcgcgggggccgctgttctggtcacctgcatgatgctgggtgataacgctgaagcggttaaccagcaaatcgtctggttcccgccagtgagcattaatctcctgcttacgattttgctcgcagtcgttgccggtacggcgggatgcatgctgcgtctaccttccggcacgatgctcatcccgatgctggcgggcgcagtgctccagtctggtcagctcatcaccatcgaactaccggaatggctgctggcgatggcgtatatggcaattggctggcggattggtcttggtttcgataaacaaatcttactgcgggcactacgcccactaccgcaaatcctgctgtcgatttttgctctgctagctatttgtgcaggtatggcgtggggactgacccggtttatgcatattgattttatgactgcctacctcaccaccagtcccgacgggcttgataccgtggcggtcatcgccgcagggagcaatgccgatatggcgcttattatggcgatgcaaaccctgcgcctgttcagtattttgctgacggggccagccattgcgcggtttatttcaacctatgcgccgaagcggtcggcctag

SEQ ID NO: 460010 - DNA, 1071 bp, Shigella boydii
atgagtgctggcaagggagtgttgctcgtcatctgtctgttatttctgccgttgaagtctgcgcttgccctgaactgctactttggttcatccggtggctcggtagaaaaatcagaagcgattcaaccttttgctgtaccaggcaatgccaaactcggcgataagatttgggaatctgacgatattaaaattcccgtctattgtgacaacaataccaacggcaattttgaaagtgagcatgtttatgcctgggtaaacccctacccgggggtgcaggatcgctattatcaactcggcgtaacttacaatggcgttgattatgacgccaaccagggaaaaagccgcatcgacactaaccagtgtattgacagtaagaacattgacatttatacccctgagcagattatcgcgatgggatggcagaacaaaatttgctcgggtgatcccgctaatattcacatgtcgcgtacctttctcgctcgcatgcggttatacgtcaaaatacgagaaatgccgccgcatgattatcaaagtacgcttagcgactatatcgtcgtgcaatttgacggtgccggtagcgttaacgaagaccctactgcccaaaacctgaaatatcatattactggtctggaaaacattcgcgtgctggattgcagcgtcaatttttccatttcaccggaaacacaggtgattgattttggtaaatttaatttgctggatattcgtcgccacacaatgtcgaaaacattcagtattaagacgacaaaatcacaaaatgaccaatgcaccgacggatttaaagtcagttcctccttttataccgaagaaacgttggttgaagaagataaagcattgttgattggtaatggtctgaagctacgtttgctggatgaaaacgcctcgccttataccttcaataaatatgctgaatacgccgatttcaccagcgacatgttggtctacgaaaaaacctatacagctgaactttcgtccattgcaggtaccccatcgaggctgggcccttcgatacagtggtgctttttaaaattaactataactgatttgccatga

SEQ ID NO: 460011 - DNA, 732 bp, Shigella boydii
atgacatttatgaaaggactaccccttttgttgttggttgccagtctgtgcagccacgctgcactacaacccgatcgcactcgtattgtgtttaacgctaatgataaagctaccagtctgcgggtggataatcgtagcgataaactcccctacctcgcttattcctggctcgaaaatgaaaaaggggagaaaagcgatgatcttctggtcgccctgccgccgatacaacgtctggaaccgaaagcaacaacgcaggtacggatagtaaagcaagcctcgaccacaaaattaccgggcgatcgcgaaacgctatttttctacaatatgcgtgaaattcctcccgccccggaaaaaaacagcgaccatgccgttctgcaagtcgccattcagagtcgtatcaaggtgttctggcgaccggctgcattacgcaagaaagcaggagaaaaggtcgaactgcagttacaggtcagccagcagggcaaccaactgacactgaaaaatcctaccgcgtattatctgaccattgcctacttgggacgaaatgaaaaaggcgttctccccggcttcaaaaccgtgatggttgcgccttttagtacggtcaacacaaacaccggaaattatagcggcagccagttttatctcggttatatggatgattacggcgcgttacgcatgacgacgctcaactgcagcggacaatgccatttacaagccgtggaggcgaagaaatga

SEQ ID NO: 460012 - DNA, 2451 bp, Shigella boydii
gtgaatatttatcgactctcttttgtatcctgcctggtcgtggcgatgccttgcgcattggcggtcgaattcaaccttaatgttctcgataaatcgatgcgcgaccgcattgatatttcattattaaaggaaaaaggagtcattgctcccggtgagtattttgttagcgttgcggtaaataataaccaaatcagtaacgggcaaaagattaactggcacaaaaatgacgataaaaccattccgtgcatcaatgatttactggtcgataaatttggcttaaaacctgaagtccgtcagtcgttaccattgataaatcagtgcgtcgattttagctcccgacctgaaatgctcttcaatttcgatcaagccaatcagcaactgaatattagtattccgcaagcctggctggcgtggcactcagaaaactggaccccaccctccacatggaaagaaggtgtcgccggtgtcctgatggattacaacttgtttgccagcagctaccgcccacaggatggcagcagcagcactaatcttaacgcctatggaacagccggaatcaacacgggggcatggcgcttacgcagtgattatcagttgaatcagactgatagcgatgataaccatgaacagtcaggcgaaatatcacgtacctatctttttcgcccgttaccgcaattaggttcaaaattaaccctcggcgaaacggattttagttccaatattttcgacggtttttcttataccggtgcggcactggcaagtgacgatcgaatgttgccatgggaactacgcggctacgccccacaaattagcggtattgcacagaccaatgccacggtgacgatcagtcaatcaggccgcgtcatttaccagaaaaaagtcctaccaggcccatttatcattgacgaccttaatcagtctgttcagggcacactggatgtcaaagtgacggaagaagatggtcgggtgaacaatttccaggtttcggcagcatcgacgcccttcctgactcgtcagggacaggttcgctataaactggccgcgggtcagccacggccctccatgtcacatcaaactgaaaatgaaaccttttttagcaatgaagtttcctgggggatgctgtcaaacacctcgctgtacggcggcctgctgctttctggtgatgactaccattctgccgcaatgggtattgggcaaaatatgctgtggcttggtgcgctgtcgtttgatgtcacgtgggccagtagccattttgatactcagcaggacgagcggggcttaagctaccgttttaattacagcaaacaagtggatgccactaacagcacgatttccctcgccgcttatcgtttctccgatcgtcattttcacagctacgccaactatctggatcacaaatacaacgacagcgatgcgcaggacgaaaaacagacgatcagcttatctgtgggccaaccgattaccccactaaacctcaatctttacgccaacctgctacatcaaacctggtggaatgcagacgcctccacgaccgccaacatcacggcaggttttaatgttgatattggtgactggagagatatctctatttcgacgtcattcaatacaacccattacgaagataaagatcacgacaaccagatttacctgtcgatttcgctccccttcggtaacggtggtcgggttggctatgacatgcaaaacagtagccacagcaccacacaccgcatgtcgtggaacgatacgctggatgaacgtaatagctggggcatgtctgccggactgcaatccgaccgtcctgacaatggagcccaggtgagcggcaactatcagcacctgagttcagcgggtgagtgggatatttctggtacctatgccgccaatgattacagttccgtcagcagcagctggagcggttctttcaccgcaacccaatatggtgcagcgtttcatcgccacagctccaccaatgaaccacgcctgatggtcagcaccgatggcgtggcagatattccggttcagggcaatctcgactacaccaaccattttggcattgcggtggtaccgttgatttccagttaccagccttccaccgtggcggtgaacatgaatgacttacccgacggcgtaacagttgcagaaaacgttatcaaagaaacgtggattgaaggcgcgataggttacaaatcactggcttcccgttccggtaaagacgttaacgtcatcattcgcaacgccagcggtcagtttcctcccctcggagcggatatccgccaggatgacagcggcattagcgtggggatggttggcgaggaaggacatgcctggttaagcggagtcgctgaaaatcaaaagtttaccgtggtctggggtgataaccagcattgctcgctccatcttcctgaacatatggaagacaccgcaaatcgcctgattttaccttgtcattaa

SEQ ID NO: 460013 - DNA, 264 bp, Shigella boydii
ttggctaatatcaaatcagctaagaagcgcgccattcagtctgaaaaggctcgtaagcacaacgcaagccgtcgctctatgatgcgtactttcatcaagaaagtatacgcagctatcgaagctggcgacaaagctgctgcacagaaagcatttaacgaaatgcaaccgatcgtggaccgtcaggctgctaaaggtctgatccacaaaaacaaagctgcacgtcataaggctaacctgactgcacagatcaacaaactggcttaa

SEQ ID NO: 460014 - DNA, 942 bp, Shigella boydii
atgaagctgatacgcggcatacataatctcagccaggccccgcaagaagggtgtgtgctgactattggtaatttcgacggcgtgcatcgcggtcatcgcgcgctgttacagggcttgcaggaagaagggcgcaagcgcaacttaccggtgatggtgatgctttttgaacctcaaccactggaactgtttgctaccgataaagccccggcaagactgacccggctgcgggaaaaactgcgttaccttgcagagtgtggcgttgattacgtgctgtgcgtgcgtttcgacaggcgtttcgcggcgttaaccgcgcaaaatttcatcagcgatcttctggtgaagcatttgcgcgtaaaatttcttgccgtaggggatgatttccgctttggcgctggtcgtgaaggcgatttcttgttattacagaaagctggcatggaatacggcttcgatatcactagtacgcaaactttttgcgaaggtggcgtgcgtattagcagcaccgctgtgcgtcaggcgctggcggatgacaatctggctctggcagaaagtttactggggcacccgtttgccatctccgggcgtgtagtccacggtgatgaattagggcgcactataggtttcccgacggcgaatgtaccgctacgccgtcaggtttccccggtgaaaggggtttatgcggtagaagtgctgggcctcggtgaaaagccgttacccggcgtggcaaacatcggaacacgcccaacggttgccggtattcgccagcagctggaagtgcatttgttagatgttgcaatggacctttacggtcgccatatacaagtagtgctgcgtaaaaaaatacgcaatgagcagcgatttgcgtcgctggacgaactgaaagcgcagattgcgcgtgatgaattaaccgcccgcgaattttttgggctaacaaaaccggcttaa

SEQ ID NO: 460015 - DNA, 2817 bp, Shigella boydii
atgagtgactataaatcaaccctgaatttgccggaaacagggttcccgatgcgtggcgatctcgccaagcgcgaaccgggaatgctggcgcgttggactgatgatgatctgtacggcatcatccgtgcggctaaaaaaggcaaaaaaaccttcattctgcatgatggccctccttatgcgaatggcagcattcatattggtcactcggttaacaagattctgaaagacattatcgtgaagtccaaagggctttccggttatgactcgccgtatgtgcctggctgggactgccacggtctgccgatcgagctgaaagtagagcaagaatacggtaagccgggtgagaaattcaccgccgccgagttccgcgccaagtgccgcgaatacgcggcgacccaggttgacggtcaacgcaaagactttatccgtctgggcgtgctgggcgactggtcgcacccgtacctgaccatggacttcaaaactgaagccaacatcatccgcgcgctgggcaaaatcatcggcaacggtcacctgcacaaaggcgcgaagccggtacactggtgcgttgactgccgttctgcgctggcggaagcggaagttgagtattacgacaaaacttctccgtccatcgacgttgcttttcaggcggtcgatcaggatgcactgaaagcaaaatttgccgtaagcaacgttaacggcccaatctcgctggtgatctggaccactacgccgtggactctgcctgcgaaccgcgcaatctctattgcacctgatttcgactatgcgctggtgcagatcgacggtcaggccgtgattctggcgaaagatctggttgaaagcgtaatgcagcgtatcggcgtgaccgattacaccattctcggcacggtaaaaggtgcggagcttgagttgctgcgctttacccatccgtttatgggcttcgacgttccggcaatcctcggcgatcacgttaccctggatgccggtaccggtgccgttcacaccgcgcctggccacggcccggacgactatgtgatcggtcagaaatacggcctggaaaccgctaacccggttggcccggacggcacttatctgccgggcacttatccgacgctggatggcgtgaacgtcttcaaagcgaacgacatcgtcgttgcgctgctgcaggaaaaaggcgcgctgctgcacgttgagaaaatgcagcacagctatccgtgctgctggcgtcacaaaacgccgatcatcttccgcgcgacgccgcagtggttcgtcagcatggatcagaaaggtctgcgtgcgcagtcactgaaagagatcaaaggcgtgcagtggatcccggactggggccaggcgcgtatcgagtcgatggttgctaaccgtcctgactggtgtatctcccgtcagcgcacctggggcgtaccgatgtcactgttcgtgcacaaagacacggaagagctgcatccgcgtactctcgaactaatggaagaagtggcaaaacgcgttgaagttgacggcatccaggcgtggtgggatcttgatgcgaaagagatcctcggcgatgaagctgatcagtacgtgaaagtgccggacacattggatgtatggtttgactccggatctacccactcttctgttgttgacgtgcgtccggaatttgccggtcatgcagcggacatgtatctggaaggttctgaccagcaccgtggttggttcatgtcttccctaatgatctccaccgcgatgaaaggcaaagcgccgtatcgtcaggtactgacccacggctttaccgtggatggtcagggccgcaagatgtctaaatccatcggcaataccgtttcgccgcaggatgtgatgaacaaactgggcgcggatattctgcgtctgtgggtggcatcaaccgactacaccggtgaaatggccgtttctgacgagatcctgaaacgtgctgccgatagctatcgtcgtatccgtaacaccgcgcgcttcctgctggcaaacctgaacggttttgatccagcaaaagatatggtgaaaccggaagagatggtggtactggatcgctgggccgtaggttgtgcgaaagcggcacaggaagacatcctcaaggcgtacgaagcatacgatttccacgaagtggtacagcgtctgatgcgcttctgctccgttgagatgggttccttctacctcgacatcatcaaagaccgtcagtacaccgccaaagcggacagtgtggcgcgtcgtagctgccagactgcgctgtatcacatcgcagaagcgctggtgcgctggatggcaccaatcctctccttcaccgctgatgaagtgtggggctacctgccgggcgaacgtgaaaaatacgtcttcaccggtgagtggtacgaaggcctgtttggcctggcagacagcgaagcgatgaacgatgcgttctgggacgagctgttgaaagtgcgtggcgaagtgaacaaagtcattgagcaagcgcgtgccgacaagaaagtgggtggctcgctggaagcggcagtaaccttgtatgcagaaccggaactggcggcgaaactgaccgcgctgggcgatgaattacgatttgtcctgttgacctccggcgctaccgttgcagactatcacgacgcacctgctgatgctcagcagagcgaagtactcaaagggctgaaagtcgcgttgagtaaagccgaaggtgagaagtgcccacgctgctggcactacacccaggatgtcggcaaggtggcggaacacgcagaaatctgcggccgctgtgtcagcaacgtcgccggtgacggtgaaaaacgtaagtttgcctga

SEQ ID NO: 460016 - DNA, 495 bp, Shigella boydii
atgagtcaatcgatctgttcaacagggctacgctggctgtggctggtggtagtcgtgctgattatcgatctgggcagcaaatacctgatcctccagaactttgctctgggggatacggtcccgctgttcccgtcgcttaatctgcattatgcgcgtaactatggcgcggcgtttagtttccttgccgatagcggcggctggcagcgttggttctttgccggtattgcgattggtattagcgtgatcctggcagtgatgatgtatcgctcgaaggccacgcagaagctaaacaatatcgcttacgcgctgattattggcggcgcgctgggcaacctgttcgaccgcctgtggcacggcttcgttgtcgatatgatcgacttctacgtcggcgactggcacttcgccaccttcaaccttgccgatactgccatctgtgtcggtgcggcactgattgtgctggaaggttttttgccttctagagcgaaaaaacaataa

SEQ ID NO: 460017 - DNA, 450 bp, Shigella boydii
atgtctgaatctgtacagagcaatagcgccgtcctggtgcacttcacgctaaaactcgacgatggcaccaccgccgagtctacccgcaacaacggtaaaccggcgctgttccgcctgggtgatgcttctctttctgaagggctggagcaacacctgttggggctgaaagtgggcgataaaaccaccttctcgttggagccagatgcggcgtttggcgtgccgtcaccggacctgattcagtacttctcccgccgtgaatttatggatgcaggcgagccagaaattggcgcaatcatgctttttaccgcaatggatggcagtgagatgcctggcgtgatccgcgaaattaacggcgactccattaccgttgatttcaaccatccgctggccgggcagaccgttcattttgatattgaagtgctggaaatcgatccggcattggaggcgtaa

SEQ ID NO: 460018 - DNA, 951 bp, Shigella boydii
atgcagatcctgttggccaacccgcgtggtttttgtgccggggtagaccgcgctatcagcattgttgaaaacgcgctggccatttacggcgcaccgatatatgtccgtcacgaagtggtacataaccgctatgtggtcgatagcttgcgtgagcgtggggctatctttattgagcagattagcgaagtaccggacggcgcgatcctgattttctccgcacacggtgtttctcaggcggtacgtaacgaagcaaaaagtcgcgatttgacggtatttgacgcgacctgtccgctggtgaccaaagtgcatatggaagtcgcccgcgccagtcgccgtggcgaagaatctattctcatcggtcacgccgggcacccggaagtggaagggacaatgggccagtacagtaacccggaagggggaatgtatctggtcgaatcgccggacgatgtgtggaaactgacggtcaaaaacgaagagaagctctcctttatgacccagaccacgctgtcggtggatgacacgtctgatgtgatcgacgcgctgcgtaaacgcttcccgaaaattgtcggtccgcgcaaagatgacatctgctacgccacgactaaccgtcaggaagcggtacgcgccctggcagaacaggcggaagttgtgttggtggtcggttcgaaaaactcctccaactccaaccgtctggcggagctggcccagcgtatgggcaaacgcgcgtttttgattgacgatgcgaaagacatccaggaagagtgggtgaaagaggttaaatgcgtcggcgtgactgcgggcgcatcggctccggatattctggtgcagaatgtggtggcacgtttgcagcagctgggcggtggtgaagccattccgctggaaggccgtgaagaaaacattgttttcgaagtgccgaaagagctgcgtgtcgatattcgtgaagtcgattaa

SEQ ID NO: 460019 - DNA, 915 bp, Shigella boydii
atgcgtttacctatcttcctcgatactgaccccggcattgacgatgccgtcgccattgccgccgcgatttttgcacccgaactcgacctgcaactgatgaccaccgtcgcgggtaatgtctcggttgagaaaaccacccgcaacgccctgcaactgctgcatttctggaatgcggagattccgctcgcccagggagccgctgtgccgctggtacgcgcaccgcgtgatgcggcatctgtgcacggcgaatcgggaatggctggctacgactttgttgagcacaaccgaaagccgctcgggataccagcgtttctggcgattcgggatgccctgatgcgtgcaccagagcccgttaccctggtggccatcggcccgttaaccaatattgcgctgttactttcacaatgcccggaatgtaaaccgtatattcgtcgtctggtgatcatgggcggttctgctggtcgcggcaactgcacaccaaacgccgagtttaatatcgctgccgatccagaagcggctgcctgtgtcttccgtagcggcatcgaaatcgtcatgtgcggtctggatgtcaccaatcaggcaatattaacccctgactatctcgctactttgccggagttgaatcgcaccggaaaaatgctccacgccctgtttagccactaccgtagcggcagtatgcaaagtggactgcgtatgcacgatctttgcgctattgccttgctggtgcgcccggaattgttcactctcaaaccgtgttttgtggcagtggaaactcagggcgaatttacctcaggcacgacggtggttgatatcgacggttgcctgggcaaaccagccaatgtaaaggtggcattggatctggatgtgaaaggcttccagcagtgggtggctgaggtgctggctctggcgtcgtaa

SEQ ID NO: 460020 - DNA, 822 bp, Shigella boydii
atgcatgatgcaaacatccgcgttgccatcgcgggagccggggggcgtatgggccgccagttgattcaggcggcgctggcattagaaggcgtgcagctgggcgcggcgctggagcgcgaaggatcttctttactgggcagcgacgccggtgagctggctggtgcagggaaaacaggcgttaccgtgcaaagcagcctcgatgcggtaaaagatgattttgatgtgtttatcgattttacccgtccggaaggtacgctgaaccatctcgctttttgtcgccagcatggcaaagggatggtgatcggcactacggggtttgacgaagccggtaaacaggcgattcgtgacgccgccgccgatattgcgattgtctttgccgccaattttagcgttggcgttaacgtcatgcttaagctgctggagaaagcagccaaagtgatgggtgactacaccgatatcgaaattattgaagcacatcatagacataaagttgatgcgccgtcaggcaccgcactggcaatgggagaggcgatcgcccacgcccttgataaagatctgaaagattgcgcggtctacagtcgtgaaagccacaccggtgaacgtgtgcctggcaccattggttttgccaccgtgcgtgcaggtgacatcgttggcgaacataccgcgatgtttgccgatattggcgagcgtctggagatcacccataaggcgtccagccgcatgacatttgctaacggcgcggtaagatcggctttttggttgagtggtaaggaaagtggtctttttgatatgcgagatgtgcttgatctcaatagtttgtaa

SEQ ID NO: 460021 - DNA, 1149 bp, Shigella boydii
ttgattaagtcagcgctattggttctggaagacggaacccagtttcacggtcgggccataggggcaacaggttcggcggttggggaagtcgttttcaatacttcaatgaccggttatcaagaaatcctcactgatccttcctattctcgtcaaatcgttactcttacttatccccatattggcaatgtcggcactaatgacgccgatgaagaatcttctcaggtacatgcacaaggtctggtgattcgcgacctgccgctgattgccagcaacttccgtaataccgaagacctctcttcttacctgaagcgccataacatcgtggcgattgccgatatcgatacccgtaagctgacgcgtttactgcgcgagaaaggcgcacagaatggctgcattatcgcaggcgataacccggatgcggcgttggcgttagaaaaagcccgcgcgttcccaggtctgaatggcatggatctggcaaaagaagtgaccaccgcagaagcctatagctggacacaagggagctggacgttgaccggcggcctgccagaagcgaaaaaagaagacgagctgccgttccacgtcgtggcttatgattttggtgccaagcgcaacatcctgcggatgctggtggatagaggctgtcgcctgaccatcgttccggcgcaaacttctgcggaagatgtgctgaaaatgaatccagacggcatcttcctctccaacggtcctggcgacccggccccgtgcgattacgccattaccgccatccagaaattcctcgaaaccgatattccggtattcggcatctgcctcggtcatcagctgctggcgctggcgagcggtgcgaagactgtcaaaatgaaatttggtcaccacggcggcaaccatccggttaaagatgtggagaaaaacgtggtgatgatcaccgcccagaaccacggttttgcggtggatgaagcaacattacctgcaaacctgcgtgtcacgcataaatccctgttcgacggtacgttacagggcattcatcgcactgataaaccggctttcagcttccagggtcacccggaagccagccctgggccacacgacgcagcgccgttgttcgaccactttatcgagttaattgagcagtaccgtaaaaccgctaagtaa

SEQ ID NO: 460022 - DNA, 3222 bp, Shigella boydii
atgccaaaacgtacagatataaaaagtatcctgattctgggtgcgggcccgattgttatcggtcaggcgtgtgagtttgactactctggcgcgcaagcatgtaaagccctgcgcgaagagggttaccgcgtcattctggtgaactccaacccggcgaccatcatgaccgacccggaaatggccgatgcgacctacatcgagccgattcactgggaagtagtacgcaagattattgaaaaagagcgcccggacgcggtgctgccaacgatgggcggtcagacggcgctgaactgcgcgctggagctggagcgtcagggcgtgttggaagagttcggcgtgactatgattggtgcgaccgccgatgcgattgataaagcagaagaccgccgtcgtttcgacgtagcgatgaagaaaattggtctggaaaccgcgcgttccggtatcgcacacacgatggaagaagcgctggcggttgccgctgacgtgggcttcccgtgcattattcgcccatcctttaccatgggcggtagcggcggcggtatcgcttataaccgcgaagagtttgaagaaatttgcgcccgcggtctggatctctccccaaccaaagagctgctgattgatgagtcgctgatcggctggaaagagtacgagatggaagtggtgcgtgataaaaatgacaactgcatcatcgtctgctctatcgaaaactttgatgcgatgggcatccataccggtgactccatcactgtcgcgccagcccaaacgctgaccgacaaagaatatcaaatcatgcgtaacgcctcgatggcggtgctgcgtgaaatcggcgttgaaaccggtggttccaatgtccagtttgcggtgaacccgaaaaacggtcgcctgattgttatcgaaatgaacccacgcgtgtcccgttcttcggcgctggcgtcgaaagcgaccggtttcccgattgctaaagtggcggcgaaactggcggtgggttacaccctcgacgaactgatgaacgacatcactggcggacgtactccggcctccttcgagccgtccatcgactatgtggttactaaaattcctcgcttcaacttcgaaaaattcgctggtgctaacgaccgtctgaccactcagatgaaatcggttggcgaagtgatggcgattggtcgcacgcagcaggaatccctgcaaaaagcgctgcgcggcctggaagtcggtgcgactggattcgacccgaaagtgagcctcgatgacccggaagcgttaaccaaaatccgtcgcgaactgaaagatgctggcgcagagcgtatctggtacatcgccgatgccttccgtgcgggcctgtctgtggacggcgtgttcaacctgaccaatattgaccgctggttcctggtacagattgaagaactggtgcgtctggaagagaaagtagcggaagtgggcatcactggcctgaacgctgaattcctgcgccagctgaaacgcaaaggctttgccgatgcgcgtctggcaaaactggcgggcgtgcgcgaagcggaaatccgcaagctgcgcgaccagtatgacctgcacccggtttataagcgcgtggatacctgtgcggcagagttcgccaccgacaccgcttacatgtactccacttatgaagaagagtgcgaagcgaatccgtctaccgaccgtgaaaaaatcatggttctcggcggcggcccgaaccgtatcggtcagggtatcgaattcgactactgctgtgtacacgcctcgctggcgctgcgcgaagacggttacgaaaccattatggttaactgtaacccggaaaccgtctccaccgactacgacacttccgatcgcctctacttcgagccggtaactctggaagatgtgctggaaatcgtgcgtattgagaagccgaaaggcgttatcgttcagtacggcggtcagaccccgctgaaactggcgcgcgcgctggaagctgctggcgtaccggttatcggcaccagcccggatgctatcgaccgtgcagaagaccgtgaacgcttccagcatgcggttgagcgtctgaaactgaaacaaccggcgaacgccaccgttaccgctattgaaatggcggtagagaaggcgaaagagattggctacccgctggtggtacgtccgtcttacgttctcggcggtcgggcgatggaaatcgtctatgacgaagctgacctgcgtcgctacttccagacggcggtcagcgtgtctaacgatgcgccagtgttgctggatcacttccttgatgacgcggtagaagttgacgtggatgccatctgcgacggcgaaatggtgctgattggcggcatcatggagcacatcgagcaggcgggcgtgcactccggtgactccgcatgttctctgccagcctacaccttaagtcaggaaattcaggatgtgatgcgccagcaggtgcagaaactggccttcgaattgcaggtgcgcggtctgatgaacgtgcagtttgcggtgaaaaataacgaagtctacctgattgaagttaacccgcgtgcggcgcgtaccgttccgttcgtctccaaagccaccggcgtaccgctggcaaaagtggcggcgcgtgtgatggctggcaaatcgctggctgagctgggcgtaaccaaagaagttatcccgccgtactactcggtgaaagaagtggtgctgccgttcaataaattcccgggtgttgacccgctgttagggccagaaatgcgctccaccggggaagtgatgggcgtgggccgcaccttcgctgaagcgtttgccaaagcgcagctgggcagcaactccaccatgaagaaacacggtcgtgcgttgctttccgtgcgcgaaggcgataaagaacgcgtggtggacctggcggcaaaactgctgaaacagggcttcgagctggatgcgacccacggcacggcgattgtgctgggcgaagcgggcattaatccgcgtctggtgaacaaggtgcatgaaggccgtccgcacattcaggaccgcatcaagaatggcgaatatacctacatcatcaacaccacttcaggccgtcgcgcgattgaagactcccgcgtgatccgtcgcagtgcgctgcaatataaagtgcattatgacaccaccctgaacggtggtttcgctaccgcgatggcgctgaatgccgacgcgaccgaaaaagtaatttcggtgcaggaaatgcacgcgcagatcaaataa

SEQ ID NO: 460023 - DNA, 1374 bp, Shigella boydii
gtggatcatttgcctatattttgccaattacgcgatcgcgactgtctgattgtcggcggtggtgatgtcgcggaacgcaaagcaaggttgctgttagacgcaggcgctcgcttaacggtgaatgcattagcgtttattccacagttcaccgcatgggcagatgcaggcatgttaaccctcgtcgaagggccatttgatgaaagccttctcgacacctgctggctggcgattgcagcgacggatgatgacacgcttaaccagcgcgtcagcgaagccgctgaagctcgtcgcatcttctgtaacgtagtcgatgcgccgaaagccgccagctttattatgccgtcgattattgaccgctcaccgctaatggtagcggtctcctctggcggcacctctccggttctggcgcgcctgttgcgcgaaaaactcgaatcactgctgccgttgcatctgggccaggtggcgaaatatgccgggcaattacgcgggcgagtgaaacaacagttcaccacgatgagtgagcgtcgccgtttctgggagaaattgttcgttaacgaccgcctagcgcagtcgctggcaaacaacgatcagaaagccattactgaaacgaccgaacagttaatcaacgaaccgctcgaccatcgcggtgaagtggtgctggttggtgcaggtccgggcgatgccgggctgctgacgctgaaaggactgcaacaaattcagcaggcagatgtggtggtctacgaccgtctggtttctgacgatattatgaatctggtacgccgcgatgctgatcgcgttttcgtcggcaaacgcgcgggataccactgtgtaccgcaggaagagattaaccagatcctgctgcgggaagcgcaaaaaggcaaacgcgtggtgcggctgaaaggtggcgatccgtttatttttggccgtggtggcgaagagctggaaacactgtgcaacgcgggtattccgttctcggtggttccgggtattaccgcagcttctggttgctctgcctattcgggtattccactcacgcatcgcgattatgcccagagcgtacgcttaattaccggacacttaaaaaccggtggcgagctggactgggaaaacctggcggcagaaaaacagacgctggtgttctatatggggttgaatcaggccgcgactattcagcaaaagctgattgaacacggtatgcctggcgaaatgccggtggcaattgtcgaaaacggaacggcagtcacgcagcgcgtgattgacggtacgctcacgcaactcggtgaacttgctcagcaaatgaacagtccatcgctaattattattggtcgggttgttggcctgcgcgataaactgaactggttctccaaccattaa

SEQ ID NO: 460024 - DNA, 807 bp, Shigella boydii
atgtttacagacactattaataagtgtgcggctaacgctgcgcgcattgcacgcctgtcggcaaataacccgctcggcttttgggtcagctccgccatggcgggcgcgtatgtgggtcttgggatcatcttgattttcacgctcggtaatttgctcgacccgtccgtacgtccgctggtgatgggcgcgacctttggtatcgccttaacgctggtgattatcgccggttctgaactgttcaccggacacaccatgttcctcacctttggggtaaaagcgggcagcatcagccacgggcaaatgtgggcaatcctgccgcaaacctggctgggtaacctggtcggttccgtcttcgttgccatgctctatagctggggcggcggtagcctgctgccggtagataccagcatcgttcactccgtcgcgctggctaaaaccactgcaccggcaatggtactcttcttcaaaggtgcattgtgtaactggctggtttgcctggcaatctggatggcgctgcgcactgaaggggcggcgaaatttatcgctatctggtggtgtctgctggcatttatcgcgtccggctacgagcactctatcgctaacatgacgctgttcgcgctctcctggttcggcaaccacagcgaagcctacacgctggcgggtattggtcataacctgctgtgggtgacgctgggtaatactttatcaggtgccgtattcatgggattgggttattggtatgctacgccgaaatcgaatcgtccggttgcggacaaatttaatcaaactgaaacggctgccggttaa

SEQ ID NO: 460025 - DNA, 327 bp, Shigella boydii
atgagccagtggaaagacatctgcaaaatcgatgacatcctgcctgaaaccggcgtctgcgcgctgttaggcgacgagcaggtcgcgattttccgcccgtatcacagcgaccaggtgtttgcgatcagcaacatcgatccgttcttcgagtccagcgtgctgtcacgcgggctgattgcggaacaccagggcgagctgtgggtcgccagcccgctgaaaaaacagcgttttcgcttaagtgatggcttgtgcatggaagacgaacagttttccgtcaaacattacgaagcacgagtgaaagacggcgtggtgcagctgcgcggttaa

SEQ ID NO: 460026 - DNA, 2544 bp, Shigella boydii
atgagcaaagtcagactcgcaattatcggtaacggtatggtcggccatcgctttatcgaagatcttcttgataaatctgatgcggccaactttgatattaccgttttctgtgaagaaccgcgcatcgcttatgaccgcgtacacctctcgtcttacttctctcaccacaccgccgaagagctgtcgctggtgcgcgaaggcttctacgagaaacacggcatcaaagttctggtcggcgaacgcgctatcaccatcaaccgtcaggagaaggtgattcactccagcgccggacgtaccgttttttatgacaagctgatcatggcaaccggttcctacccgtggatcccaccaatcaaaggttctgatactcaggactgctttgtctatcgcaccattgaagacctcaacgccattgaatcctgcgcccgtcgcagcaaacgcggtgccgttgttggtggcggcctgttaggtctggaagccgctggcgcgctgaaaaacttaggtattgaaacccacgttatcgaatttgcccctatgctgatggcggaacagcttgatcagatgggtggcgagcagctgcgtcgcaaaatcgaaagtatgggcgtgcgcgttcacaccagcaaaaacacccttgagattgtgcaggaaggtgtcgaagcacgtaaaaccatgcgttttgccgacggcagcgaactggaagtcgactttatcgtcttctctaccggtatccgtccgcgcgataagctggcaacccagtgtggtctggacgttgctccgcgtgggggtatcgtcattaatgattcctgccaaacttccgatccggatatctacgctatcggtgaatgcgcaagctggaacaaccgtgtatttggtctggtagcacctggctacaaaatggcgcaggtcgccgttgaccatattctcggtagcgaaaacgcctttgaaggtgctgaccttagcgccaagctgaaactgctgggcgtggacgtaggcggtattggtgatgctcatggtcgcacgcctggcgcacgtagctacgtttacctcgacgaaagcaaagagatctacaaacgcctgatcgtcagcgaagacaacaaaaccctgctcggtgcggtactggtgggcgataccagcgactacggtaacttgctgcaactggtgctgaatgctatcgagctgccggaaaacccggattctctgattctgccggcgcactcgggtagcggtaagccgtctatcggtgttgataaactgccggacagcgcgcaaatctgctcctgcttcgacgtcactaaaggtgatctgattgctgccatcaacaaaggctgccacacagttgcggcgctgaaagctgaaaccaaagcgggtactggctgcggtggctgtatcccgctggtcactcaggtactgaacgcggaactggcgaaacagggcatcgaagttaacaacaacctgtgcgaacactttgcttattcgcgtcaggaactgttccatttgatccgcgttgaaggcattaaaaccttcgaagaactgctggcgaaacacggcaaaggctacggttgtgaagtttgtaaaccgaccgtcggttcgctgctggcctcctgctggaacgaatacattctgaagccagaacatactccgctgcaagattctaacgacaacttcctcgctaacatccagaaagacgggacctactcggtgatcccgcgttctccgggcggtgaaatcaccccggaagggctgatggcagtgggtcgtatcgcgcgtgaatttaatctctacaccaaaatcaccggttcccagcgcctggcgatgtttggcgcacagaaagacgatctgccagagatctggcgtcagctgattgaagccggcttcgaaaccggtcatgcctatgcgaaagcactgcgtatggcgaaaacctgcgtgggtagcacctggtgccgctacggcgttggcgacagcgtcggcctcggcgtggaactggaaaaccgctacaaaggcatccgtacgccgcacaaaatgaagttcggtgtctccggctgtacccgtgaatgttcagaagctcagggtaaagacgtgggtattatcgccactgaaaaaggctggaacctgtatgtttgcggcaacggcggcatgaaaccgcgtcatgcggatctgctggcagcggatatcgatcgcgaaacgctgatcaaatatctcgaccgcttcatgatgttctacatccgtaccgccgacaaactgacgcgtaccgcgccgtggttagaaaacctcgaaggcggcatcgattacctgaaagcggtgatcattgacgacaaactggggctgaacgctcatctagaagaagagatggcgcgcctgcgtgaagcggtagtgtgtgagtggactgaaacggtcaatacaccgtccgcgcagactcgcttcaaacacttcatcaacagcgacaagcgtgacccgaacgtgcagatggtgccagagcgcgaacagcaccgtccggcaacgccgtatgaacgtatcccggtaactctggtggaggacaacgcatga

SEQ ID NO: 460027 - DNA, 1182 bp, Shigella boydii
atgactaacagcaatcgcatcaagctcacatggattagctttctctcctacgcactgactggtgcgttggttattgtcaccgggatggtgatgggaaatatcgccgattatttcaatctgcctgtttccagtatgagtaacaccttcaccttcctcaacgccggcattttaatctctatcttcctcaacgcctggctgatggaaatcgtcccgttgaaaacgcagttacgttttggctttctcctgatggtgctggcggttgccggtttgatgttcagccacagcctggcgctgttctcgacggcgatgttcattctcggggtggtcagcggcattactatgtcgattggtacattcctgataacacaaatgcatgaagggcgtcagcgcggttcccgcctgttatttactgactccttcttcagtatggctgggatgattttcccaatgatcgccgcgtttctactggcgcacagcattgagtggtactgggtttatgcctgcatcgggctggtgtatgtcgctatttttattctgaccttcggctgtgagttcccagcactgggcaaacatgcaccaaaaacggatgctccggtagagaaagaaaagtgggggatcggcgtactgtttctctctgttgcggcgctgtgctacatcctcggtcagttaggttttatctcctgggtgcctgagtatgccaaaggcctgggcatgagcctgaacgacgcgggcacgctggtgagtaacttctggatgtcatacatggtcggcatgtgggcgttcagctttattcttcgcttctttgatttgcaacgcattctgaccgtactggctggtctggctgcgattctgatgtacgtctttaacaccggaacaccagcacatatggcgtggtcaattctcgctctgggcttcttctccagcgcgatctataccaccatcatcaccctgggttcacagcagaccaaagtaccgtcgccaaaactggttaactttgtcctgacctgcggaaccatcggtactatgttgacctttgtggttaccggcccgattgttgaacatagcggtccgcaggcggcactgcttacagcaaacggtctgtacgctgtcgtctttgtgatgtgcttcctgttaggtttcgtcagccgtcaccgtcagcataacaccctgacctctcattaa

SEQ ID NO: 460028 - DNA, 573 bp, Shigella boydii
atgttcaaatcgaccctggcggcgatggctgctgttttcgctctttctgctctttctcccgcagcaatggcagcgaaaggggacccgcacgtattgttgacaacctcagctggtaacatcgaactggagctggataaacaaaaagcgccagtgtctgtgcaaaactttgtcgattatgtgaacagcggtttttataacaacactacctttcaccgcgtcattcctggctttatgattcagggcggcggtttcaccgagcagatgcagcagaaaaaaccaaacccgccaatcaaaaatgaagccgataacggcctgcgcaacacgcgtggcaccatcgcgatggcgcgtaccgctgacaaagacagcgccaccagccagttctttatcaacgttgccgataacgccttccttgaccatggtcagcgtgatttcggttacgcggtatttggtaaagtggtgaaaggcatggacgtggccgataagatttcccaggtgccgactcatgacgttggtccgtaccagaatgtgccgtcaaaaccggtagttatcctttccgctaaagtcctgccgtaa

SEQ ID NO: 460029 - DNA, 168 bp, Shigella boydii
gtgaagaaactcaccgataagcaaaagtcccgtctctgggagcttcagcgtaatcgtaatttccaggccagtcgccgtcttgaaggcgtcgagatgcctttagtcactcttactgtcgcagaggctttagcgcgccttgtagagctgaggaggcactatgagcgataa

SEQ ID NO: 460030 - DNA, 603 bp, Shigella boydii
atgagcgataaattcggcgaagggcgcgatccgtatctttatccaggccttgatatcatgcgtaaccggctgaacatccgccagcaacaacggctggaacaggccgcttacgaaatgacggcgctgcgtgctgcgaccattgagcttggtccgctggtgcgcggtttaccgcatttgcgaactatccatcgccagctgtatcaggatattttcgactgggcagggcaactgcgtgaagttgatatttatcagggcgatacgccgttctgccactttgcttatatagaaaaagagggcaatgccctgatgcaggatctggaggaagaaggttatctggttggcctggagaaaacgaagttcgtcgagcggctggcgcattactattgtgaaatcaacgtgctgcatcccttccgggtgggaagtggtctggcacagcggatcttcttcgagcaactggcgattcatgccggatatcaactgagctggcagggtatcgaaaaagaggcctggaatcaggcaaatcagagtggggcaatgggggatctcaccgcactgcagatgatatttagcaaagtggtaagcgaagccggggaatctgagtaa

SEQ ID NO: 460031 - DNA, 564 bp, Shigella boydii
atgatcctgcttattgataactacgattcttttacctggaacctctaccagtacttttgtgaactgggggcggatgtgctggttaagcgcaacgatgcgttgacgttggcggatatcgacgcccttaaaccacaaaaaattgtcatctcacccggcccctgtacgccagatgaagccgggatctcccttgacgttattcgccactatgccgggcgcttgccgattcttggcgtctgcctcggtcatcaggcaatggcgcaggcatttggcggtaaagttgtgcgcgccgcaaaggtcatgcacggcaaaacctcgccgattacacataacggtgagggcgtatttcgggggctggcaaatccacttaccgtgacacgctaccattcgctggtggtggaacctggctcattaccagcgtgctttgacgtgacggcctggagcgaaacccgcgagattatggggattcgccatcgccagtgggatctggaaggtgtgcagttccatccagaaagtattcttagcgaacaaggacatcaactgctggctaatttcctgcatctctga

SEQ ID NO: 460032 - DNA, 1221 bp, Shigella boydii
atggcaattgaacaaacagcaattacacgcgcgactttcgatgaaatgatcctgccgatttatgctccggcagagtttattccggtaaaaggtcagggcagccgaatctgggatcagcaaggcaaggagtatgtcgatttcgcgggtggcattgcagttacggcgttgggccattgccatcctgcgctggtgaacgcgttaaaaacccagggcgaaactctgtggcatatcagtaacgttttcaccaatgaaccggcgctgcgtcttgggcgcaaactgattgaggcgacgtttgccgaacgcgtggtgtttatgaactccggcacggaagctaacgaaaccgcctttaaactggcacgccattacgcctgtgtgcgtcatagcccgttcaaaaccaaaattattgccttccataacgcttttcatggtcgctcgctgtttaccgtttcggtgggtgggcagccaaaatattccgacggctttgggccgaaaccggcagacatcatccacgttccctttaacgatctccatgcagtgaaagcggtgatggatgatcacacctgtgcggtggtggttgagccgatccagggcgagggcggtgtgacggcatcgacgccagagtttttgcagggcttgcgcgagctgtgcgatcaacatcaggcattattggtgtttgatgaagtgcagtgcgggatggggcggactggcgatttgtttgcttacatgtactacggtgtgacgccggatattctgacttctgcgaaagcgttaggcggcggcttcccgattagcgccatgctgaccacggcggaaattgcttctgcgtttcatcctggttctcacggttccacctacggcggtaatcctctggcctgtgcagtagcgggcgcggcgtttgatatcatcaatacccctgaagtgctggaaggcattcaggcgaaacgccagagttttgttgaccatttgcagaagatcgatcagcagtacgatgtgtttagcgatattcgcggtatggggctgttaattggcgcggagctgaaaccacactacaaaggtcgggcgcgtgatttcctgtatgcgggtgcagaggttggcgtaatggtgctgaatgccggaccggatgtgatgcgtttagcaccgtcgctggtggtggaagatgcggatatcgatgaagggatgcaacgtttcgcccacgcggtggcgaaggtggttggggcgtaa

SEQ ID NO: 460033 - DNA, 2091 bp, Shigella boydii
atgtggcgcagactgatttatcaccccgatatcaactatgcacttcgacaaacgctggtgctatgtttgcccgtggccgttgggttaatgcttggcgaattacgattcggtctgctcttctctctcgttcctgcctgttgcaatattgcgggccttgatacgcctcataaacgttttttcaaacgcttaatcattggtgcgtcgctgtttgccacctgtagcttactgacacagctgctactggcaaaagatgttcccctgccctttttgctgaccggattaacgctggtacttggcgtcactgctgagttggggccattgcacgcaaaattgcttcccgcatcgctgctggcagccatttttaccctcagtctggcgggatacatgccggtctgggaaccgttgctcatctatgcgttgggcactctctggtacggattgtttaactggttttggttctggatctggcgcgaacaaccgctgcgcgagtcactaagtctgctgtaccgtgaactggcagattattgtgaagccaaatacagcctgcttacccagcacaccgaccctgaaaaagcgctgccgccgctgctggtgcgccagcaaaaagcggtcgatctaattacccagtgctatcagcaaatgcatatgctttccgcgcaaaataatactgactacaagcggatgctgcgtattttccaggaggcgctggatttacaggaacatatttcggtcagtttgcatcagccggaagaggtgcaaaagctggtcgagcgtagccatgcggaagaagttatccgctggaatgcgcaaaccgtcgccgctcgcctgcgcgtgctggctgatgacattctttaccatcgcctgccaacgcgttttacgatggaaaagcaaattggcgcactggaaaaaatcgcccgccagcatccggataatccggttgggcaattctgctactggcatttcagccgcatcgcccgcgtgctgcgcacccaaaaaccgctctatgcccgtgacttactggccgataaacagcggcgaatgccattacttccggcgctgaaaagttatctgtcactaaagtctccggcgctacgcaatgccggacgactcagtgtgatgttaagcgttgccagcctgatgggcaccgcgctgcatctgccgaagtcgtactggatcctgatgacggtattgctggtgacacaaaatggctatggcgcaacccgtctgaggattgtgaatcgctccgtgggaaccgtggtcgggttaatcattgcgggcgtggcgctgcactttaaaattcccgaaggttacaccctgacgttgatgctgattaccaccctcgccagctacctgatattgcgcaaaaactacggctgggcgacggtcggttttactattaccgcagtgtataccctgcaactattgtggttgaacggcgagcaatacatccttccgcgtcttatcgataccattattggttgtttaattgctttcggcggtactgtctggctgtggccgcagtggcagagcgggttattgcgtaaaaacgcccatgacgctttagaagcctatcaggaagcgattcgcttgattcttagcgaggatccgcaacctacgccactggcctggcagcgaatgcgggtaaatcaggcacataacactctgtataactcattgaatcaggcgatgcaggaaccggcgtttaacagccattatctggcagatatgaaactgtgggtaacgcacagccagtttattgttgagcatattaatgccatgaccacgctggcgcgggaacaccgggcattgccacctgaactggcacaagagtatttacagtcttgtgaaatcgccattcagcgttgtcagcagcgactggagtatgacgaaccgggtagttctggcgatgccaatatcatggatgcgccggagatgcagccgcacgaaggcgcggcaggtacgctggagcagcatttacagcgggttattggtcatctgaacaccatgcacaccatttcgtcgatggcatggcgtcagcgaccgcatcacgggatttggctgagtcgcaagttgcgggattcgaaggcgtaa

SEQ ID NO: 460034 - DNA, 633 bp, Shigella boydii
atggtgcttggcaaaccgcaaacagacccgactctcgaatggttcttgtctcattgccacattcataagtacccatccaagagcacgcttattcaccagggtgaaaaagcggaaacgctgtactacatcgttaaaggctctgtggcagtgctgatcaaagacgaagagggtaaagaaatgatcctctcctatctgaatcagggtgattttattggcgaactgggcctgtttgaagagggccaggaacgtagcgcatgggtacgtgcgaaaaccgcctgtgaagtggctgaaatttcgtacaaaaaatttcgccaattgattcaggtaaacccggacattctgatgcgtctgtctgcacagatggcgcgtcgtctgcaagtcacttcagagaaagtgggcaacctggcgttcctcgacgtgacgggccgcattgcacagactctgctgaatctggcaaaacaaccagacgctatgactcacccggacggtatgcaaatcaaaattacccgtcaggaaatcggtcagattgtcggctgttctcgtgaaaccgtgggacgcattctgaagatgcttgaagatcagaacctgatctccgcacacggtaaaaccatcgtcgtttacggcactcgttaa

SEQ ID NO: 460035 - DNA, 840 bp, Shigella boydii
gtggatacggaattgttaaaaactttcctggaagttagccgaacgcgtcactttggtcgagcggctgaatcgctctatctgacccagtcagcagtgagctttcgaatcagacaactggaaaatcaactgggtgtgaaccttttcacccgccacagaaacaatatccgtttaaccgctgccggtgaaaaactactgccttatgcagaaatgctcatgagcacctggcaggccgcccgcaaggaggtggcgcatacctcacgacataacgagttttctatcggtgccagcgcctcattgtgggaatgtatgcttaatcagtggctgggacgtttgtatcaaaatcaggatgcccatacaggcttacagttcgaagcgcgaattgcccaacggcagtctctggtaaaacagctgcatgaacgccagcttgatcttcttattaccactgaagcgcccaaaatggacgaatttagtagtcagttgctgggatatttcactttagcgctttataccagtgccccttcaaaactaaagggagatcttaattatctgcgacttgagtgggggccagattttcaacagcatgaggcaggtttgatcggtgctgacgaagtgcccattctgacaaccagttctgctgaactggcacagcaacagattgcgatgcttaatggttgcacctggctacccgtcagctgggcgcgtaaaaaaggcggcctgcataccgttgtcgatagcacaacactttcacggccgctttatgccatatggctgcaaaatagcgataaaaatgcgttgattcgcgatcttttgaaaattaacgtgctggatgaagtgtattaa

SEQ ID NO: 460036 - DNA, 339 bp, Shigella boydii
atggcggaaagctttacgacgactaatcgatatttcgacaataaacattatccacgtggattctctcgtcatggtgatttcaccatcaaagaggcacaactgcttgagcgtcatggttatgccttcaatgagttggatcttggcaaacgcgagccggttaccgaggaagagaaactcttcgtagcagtatgccgtggcgaacgtgagccagtgacagaagcagaacgcgtgtggtccaagtatatgacgcgtattaagcgtccaaaacgttttcacaccctttccggcggtaaaccgcaggttgaaggtgctgaagactacaccgattctgacgattaa

SEQ ID NO: 460037 - DNA, 1521 bp, Shigella boydii
atgtcactgtcaattgttcatacccgcgcagccctgggagtaaatgcgcccccgatcactgttgaggtacatatcagtaaaggtctacccggcttaacgaaggtgggcttaccagaaacaacggtaaaagaagctcgcgatcgcgtgcgcagcgccattatcaatagcggatatgaatatccggcgaaaaaaatcaccatcaacctggctccagctgatctgccaaaagaagggggacgatatgatttacctatcgccattgcgttgctggcggcctcagaacagcttacagccaataagttagatgaatatggattagtcggagaactggcgcttacaggcgctctgcgtggcgttcccggcgcaatctccagtacaactgaagctattaagtcgggcagaaaaattatcgtcgcgaaagataacgaagatgaagtggagctaattaacggtgaaggatgcctgatagccgatcatctgcaagctgtctgtgcgtttctggaaggtaagcacgctctcgaacgcccgaaaccaactgatgcagtatcccgggcgctacaacatgatctcagtgatgttatcggtcaggaacaaggaaagcgagggctggaaattaccgccgctggcgggcacaaccttttactgattgggccgccgggaacaggtaaaacaatgctcgccagccgtattaatggcctgttaccagatttaagcaatgaagaggcactggagagtgctgcgatattaagtctggtaaatgctgaatcagtacaaaaacaatggcggcagcgcccgttccgctcacctcatcacagtgcatcgttaactgcgatggtaggcggtggcgcaattccagggcccggtgaaatttcgctggcgcataacggcgtgctttttcttgatgagttacctgaatttgaaaggcgtacactggatgccttgcgagagccgattgaatccgggcagatccatctttcacgcacgcgagcaaaaataacctatccagcccgtttccagcttgtcgcggcgatgaatcccagccctaccggacattatcagggaaaccataaccgctgcacaccagagcaaacgctgcgttatctcaaccgactctctggtccctttctcgaccgcttcgatctctcactggagatcccattaccgcctccccgtattttgagtaaagcggtagtgccgggagaaagcagcgccaccgttaaacaacgcgtaatggccgccagagagcgccaatttaagcggcagaataaactgaacgcctggctggatagtccggaaatacgccaattctgcaaacttgagagcgaagatgcgatgtggctggaagaaacgctgatccatctggggttatcgattcgtgcctggcagcggttattgaaagttgcacgaaccattgctgatattgatcagtttgacattatcacacgtcaacatttgcaggaggcagttagctatcgagcgattgaccgtttgctcatccatctgcagaaactactgacataa

SEQ ID NO: 460038 - DNA, 1647 bp, Shigella boydii
atgaatggcgcacagtgggtggtacatgcgttgcgggcacagggtgtgaacaccgttttcggttatccgggtggcgcaattatgccggtttacgatgcattgtatgacggcggcgtggagcacttgctgtgccgacatgagcagggtgcggcaatggcggctatcggttatgcccgtgctaccggcaaaactggcgtatgtatcgccacgtctggtccgggcgcaaccaacctgataaccgggcttgcggacgcactgttagattctatccctgttgttgccatcaccggtcaagtgtccgcaccgtttatcggcactgatgcatttcaggaagtggatgtcctgggattgtcgttagcctgtaccaagcacagctttctggtgcagtcgctggaagagttgccgcgcattatggctgaagcattcgacgttgccagctcaggtcgtcctggtccggttctggtcgatatcccaaaagatatccagctagccagcggtgacctggaaccgtggttcaccaccgttgaaaacgaagtgactttcccacatgccgaagttgagcaagcgcgccagatgctggcaaaagcgcaaaaaccgatgctgtacgttggtggtggcgtgggtatggcgcaggcagttcctgctttacgagaatttctcgctaccacaaaaatgcctgccacctgcacgctgaaagggctgggcgcagttgaagcagattatccgtactatctgggcatgctgggaatgcatggcaccaaagcggcgaacttcgcggtgcaggagtgcgacttgctgatcgccgtgggtgcacgttttgatgaccgggtgaccggcaaactgaacaccttcgcaccacacgccagcgttatccatatggatatcgacccggcagaaatgaacaagctgcgtcaggcacatgtggcattacaaggtgatttaaatgctctgttaccagaattacagcagccgttaaatatcaatgactggcagcaatactgcgcgcagctgcgtgatgaacatgcctggcgttacgaccatcccggcgacgcaatctacgcgccgttgttgttaaaacaactgtcggatcgtaaacctgcggattgcgtcgtgaccacagatgtggggcagcaccagatgtgggctgcgcaacacatcgcccacactcgcccggaaaatttcatcacctccagcggcttaggcactatgggttttggtttaccagcggcggttggcgcacaagtcgcgcgaccgaacgataccgtcgtctgtatctccggtgacggctctttcatgatgaatgtgcaagagctgggcaccgtaaaacgcaagcagttaccgttgaaaatcgtcttactcgataaccaacggttagggatggttcgacaatggcagcaactgttttttcaggaacgatacagcgaaaccacccttactgataaccccgatttcctcatgttagccagcgccttcggcatccctggccaacacatcacccgtaaagaccaggttgaagcggcactcgacaccatgctgaacagtgatgggccatacctgcttcatgtctcaatcgacgaacttgagaacgtctggccgctggtgccgcctggcgccagtaattcagaaatgttggagaaattatcatga

SEQ ID NO: 460039 - DNA, 264 bp, Shigella boydii
atgatgcaacatcaggtcaatgtatcggctcgcttcaatccggaaaccttagaacgtgttttacgcgtggtgcgtcatcgtggtttccacgtctgctcaatgaatatggccgccgccagcgatgcacaaaatataaatatcgaattgaccgttgccagcccacggtcggtcgacttactgtttagtcagttaaataaactggtggacgtcgcacacgttgccatctgccagagcacaaccacatcacaacaaatccgcgcctga

SEQ ID NO: 460040 - DNA, 930 bp, Shigella boydii
atgaccacgaagaaagctgattacatttggttcaatggggagatggttcgctgggaagacgcgaaggtgcatgtgatgtcgcacgcgctgcactatggcacttcggtttttgaaggcatccgttgctacgactcgcacaaaggaccggttgtattccgccatcgtgagcatatgcagcgtctgcatgactccgccaaaatctatcgcttcccggtttcgcagagcattgatgagctgatggaagcttgtcgtgacgtgatccgcaaaaataatctcaccagcgcctatatccgtccgctgatcttcgtcggtgatgttggcatgggagtaaacccgccagcgggatactcaaccgacgtgattatcgctgctttcccgtggggagcgtatttgggcgcagaagcgctggagcaggggatcgatgcgatggtttcctcctggaaccgcgcagcaccaaacaccatcccgacggcggcaaaagccggtggtaactacctctcttccctgctggtgggtagcgaagcgcgccgccacggttatcaggaaggtatcgcgctggatgtgaacggttacatctctgaaggcgcaggtgaaaacctgtttgaagtgaaagacggcgtgctgttcaccccaccgtttacctcatccgcgctgccgggtattacccgtgatgccatcatcaaactggcgaaagagctgggaattgaagtgcgtgagcaggtgctgtcgcgcgaatccctgtacctggcggatgaagtgtttatgtccggtactgcggcagaaatcacgccagtgcgcagcgtagacggtattcaggttggcgaaggccgttgtggcccggttaccaaacgcattcagcaagccttcttcggcctcttcactggcgaaaccgaagataaatggggctggttagatcaagttaatcaataa

SEQ ID NO: 460041 - DNA, 1851 bp, Shigella boydii
atgcctaagtaccgttccgccaccaccactcatggtcgtaatatggcgggtgctcgtgcgctgtggcgcgccaccggaatgaccgacgccgattttggcaagccgattatcgcggttgtgaactcgttcacccaatttgtaccgggtcacgtccatctgcgcgatctcggtaaactggtcgccgaacaaattgaagcggctggcggcgttgccaaagagttcaacaccattgcggtggatgatgggattgccatgggccacggggggatgctttattcacttccatctcgcgaactgatcgctgattccgttgagtatatggtcaacgcccactgcgccgacgccatggtctgcatctctaactgcgacaaaatcaccccggggatgctgatggcttccctgcgcctgaatattccggtgatctttgtttccggcggcccgatggaggccgggaaaaccaaactgtccgatcagataatcaaactcgatctggttgatgcgatgatccagggcgcagacccgaaagtttctgactcccagagcgatcaggttgaacgttccgcctgcccaacctgcggttcctgctccgggatgtttaccgctaactcaatgaactgcctgaccgaagcgctgggtttgtcgcagccaggcaacggctcgctgctggcaacccacgcggaccgtaagcagctgttccttaatgctggtaaacgcattgttgaattgaccaaacgttattacgagcaaaacgacgaaagtgcactgccgcgtaatatcgccagtaaggcggcgtttgaaaacgccatgacgctggatatcgcgatgggtggatcgactaacaccgtacttcacctgctggcggcggcgcaggaagcggaaatcgacttcaccatgagtgatatcgataagctttcccgcaaggttccacagctgtgtaaagttgcgccgagcacccagaaataccatatggaagatgttcaccgtgctggtggtgttatcggtattctcggcgaactggatcgcgcggggttactgaaccgtgatgtgaaaaacgtgctcggcctgacgttgccgcaaacgctggagcaatacgacgttatgctgacccaggatgacgcggtaaaaaatatgttccgcgccggccctgcgggtatccgtaccacccaggcattctcgcaagattgccgttgggatacgctggacgacgatcgcgcaaacggctgtatccgctcgctggaacacgcctacagcaaagacggcggcctggcggtgctctacggtaattttgctgaaaacggctgcatcgtgaaaaccgcgggcgtcgatgacagcatcctcaaattcaccggcccggcaaaagtgtacgaaagccaggacgacgcggtagaagcgatcctcggtggcaaagttgtcgcgggcgatgtggtggtgatccgctatgaaggcccgaaaggcggccctggcatgcaggaaatgctctacccaaccagcttcctgaaatcaatgggtctcggtaaagcctgtgcgctgatcaccgacggtcgtttctctggcggcacctctggtctttccatcggccacgtctcaccggaagcggcaagcggcggcagcattggtctgattgaagatggtgacctgatcgctatcgacatcccgaaccgtggcattcagttacaggtaagcgatgccgaactggcggcgcgtcgtgaagcgcaggaagctcggggtgacaaagcctggacgccgaaaaaccgtgaacgtcaggtttcctttgccctgcgcgcctacgccagcctggcaaccagcgccgacaaaggtgcggtgcgcgataaatcgaaactggggggttaa

SEQ ID NO: 460042 - DNA, 1545 bp, Shigella boydii
atggctgactcgcaacccctgtccggtgctccggaaggtgccgaatatttaagagcagtgctgcgcgcgccggtttacgaggcagcgcaggttacgccgctacaaaaaatggaaaaactgtcgtcgcgtcttgataacgtcattctggtgaagcgcgaagatcgccagccagtgcacagctttaagctgcgcggcgcatacgccatgatggcgggcctgacggaagaacaaaaagcgcacggcgtgatcactgcttctgcgggtaaccacgcgcagggcgtcgcgttttcttctgcgcggttaggcgtgaaggccctgatcgttatgccaaccgccaccgccgatatcaaagtcgatgcggtacgtggattcggcggcgaagtgctgcttcatggcgcgaactttgacgaagcgaaagctaaagcgatcgaactgtcacagcagcaggggttcacctgggtgccgccgttcgaccatccgatggtgattgccgggcaaggcacgctggcgctggaactgctccagcaggacgcccatctcgaccgcgtatttgtgccagtcggcggcggcggtctggcggcgggcgttgcggtgctgatcaaacaactgatgccacaaatcaaagtgatcgccgtagaagcggaagactccgcctgcctgaaagcagcgctggatgcgggtcatccggttgatctgccgcgcgtagggctatttgctgaaggcgtagcggtaaaacgcatcggtgacgaaaccttccgtttatgccaggagtatctcgacgacatcatcaccgtcgatagtgatgcgatctgtgcggcgatgaaggatttattcgaagatgtgcgcgcggtggcggaaccctctggcgcgctggcgctggcgggaatgaaaaaatatatcgcccagcacaacattcgcggcgaacggctggcgcatattctttccggtgccaacgtgaacttccacggcctgcgctacgtctcggaacgctgcgaactgggcgaacagcgtgaagcgttgttggcggtgaccattccggaagaaaaaggcagcttcctcaaattctgccaactgcttggcgggcgagcggtcaccgagttcaactaccgttttgccgatgccaaaaacgcctgcatctttgtcggcgtgcgcctgagccgcggcctcgaagagcgcaaagaaattttgcagatgctcaacgacggcggctacagcgtggtggatctctccgacgacgaaatggcgaagttgcatgtgcgctatatggtcggcgggcgtccgtcacatccgttgcaggaacgcctctacagcttcgaattcccggaatcaccgggcgcgctgctgcgcttcctcaacacgctgggtacgcactggaacatttctttgttccactatcgcagccatggcaccgactacgggcgcgtactggcggcgttcgaactcggcgaccatgaaccggatttcgaaacccggctaaatgagctgggctacgattgccacgacgaaaccaataatccggcgttcaggttctttttggcgggttaa

SEQ ID NO: 460043 - DNA, 891 bp, Shigella boydii
ttggatttacgcgatctgaaaaccttcctgcatctggcggaaagccgccattttggccgcagcgcgcgggcgatgcacgttagcccatccacgctctcacggcagattcagcgcctggaagaagatcttggtcagccgctatttgtgcgcgataaccgcacggtgacgctgactgaagcgggcgaagagctgcgcgttttcgcccagcaaacgctgttgcagtatcagcagttgcgccacaccatcgatcagcaagggccgtcgctctctggcgaattacatatcttctgctcggtgaccgctgcctacagccatctgccaccgattctcgaccgcttccgcgcggaacacccgtcggtggagatcaaactaaccactggtgatgcggcagatgcgatggaaaaggtagtcactggcgaagcggatctggcgattgccgggaaaccggagactctgcccggcgcagtggcgttttcgatgctggagaatctggcagtagtgctgattgcgcccgcgctgccctgcccggtgcgtaaccaggtttcgtcagagaagccggactggtctacagtgccgtttatcatggccgatcagggaccggtacgccgccgcattgaactgtggtttcgacgcaataaaatcagcaacccgatgatttacgccacggttggcgggcatgaagcgatggtatcgatggtggcgctcggctgtggcgtggcgctgttgccggaagtagtgctggaaaacagccccgaaccggtgcgtaaccgcgtgatgattttagagcgcagcgatgaaaaaacgccgtttgaactgggcgtttgtgcgcagaaaaagcggctgcatgagccgctgattgaggcgttctggaagattttgccgaaccattaa

SEQ ID NO: 460044 - DNA, 1476 bp, Shigella boydii
atggctaactacttcaatacactgaacctgcgccagcagctggcacagctgggcaaatgtcgctttatggggcgcgacgaattcgccgacggcgcgagctaccttcagggtaaaaaagtggttatcgtcggctgtggcgcacaggggctgaaccagggcctgaacatgcgtgattctggtctcgatatctcctacgctctgcgtaaagaagcgattgccgagaagcgcgcatcctggcgtaaagcgaccgaaaacggttttaaagtgggcacttacgaagaactgatcccgcaggcggatctggtggttaacctgacgccagacaagcagcactccgacgtagtgcgcaccgtacagccactgatgaaagacggcgcggcgctgggttactcgcacggtttcaacatcgtcgaagtgggcgagcagatccgtaaagacatcaccgtagtcatggttgcgccgaaatgccctggcaccgaagtgcgtgaagagtacaaacgtggattcggcgtaccgacgctgattgccgttcacccggaaaacgatccgaaaggcgaaggcatggcgatcgctaaagcatgggcggcagcaaccggtggtcaccgtgcgggcgtgctggaatcgtccttcgttgcggaagtgaaatctgacctgatgggtgagcaaaccatcctgtgcggtatgttgcaggctggctcgctgctgtgcttcgacaagctggtggaagagggcaccgatccggcatacgcagaaaaactaattcagttcggttgggaaaccatcaccgaagcgctgaagcagggcggcatcaccctgatgatggaccgtctctctaacccggcgaaactgcgtgcttacgcgctgtctgaacagctgaaagagatcatggcacccctgttccagaaacatatggacgacatcatctccggcgaattctcctccggtatgatggcggactgggccaacgatgataagaaactgctgacctggcgtgaagagaccggcaaaaccgccttcgaaaccgcgccgcagtatgaaggcaaaatcggcgagcaggagtacttcgataaaggcgtactgatgatcgcgatggtgaaagcgggcgttgagctggcgtttgaaaccatggtcgattccggcatcattgaagagtctgcatattatgaatcactgcacgagctgccgctgattgccaacaccatcgcccgtaagcgtctgtacgaaatgaacgtggttatctctgataccgctgagtacggtaactatctgttctcttacgcttgtgtgccgttgctgaaaccgtttatggcagagctgcaaccgggcgatctgggtaaagctattccggaaggtgcggtagataacgcgcaactgcgtgatgtgaacgaagcgattcgctgccatgcgattgagcaggtaggtaagaaactgcgcggctatatgacggatatgaaacgtattgcagttgcgggttaa

SEQ ID NO: 460045 - DNA, 282 bp, Shigella boydii
atggcaaaaacagcagcagcactgcatatccttgtaaaagaagagaaactggctctggatcttctcgagcagattaagaacggtgccgatttcggcaagctggcgaagaaacactccatttgcccatcaggcaaacgcggcggtgatttaggtgaattccgccagggtcagatggttccggcgttcgataaagttgtgttctcttgtccggtactggagccgaccggcccgctgcacacccagttcggttaccacatcattaaggtgctgtaccgtaactaa

SEQ ID NO: 460046 - DNA, 393 bp, Shigella boydii
atgagaaccttattagcaatattattgtttccgctgctggtgcaagccgccggggaggggatgtggcaggcaagtagtgtaggaattacgctaaatcatcgcggtgagtcgatgtcgtctgcgcctctttctacgcgacaacctgcttcaggattgatgacgctggtagcgtggcgttatcagcttatcggcccgacaccttcaggactgcgggttcgcttgtgttcgcaatctcgttgtgtcgaattagaggggcagagcggaaccaccgtggccttttccggtatagcggcagcagaaccgttgcgatttatctgggaagtgccaggcggtgggcggttaattccaccgctaaaggtacaacgtaatgaagtgattgtgaattatcgctga

SEQ ID NO: 460047 - DNA, 1053 bp, Shigella boydii
atggcagagaataataccgttgtcgaagcgacgtggaacgatgtacaactggaagattctctgggaatggaagtgggttatcgactgatcccgatggtcgatttccagcaggatggtgagttgttgggccgtatacgcagtatccgcaagaaatttgcccaggagatgggatttctgccgccagtggtgcacattcgcgacaatatggatctgcaacctgcccgctatcgcattttgatgaaaggcgtggagattggcagtggtgatgcttatccggggcgctggttggcgattaaccctggaaccgctgccgggacgttacctggtgaggcgaccgtcgatccggcatttggcctgaatgctatctggattgaaagtgcgctaaaagaacaggcgcagattcaggggtacacagtggttgaggccagcacggtggtagcaacgcatcttaaccacctcattagccagcatgccgcagagctgtttggtcgtcaggaggcgcaacagctgttggatcgcgtcgcccaggagatgccaaagctgacggaagatctcgttcctggcgtcgtcacgctcaccacactgcataaagtgctgcaaaatctcctcgatgaaaaagtaccgattcgcgatatgcgcaccattctcgaaacgctggcggaacatgcgcccatccaaagcgatccacatgaattaaccgccgtcgtgcgcgtggcgttgggacgggcgattacccagcagtggtttcctggcaaagatgaagtccatgttattggcctcgatacaccgctggaacgtttgttactacaggcgctgcagggcggggaaggactggagccagggctggcggatcgtttactggcgcaaactcaggaagctctatcccgtcaggagatgctgggtgcgccgccagtattgttggtgaaccacgcgctgcgaccattattgtctcgcttcctgcgccgcagcttgccgcagttagtggtcctgtcgaatctggaactgtctgataaccgacatatccgcatgacggcgacaattggcggcaaataa

SEQ ID NO: 460048 - DNA, 1038 bp, Shigella boydii
atgagtaatctggccgcgatgctgcgcctgcccgcaaacctgaaatcgacacaatggcagatccttgccggaccgattttgatcctgttgatcttgtcgatgatggtgctgccactgcccgcattcatactcgacctgttgtttaccttcaatattgccttgtcgatcatggtgttgctggtggcgatgtttacccagcgcacgcttgagtttgctgcgtttccgaccattctgttgtttactacgttgttgcgtctggcacttaacgtggcttcaacccgtatcattttgatggaagggcataccggcgcggcggcggcagggaaggtggtcgaagcgttcggtcacttcctcgttggtggcaatttcgctataggtatcgtggtgtttgtcattctcgtgatcatcaactttatggtcattaccaaaggtgccgggcgtatcgcagaagtgggtgcgcgctttgttctcgatggtatgccgggtaagcagatggcgattgacgccgaccttaacgctggattgattggtgaagatgaggcgaaaaaacgccgctccgaagtgactcaggaagccgatttttacggctcaatggacggggcaagtaagtttgttcgcggcgatgccatcgccgggatcctcatcatggtcattaacgttgtcggcgggttgctggtcggcgtgctgcaacatggcatgagcatgggacacgcggcggaaagttatacgctattgaccattggcgacggtctggtggcacaaattccgacgctggtgatttctaccgccgcgggggtcatcgttacgcgtgtcagcaccgatcaggatgttggcgagcagatggtgaatcagcttttcagtaacccaagcgttatgttgttaagcgccgccgtgctcggtttactcggcttggtgcctggaatgccgaacctggtatttttgctgttcactgccggatctggggctggcctggtggatacgcggacgcgaacaaaaagcgcctgccgaacccaaaccggtaaaaatggcagagaataa

SEQ ID NO: 460049 - DNA, 1032 bp, Shigella boydii
gtgggcgtgtgtgttatctggttcggcggtgtgtcgctggcccgtcgattgtcgggcatgctctccgctgggctgcattttgatcacagtattatcaaagacccgaatctgatcctcgggcagattattctgctgatcagagaagccatgctggcgctgctaccgctgattagcggcgtggtgctggtagcgctcatttctccggtcatgctgggggggctggtatttagcggaaaatccttgcagccgaagttttccaaactcaacccgctaccgggcattaaacggatgttctcggcacagactggcgcggagttgcttaaagcaattttgaaaaccatcctggttggcagcgtgacgggtttttttctctggcatcactggccgcagatgatgcgcttactggccgagtctccgattaccgccatgggtaatgcgatggatttggtagggctatgcgcactgctggtggtgcttggtgtcattccaatggtgggatttgacgtctttttccaaatcttcagccacctgaaaaagctgcgaatgtcgcggcaggatattcgtgatgagttcaaacaaagcgaaggcgacccccatgttaaaggacggatccgtcagatgcagcgagctgccgcacggcgtcggatgatggccgatgtgccgaaagcggatgtcattgtcaataacccgacccactattcggtagcgttgcagtatgacgaaaacaaaatgagcgcaccgaaagtggtcgctaaaggtgcagggctggtcgcgctgcgcattcgtgaaattggcgctgaaaataacgtcccgacgcttgaagcgccgccgctggcgcgagcgctgtatcgacatgcggagattggtcaacaaatcccgggtcaactgtacgccgcggtggcggaagtgctggcctggatctggcaactgaaacgctggcgtctggctggtggacagcgccctgtacaacctactcatcttccggtgccggaagccctggattttattaacgagaaaccgacccatgagtaa

SEQ ID NO: 460050 - DNA, 645 bp, Shigella boydii
atgatgcaaccatcaatcaaacctgctgacgagcattcagctggcgatatcattgcgcgcatcggcagcctgacgcgtatgctgcgcgacagtttgcgggaactggggctggatcaggccattgccgaagcggcggaagccatccccgatgcgcgcgatcgtttgtactatgttgtgcagatgaccgcccaggctgcggagcgggcgctgaacagtgttgaggcgtcacaaccgcatcaggatcaaatggagaaatcagcaaaagcgttaacccaacgttgggatgactggtttgccgatccgattgaccttgccgacgcccgtgaactggtaacagatacacgacaatttctggcagatgtacccgcgcataccagctttactaacgcgcaactgctggaaatcatgatggcgcaggattttcaggatctcaccgggcaggttattaagcggatgatggatgtcattcaggagatcgaacgccagttgctgatggtgctgttggaaaacatcccggaacaggagtcgcgtccaaaacgtgaaaaccagagtttgcttaatggacctcaggtcgataccagcaaagccggtgtggtagccagtcaggatctggtggacgatttgttggatagtcttggattttga

SEQ ID NO: 460051 - DNA, 390 bp, Shigella boydii
atggcggataaagaacttaaatttttggttgtggatgacttttccaccatgcgacgcatagtgcgtaacctgctgaaagagctgggattcaataatgttgaggaagcggaagatggcgtcgacgctctcaataagttgcaggcaggcggttatggatttgttatctccgactggaacatgcccaatatggatggcctggaattgctgaaaacaattcgtgcggatggcgcgatgtcggcattgccagtgttaatggtgactgcagaagcgaagaaagagaacatcattgctgcggcgcaagcgggggccagtggctatgtggtgaagccatttaccgccgcgacgctggaggaaaaactcaacaaaatctttgataaactggacatgtga

SEQ ID NO: 460052 - DNA, 1050 bp, Shigella boydii
atgagcaaaatcagggtgttatctgtcgatgattcggcactgatgcgccagatcatgacagaaatcatcaacagccatagcgacatggaaatggtggcgaccgcgcctgatccgctggtcgcgcgtgacttgattaagaaattcaatcccgatgtgctgacgctggatgttgaaatgccgcggatggacggactggatttcctcgaaaaattaatgcgtttgcgtccaatgcccgttgtgatggtttcttccttgaccggcaaaggatcagaagtcacgctgcgcgcgctggagctgggggcaatagattttgtcaccaaaccgcaactgggtattcgcgaaggaatgctggcgtatagcgaaatgattgctgaaaaggtgcgtacggcagcaaaggcgagccttgcagcacataagccattgtcagcaccgacaacgctgaaggcgggtccgttgttgagttctgaaaaactgattgcgattggtgcttcaacgggtggaactgaggcaattcgtcacgtactgcaaccgttgccgctttccagcccggcattgttaattacccaacatatgccgcccggtttcacccgctcttttgccgacagacttaataagctttgccagatcggggttaaagaagccgaagacggagaacgtgtcttgccggggcatgcctatattgcgcagggcgatcggcatatggaactggcgcgtagtggcgcaaattatcaaatcaaaattcacgacggcccggcggttaaccgtcatcggccttcggtagatgtgttgttccattctgtcgccaaacaggcggggcgtaatgcggttggggtgatcctgaccggtatgggcaacgacggcgcggtgggaatgttggcgatgcgtcaggcgggggcatggacccttgcgcaaaacgaagcaagttgcgtggtgttcggcatgccgcgcgaggccatcaatatgggtggtgtctgcgaagtggtcgatcttagccaggtaagccagcaaatgttggcaaaaattagtgccggacaggcgatacgtatttaa

SEQ ID NO: 460053 - DNA, 861 bp, Shigella boydii
atgacttcatctctgccctgtgggcaaacgtctttattgttacagatgaccgagcgcctggcgctttccgacgcgcattttcggcggataagtcaattgatctatcaacgagccgggatcgtcctggccgatcataaacgcgacatggtttacaaccgactggttcgtcgtttgcgttcgctaggactgacggatttcggtcattatctgaacttgctggaatctaatcagcacagcggtgagtggcaggcgtttatcaattcgctgaccacgaatctgacggcatttttccgtgaggcacatcatttccctctgctcgcggatcacgcacgtcgccgttctggcgagtatcgcgtatggagcgcggcggcttcaaccggcgaagagccgtacagcattgcgatgacgctggctgacacattgggcaccgcgcccggacgctggaaagtgtttgccagtgatatcgacaccgaagtgctggaaaaagccagaagcggtatttatcgccatgaagagttgaaaaacctgacgccgcagcaactgcaacggtatttcatgcgagggacgggaccgcatgaagggctggtacgcgtgcgtcaggagctggcgaactatgttgattttgccccgctgaatctactggcgaaacagtacaccgtgccggggccgtttgatgcgatcttctgtcgtaacgtcatgatctacttcgatcaaaatacccagcaggagattttgcgccgctttgttccgctccttaaacccgacggattgctgtttgcgggtcactctgaaaactttagccaccttgagcgccgcttcacgctgcgtggtcagacggtgtatgcgctaagtaaggattaa

SEQ ID NO: 460054 - DNA, 1602 bp, Shigella boydii
atgtttaatcgtattcgaatttcgaccacgctgtttttaattttgattctctgcgggatcttgcagattggcagtaacggcatgtctttttgggcatttcgcgacgatttgcaacgactgaatcaggtcgagcagagcaatcagcaacgtgcggcattagcgcaaactcgggcgataatgttacaggccagtaccgcgctgaacaaagcgggcactctgacggcacttagctatccggcggatgacattaaaacgttgatgacgacggcgcgcgccagtctgacgcaatccaccacgctgtttaaaagttttatggcgatgactgcgggcaacgagcacgtcagggcattgcaaaaagagacggagaaaagttttgcccgctggcacaacgatctcgaacatcaggcgacctggcttgaaagtaatcaactttcggatttcctcactgcgccggtgcagggatcacagaatgcgtttgacgttaactttgaggcctggcagctggagatcaaccatgtgctggaagccgccagtgcgcaaagtcagcgtaactatcagatttcggcgctggtgtttatcagcatgattattgttgcggcaatctacatcagcagtgcgctgtggtggacgcgcaagatgattgttcaaccactggccattattggtagccattttgacagcattgctgcgggtaatctggcgcgtccgattgcggtatatggtcgtaatgagatcaccgccatttttgccagcctgaagaccatgcagcaggctttgcgtgggacggtgagtgatgtgcgtaagggaagccatgagatgcacattgggatcgcggagattgtcgcaggcaataacgatctctcaagtcgtaccgaacagcaggcggcatcgctggcacaaacggccgccagtatggagcaattaaccgccacggtagggcaaaacgccgataacgcacgacaggcgtcggaactggcaaaaaatgccgcgacaacggcgcaggcgggcggtgttcaggtcagtaccatgactcacaccatgcaggagatcgccaccagctcgcaaaaaattggcgacattatcagcgttatcgacggaattgctttccagaccaatattctggccctgaatgcggcagtggaagcggctcgcgccggagagcaggggcgtggttttgcggtagtggcaggtgaagtgcgcaatcttgccagccgtagcgcgcaggcagcaaaagagatcaaagggctgatcgaagagtcagtcaatcgtgtccagcagggttcgaaactggtgaataacgccgccgcgaccatgaccgatattgtcagttcggtgacccgcgtgaacgacattatgggagaaattgcttcggcgtcggaagaacaacggcgggggattgagcaggttgcacaggctgtcagccagatggatcaggtgactcagcagaacgcctcgctggtagaagaagcggcggtggcaacggaacaactggcgaatcaggccgaccatctttcgtcgcgtgtggcggtatttacccttgaagaacatgaagtagcacgacatgagtcggcgcagttacaaattgcgccagtggtatcctga

SEQ ID NO: 460055 - DNA, 1419 bp, Shigella boydii
atgattaaccgtatccgcgtagtcacgctgttggtaatggtgttgggggtatttgcactgttacagcttatttccggcagtctgtttttttcttcccttcaccatagccagaagagctttgtggtttccaatcaattgcgggaacagcagggcgagctgacgtcaacctgggatttaatgctgcaaacgcgcattaacctgagtcgttcagcggtgcggatgatgatggattcctccaatcaacaaagtaacgccaaagttgaattgctcgatagcgccaggaaaacattggcgcaggcagcgacgcattataaaaaattcaaaagcatggcaccgttacctgaaatggtcgctaccagtcgtaatattgatgaaaaatataaaaactattacacagcgttaactgaactgattgattatctagattatggcaatactggagcttatttcgctcagccaacccagggaatgcaaaacattgacgggcgcagtgaaatgggcgacctggcgcagagcgtttcacatatgcaacgctctttgactgacaccgtcactcatgtccgcgaaggttcagatgccatctatgccggtacccgtgaaattgcggcgggcaacaccgatctttcctcccgtactgaacagcaggcatccgcgctggaagaaactgccgccagcatggagcagctcaccgcgacagtgaagcaaaacgccgataacgcccgccaggcctcgcaactggcgcaaagtgcctccgacaccgcccagcacggcggcaaagtggtggatggcgtagtgaaaacgatgcatgagatcgccgatagttcgaagaaaattgccgacattatcagcgttatcgacggtatcgccttccagactaatatcctcgcgctgaatgccgcggttgaagccgcgcgtgcgggtgaacagggccgtggttttgccgtggtggcgggtgaagtgcgtaatcttgccagtcgcagcgtccaggcggcaaaagagatcaaagccctcattgaagactccgtcgcacgcgttgataccggttcggtgctggtcgaaagcgccggggaaacaatgaacaatatcgtcaatgctgtcactcgcgtgactgacattatgggcgagattgcatcggcatcggatgaacagagccgtggcatcgttcaagtcgcattggcggtttcggaaatggatcgcgtcacgcaacagaacgcatcgctggtgcaggaatcagctgccgccgccgctgcgctggaagaacaggcgagtcgtttaacgcaagcggtttccacgttccgtctggcagccagcccactcaccaataaaccgcaaacaccatcccgtcctgccagtgagcaaccaccggcacagccacgactgcgaattgctgaacaagatccaaactgggaaacattttga

SEQ ID NO: 460056 - DNA, 504 bp, Shigella boydii
atgaccggtatgacgaatgtaacaaagctggccagcgagccgtcaggccaggaatttctggtatttacccttggtgatgaagagtacggtattgatatcctgaaagtgcaggagatccgtggctacgatcaggtaacacggattgcgaacacgccagcgtttatcaaaggcgtcacgaatctgcgcggcgttattgtgctgattgttgacttacgaattaagttcagccaggtggatgtggactataacgacaacacggtagttatcgtcctgaatctcggacagcgggtggtcggcatcgtggttgacggcgtctcagacgtgctttcattgacggcggagcaaattcgtccggcaccggaatttgccgtgacgctttcaacagaatatctcactggactgggcgcactgggcgaccggatgttgattctggtgaacatcgaaaaactgctgaacagcgaagagatggcgctgttagatagcgcggcgtcagaagtggcgtaa

SEQ ID NO: 460057 - DNA, 1965 bp, Shigella boydii
gtgagcatggatataagcgatttttatcagacattttttgatgaagcggacgaactgttggctgatatggagcagcatctgctggttttgcagccggaagcgccagatgccgaacaattgaatgccatctttcgggctgtccactcgatcaaaggaggggcaggaacttttggcttcagcgttttgcaggaaaccacgcatctgatggaaaacctgctcgatgaagccagacgaggtgagatgcaactcaacaccgacattatcaatctgtttttggaaacgaaggacatcatgcaagaacagctcgacgcttataaacagtcgcaagagccggatgccgccagcttcgattatatctgccaggccttgcgtcaattggcattagaagcgaaaggcgaaacgccatccgcagtgacccgattaagtgtggttgccaaaagtgaaccgcaagatgagcagagtcgcagtcagtcgccgcgacgaattatcctttcgcgcctgaaggccggggaagtcgacctgctggaagaagaactgggacatctgataacgttaactgacgtggtgaaaggggcggattcgctctcggcaatattaccgggcgacatcgccgaagatgacatcacagcggtactctgttttgtgattgaagccgatcagattacctttgaaacagtagaagtctcgccaaaaatatccaccccaccagtgcttaaactggcagccgaacaagcaccaaccggccgcgtggagcgggaaaaaacgacgcgcagcagtgaatccaccagcatccgtgtagcggtagaaaaggttgatcaattaattaacctcgtcggcgagctggttatcacccagtccatgcttgcccagcgttccagcgaactggacccggttaatcatggtgatttgataaccagcatggggcagttacaacgtaacgcccgtgatttgcaggaatcagtgatgtcgattcgcatgatgccgatggaatatgtttttagtcgctatccccggctggtgcgtgatctggcgggaaaactcggcaagcaggtagaactgacgctggtgggcagttccactgagctcgacaagagcctgatagaacgcattatcgacccgctgacccacctggtacgcaatagcctcgatcacggtattgaactgccagaaaaacggctcgccgcaggtaaaaacagcgtcggaaatttaattctttctgccgaacatcagggcggcaacatttgcattgaagtgaccgacgatggggcggggctaaaccgtgagcgaattctggcaaaagcggcctcgcaaggtttgactgtcagcgaaaacatgagcgacgacgaagtcgcgatgctgatatttgcaccaggcttctccacggcagagcaggtcaccgacgtctccgggcgcggcgtcggcatggacgtcgttaaacgtaatatccaggagatgggcggtcatgtcgaaatccagtcgaagcagggtactggcactacgatccgcattttactgccgctgacgctggccatcctcgacggcatgtccgtacgcgttgcggatgaagttttcattctgccgctgaatgctgtcatggaatcactgcaaccccgtgaagccgatctgcatccactggccggcggcgagcgggtgctggaagtgcggggcgaatatctgcccatcgtcgaactgtggaaagtgttcaacgtcgcgggcgcgaaaaccgaagccacccagggaattgtggtgatcttacaaagtggcggtcgccgctacgccttgctggtggatcaattaattggtcagcaccaggttgtggttaaaaaccttgaaagtaactatcgcaaagtccccggcatttctgctgcgaccattcttggcgacggcagcgtggcactgattgttgatgtctccgccttgcaggcgataaaccgcgaacaacgtatggcgaacaccgccgcctga

SEQ ID NO: 460058 - DNA, 375 bp, Shigella boydii
atgacaaaagagctgacaggtaaagccctgtttatggcgctcaggagccagcgcccacctgccgggctaatccaccactctgatcgaggttcacagtactgcgcatacgattaccgggtcatacaggagcagtctggtctgaaaacatcaatgtcgcgtaaaggtcagtgttacgacaacgctccgatggaaagcttctggggaacgctgaaaaatgagagcctgagccactatcgttttaataaccgggatgaagccatctcagtaatacgggaatacattgagattttctacaatcgtcagcgtcgtcactctcgtctggggaatatctccccggcagccttcagggaaaaatatcatcagatggctgcttaa

SEQ ID NO: 460059 - DNA, 864 bp, Shigella boydii
atgaagaacacaagtaagttccagaatgtagtgattgtcactattgtcggttggcttgtgttgtttgtctttctgcccaacctgatgatcattggcaccagctttttgacccgcgacgacgccagtttcgtcaaaatggtcttgacgctggataactacacgcgtctgctcgatccgctctattttgaagtgctattgcactcgctgaatatggcgctgatcgccaccctcgcctgcctggtgctgggctatccatttgcctggtttctggcgaagctgccacacaaggtgcgtccgctgctgctgtttctgctgattgttccgttctggaccaactcattgattcgtatctacgggctgaaaattttcctcagcaccaaaggctatctcaacgagtttttgctctggctgggcgttatcgacacaccaatccgtatcatgttcacgcccagtgcggtgattatcggtctggtttacattctgctgccgtttatggtgatgccgctgtactccagtatcgaaaaactggataagccgttgcttgaggcggcgcgcgatctcggtgccagcaagttacagacttttatccgcatcattattccactgacgatgccggggattattgccggatgtctgctggtgatgctgccagcgatgggcctgttctatgtgtccgacctgatgggcggtgcgaaaaacctgctgatcggtaacgtcatcaaggtacagttcctcaatattcgtgactggccgtttggtgcagccaccagcattacgctgactatcgtaatgggcctgatgttgctggtttactggcgcgcttctcgtttgctgaataagaaggtgagcgaattagatgattaa

SEQ ID NO: 460060 - DNA, 1137 bp, Shigella boydii
atgggacagagtaaaaaattgaataaacaaccgagttcgctttcaccgctggtgcaattggcgggaattcgcaaatgctttgatggtaaagaggtcattccccagctggatctgactatcaacaatggcgagttcctcacgctgcttggcccttctggctgcggtaaaacaaccgttcttcgcctgattgcaggtctggaaactgttgattccggacgcatcatgctggataacgaggacatcacccacgttccggcggaaaaccgctatgtgaacactgttttccaaagctacgcacttttcccccacatgaccgtgttcgaaaatgtggcctttgggttgcgcatgcaaaaaacccccgctgctgaaattacgccccgcgtgatggaagccctgcggatggtgcaactggaaaccttcgctcaacgtaaaccgcatcagctctctggtggtcaacagcaacgcgtcgccattgctcgcgcggtggttaacaagcctcgtctgttgttgctggatgagtcgctctcagcgctggattacaaactgcgtaagcaaatgcagaacgagctgaaagcgttacagcgtaagcttggcattacattcgtcttcgtgactcacgaccaggaagaagcactcaccatgtcagacaggattgtggtgatgcgcgagggtcgcattgagcaagacggcacgccgcgtgaaatctacgaagagccgaaaaacctgtttgttgccggcttcattggcgaaattaatatgtttaacgccacggtgatcgagcgactcgacgagcagcgcgtacgcgccaacgttgaaggccgcgaatgtaatatctacgttaacttcgccgttgaaccggggcaaaaactgcatgttctgctgcgcccggaagacttacgtgttgaagagattaacgacgacaaccacgctgaagggctgattggttacgttcgtgagcgtaactacaaaggcatgacgctggagtcggttgttgaactggaaaatggcaagatggtgatggtcagcgaattcttcaatgaagacgatcctgactttgaccactctctcgaccaaaaaatggccattaattgggtagaaagctgggaggtcgtactggctgatgaagaacacaagtaa

SEQ ID NO: 460061 - DNA, 1227 bp, Shigella boydii
atggataaactacttgagcgatttttgaactacgtgtctctggatacccaatcaaaagcaggggtgagacaggttcccagcacggaaggccaatggaagttattgcatctgctgaaagagcagctcgaagaaatggggcttatcaatgtgaccttaagtgagaagggcactttgatggcgacgttaccggctaacgtccctggcgatatcccggcgattggctttatttctcatgtggatacctcaccggattgcagcggcaaaaatgttaatccgcaaattgttgaaaactatcgcggtggcgatattgcgctgggtatcggcgatgaagttttatcaccggttatgttcccggtgctgcatcagctactgggtcagacgttgattaccaccgatggtaaaaccttgttaggtgccgatgacaaagcaggtattgcagaaatcatgaccgcgctggcggtattgcaacagaaaaacattccgcatggtgatattcgcgtcgcctttaccccggatgaagaagtgggcaaaggggcgaaacattttgatgttgatgccttcgatgcccgctgggcttacactgttgacggtggtggcgtaggcgaactggagtttgaaaacttcaacgccgcatcggtcaatatcaaaattgtcggtaacaatgttcatccgggcacggcgaaaggagtgatggtaaatgcgctgtcgctggcggcacgtattcatgcggaagttccggcggatgaaagcccggaaatgacagaaggctatgaaggtttctatcacctggcgggcatgaaaggcaccgttgaacgggccgatatgcactacatcatccgtgatttcgaccgtaaacagtttgaagcgcgtaaatgtaaaatgatggagatcgccaaaaaagtgggcaaagggttacatcctgattgctacattgaactggtgattgaagacagttactacaatatgcgcgagaaagtggttgagcatccgcatattctcgatatcgcccagcaggcgatgcgtgactgcgatattgaaccggaactgaaaccgatccgcggcggtaccgacggcgcgcagttgtcgtttatgggattaccgtgcccgaacttgttcactggcggttacaactatcatggtaagcatgagtttgtgactctggaaggtatggaaaaagcggtgcaggtgatcgtccgtattgccgagttaacggcgcaacggaagtaa

SEQ ID NO: 460062 - DNA, 1122 bp, Shigella boydii
atggaataccaactcactcttaactggcccgattttcttgaacgtcactggcagaaacgcccggtggtgttaaaacgcggctttaataattttattgacccgatctctccagacgagttggcgggtctggcgatggaaagcgaagttgacagtcgactggtcagtcaccaggatggcaaatggcaggtcagccacggcccgttcgaaagctacgatcatctcggtgaaaccaactggtcattactggtacaggcagtgaaccactggcatgagccgaccgccgcgctgatgcgaccgttccgtgaactaccggactggcgtattgatgatctgatgatttctttttctgtacctggcggcggcgtcggcccgcatctcgatcagtacgacgtgtttatcattcagggtaccggacgtcgtcgctggcgagtgggcgaaaagctgcaaatgaaacagcactgcccacatccggatctgttacaggtcgatccgttcgaagccatcatcgatgaagagctggagcctggtgatattctttatattccgccaggattcccgcatgaaggctacgcgctggaaaatgcgatgaactattccgtgggctttcgcgcgccaaatacgcgggaactgattagtggatttgccgattatgtgctgcaacgtgaactgggcggcaactactacagcgatcctgatgttccacctcgcgctcatcctgcggatgttctgcctcaagagatggataaactgcgtgagatgatgctcgaattgatcaaccagccggaacactttaagcaatggtttggcgagtttatatcccagtcacgtcatgaactggatatcgcgccgccggaaccgccttatcagccagatgaaatctacgatgcgctgaaacaaggtgatgtgctggtgcgcctgggtggtctgcgcgtattgcgcattggcgacgacgtgtatgccaatggtgagaagatcgattccccgcaccgtccggcactggatgcactcgccagcaacattgcgctgactgcggagaattttggcgatgcgctggaagatccgtcattcctcgcgatgctcgcggcgctggtcaatagcgggtattggttcttcgaagggtaa

SEQ ID NO: 460063 - DNA, 1461 bp, Shigella boydii
atgaaaaaattactgcgtctttttttcccgctctcgctgcgggtacgttttctgttggcaacggctgcggtagtactggtgctttcgcttgcctacggaatggtcgcgctgatcggttatagcgtcagtttcgataaaactacgtttcggctgttacgtggcgagagcaatctgttctatacccttgcgaagtgggaaaacaataagttgcatgtcgagttacccgaaaatatcgacaagcaaagccccaccatgacgctaatttatgatgagaacgggcagcttttatgggcgcaacgtgacgtgccctggctgatgaagatgatccagcctgactggctgaaatcgaatggttttcatgaaattgaagcggatgttaacgataccagcctcttgctgagtggagatcattcgatacagcaacagttgcaggaagtgcgggaagatgatgacgacgcggagatgacccactcggtggcagtaaacgtctacccggcaacatcgcggatgccaaaattaaccattgtggtggtggataccattccggtggagctaaaaagttcctatatggtctggagctggtttatctatgtgctctcagccaatctgctgttagtgatcccgctgctgtgggtcgccgcctggtggagtttacgccccatcgaagccctggcaaaagaagtccgcgaactggaagaacataaccgcgaattgctcaatccagccacaacgcgagaactgaccagtctggtacgaaacctgaaccgattgttaaaaagtgaacgcgaacgttacgacaaataccgtacgacgctcaccgacctgacccatagtctgaaaacgccactggcggtgctgcaaagtacgctgcgttctctgcgtagtgaaaagatgagcgtcagtgatgctgagccggtaatgctggagcaaatcagccgcatttcacagcaaattggctactacctgcatcgtgccagtatgcgcggcgggacattgctcagccgcgagctgcatccggtcgccccactgctggacaatctcacctcagcgctgaacaaagtgtatcaacgcaaaggggtcaatatctctctcgatatttcgccagagatcagctttgtcggtgagcagaacgattttgtcgaggtgatgggcaacgtgctggataatgcctgtaaatattgcctcgagtttgtcgaaatttctgcaaggcaaaccgacgagcatctctatattgtggtcgaggatgatggccccggtattccattaagcaagcgagaggtcattttcgaccgtggtcaacgggttgatactttacgccctgggcaaggtgtagggctggcggtagcccgcgaaatcaccgagcaatatgagggtaaaatcgtcgccggagagagcatgctgggcggtgcgcggatggaggtgatttttggtcgccagcattctgcgccgaaagatgaataa

SEQ ID NO: 460064 - DNA, 672 bp, Shigella boydii
atgcgcgtactggttgttgaagacaatgcgttgttacgtcaccaccttaaagttcagattcaggatgctggtcatcaggtcgatgatgcagaagatgccaaagaagccgattattatctcaatgaacatttaccggatattgcgattgtcgatctcggattgccagacgaggacggtctgtcactgattcgccgctggcgtagcaatgatgtttcactgccgattctggtattaaccgcccgtgaaagctggcaggacaaagtcgaagtattaagtgctggtgctgatgattacgtgactaaaccatttcatattgaagaggtgatggcgcgaatgcaggcattaatgcggcgtaatagcggtctggcttcacaggtcatttcgctaccaccgtttcaggttgatctctctcgccgtgaattatctattaatgacgaagtgatcaaactgaccgcgttcgaatacaccattatggaaacgttgatacgcaataatggcaaagtggtgagcaaagattcgttaatgctccaactctatccggatgcggagctgcgggaaagccataccattgatgtactgatgggacgtctgcgcaaaaaaattcaggcacaatatccgcaagaagtgattactaccgttcgcggccaaggctatttgttcgaattgcgctga

SEQ ID NO: 460065 - DNA, 1371 bp, Shigella boydii
atggaattatcctcactgaccgccgtttcccctgtcgatggacgctacggcgataaagtcagcgcgctgcgcgggattttcagcgaatatggtttgctgaaattccgtgtacaagttgaagtacgttggctgcaaaaactggccgcgcacgcagcgatcaaggaagttcctgcttttgctgccgacgcaatcggttaccttgatgcaattgtcgccaatttcagcgaagaagatgccgcacgcatcaaaaccatcgagcgtaccactaaccacgacgttaaagcggttgagtatttcctgaaagaaaaagtggcggagatcccggaactgcacgcggtttctgaattcatccactttgcctgtacttcggaagatatcaataacctctcccacgcattaatgctgaaaaccgcgcgtgatgaagtgatcctgccgtactggcgtcaactgattgatggcattaaagatctcgccgttcagtaccgcgatatcccgctgctgtctcgtacccacggtcagccagccacgccgtcaaccatcggtaaagagatggcaaacgtcgcctaccgtatggagcgccagtaccgccagcttaaccaggtggagatcctcggcaaaatcaacggcgcggtcggtaactataacgcccacatcgccgcttacccggaagttgactggcatcagttcagcgaagagttcgtcacctcgctgggtattcagtggaacccgtacactacccagattgaaccgcacgactacattgccgaactgtttgattgcgttgcgcgcttcaacaccattctgatcgactttgaccgtgacgtctggggttatatcgcccttaaccacttcaaacagaaaaccattgctggtgagattggttcttccaccatgccgcataaagttaacccgatcgacttcgagaactccgaagggaatctgggcctttccaacgcggtattacagcatctggcaagcaaactgccggtttcccgctggcagcgtgacctgaccgactccaccgtgctgcgtaacctcggcgtgggtatcggttatgcgctgattgcgtatcaatccaccctgaaaggcgtgagcaaactggaagtgaaccgtgaccatctgctggatgagctggatcacaactgggaagtgctggcggagccaatccagacagttatgcgtcgctatggcatcgaaaaaccgtacgagaagctgaaagagctgactcgtggtaagcgcgttgacgccgaaggcatgaagcagtttatcgacggtctggcgttgccagaagaagagaaagcccgcctgaaagcgatgacgccggcaaactacattggtcgcgccatcaccatggttgatgagctgaaataa

SEQ ID NO: 460066 - DNA, 642 bp, Shigella boydii
gtggcaaagaattactatgacatcaccctcgccctggccggtatttgtcagtcggcacgcctggtgcaacaactcgctcaccaggggcattgtgatgccgatgcgctacacgtctcactcaacagtattattgatatgaaccccagctcgacgctggcggtttttggcggtagcgaagccaacctgcgcgtcgggctggaaaccctgctcggcgtgctcaatgccagcagtcgccagggcttaaacgccgaattaacccgctacacactcagcttgatggtgcttgagcgcaaactctcctcagcgaaaggcgcgctcgacactctgggcaaccggatcaacggcctgcaacgccagctcgaacacttcgatttacagtccgaaacgctgatgagcgcgatggctgctatctatgttgatgtgatcagcccgcttggcccgcgcattcaggtcaccggttcccctgctgtactgcaaagcccacaagtgccggcgaaagttcgcgcaaccctgctggcaggcattcgcgccgccgtgctctggcaccaggtcggcggcggacgtctgcaactgatgttttctcgtaatcgcctgaccactcaggcaaaacaaattcttgctcatttaaccccggagttgtga

SEQ ID NO: 460067 - DNA, 1107 bp, Shigella boydii
atgtctgaaaccgcaaaaaaagtaatcgtcggcatgtccggcggtgtcgattcctccgtttctgcctggctgttgcaacaacagggatatcaggttgaaggcctgtttatgaagaactgggaagaagacgacggtgaggaatattgcacagcggcagcggatctggctgatgcccaggctgtctgcgacaagctcggcattgaactgcacaccgttaactttgctgccgagtactggaacaacgtcttcgaactgttccttgccgaatataaagccggtcgcacgccgaatccggatattctgtgcaacaaagagatcaaatttaaagctttcctcgaatttgccgccgaagatttaggtgccgattatatcgctaccggtcattacgtacgtcgggccgatgtcgatggcaagagccgcctgctgcgtggtctggacagcaataaagaccagagctacttcctttatacgctcagccatgagcagattgcgcaaagcctgttcccggtcggcgaactggaaaaaccgcaggtgcgtaagattgctgaagatcttggtctggtcaccgcgaagaaaaaagactctaccggcatttgcttcattggcgaacgtaaattccgcgagttcctgggccgttatctcccggcgcaaccgggcaaaatcattaccgtcgatggcgatgaaattggtgagcaccaggggctgatgtatcacactctcggtcagcgtaaaggtctgggtatcggtggcaccaaagaaggcaccgaagaaccgtggtatgtggtggacaaagacgtcgaaaacaacattctggttgttgcgcagggccatgaacacccgcggctgatgtctgtcgggttgattgcccagcagttgcactgggtcgatcgcgaaccattcaccggtactatgcgttgcacggtaaaaacccgctatcgccagaccgatatcccttgcaccgtcaaggcgctggacgatgatcgcattgaagtgattttcgatgaaccggttgccgccgtgacgccgggccagtctgccgtcttctataacggtgaagtgtgcctcggtggcggtattattgagcagcgtctgccgctgccggtctga

SEQ ID NO: 460068 - DNA, 462 bp, Shigella boydii
atgtttaaaccgcacgttaccgttgcttgcgtagtgcacgcagagggtaaatttttagtcgttgaagagacgattaatggtaaagcgttatggaaccaacctgccgggcatctggaagccgatgaaaccttagtggaagctgccgcccgtgagctatgggaagaaaccggcatcagcgcgcaaccgcaacactttattcgtatgcatcagtggattgcgccagataaaacgccgtttttgcgtttcctctttgccattgagcttgagcaaatatgcccgacccagcctcatgacagcgatatcgactgctgtcgttgggtcagcgccgaagaaattttaaaggcgtcaaatcttcgttcgccgctggtggcggaaagtatccgttgttatcaaagcgagcaacgctatccgctggagatgattggcgattttaactggccttttacaaagggtgtcatctaa

SEQ ID NO: 460069 - DNA, 654 bp, Shigella boydii
atgcggcaattcataatctctgaaaataccatgcaaaaaacttcttttagaaatcacctggttaagcgattcagctcgcaacgttctaccaggcgtaaacctgaaaaccagcccacgcgtgtgatcctgttcaataaaccctacgatgttcttccgcagttcaccgatgaagccggacgcaaaacattaaaagaattcatcccggttcagggcgtttatgcagcaggtcgtcttgaccgcgatagcgaagggttactggtgctgaccaataacggcgcgttgcaggcgcgtttaacccagccgggcaaacgcaccgggaaaatctattatgtgcaggtggaaggtattcccacacaagacgcacttgaagccttgcgcaatggcgtaaccttaaatgatggccctaccctgcccgccggcgcggagctggttgacgaaccagcgtggttatggccgcggaatccaccaattcgtgaacgcaaaagtattcccaccagctggctgaagatcaccttatatgaaggacgtaatcgccaggtgcgccgcatgaccgcccatgttggtttccccacgctgcgactgattcgttatgcgatgggtgattacactttggataaccttgccaatggcgaatggcgagaagcaacagaataa

SEQ ID NO: 460070 - DNA, 1251 bp, Shigella boydii
atggaaagtaaagtagttgttccggcacaaggcaagaagatcaccctgcaaaacggcaaactcaacgttcctgaaaatccgattatcccttacattgaaggtgatggaatcggtgtagatgtaaccccagccatgctgaaagtggtcgacgctgcagtcgagaaagcctataaaggcgagcgtaaaatctcctggatggaaatttacaccggtgaaaaatccacacaggtttatggtcaggatgtctggctgcctgctgaaacccttgatctgattcgtgaatatcgcgttgccattaaaggtccgctgaccactcctgttggtggcggtattcgctctctgaacgttgccctgcgccaggaactggatctctacatctgcctgcgtccggtacgttactatcagggcactccaagcccggttaaacaccctgaactgaccgatatggttatcttccgtgaaaactcggaagacatttatgcgggtatcgaatggaaagcagactctgccgacgccgagaaagtgattaaattcctgcgtgaagagatgggggtgaagaaaattcgcttcccggaacattgtggtatcggtattaagccgtgttcggaagaaggcaccaaacgtctggttcgtgcagcgatcgaatacgcaattgctaacgatcgtgactctgtgactctggtgcacaaaggcaacatcatgaagttcaccgaaggcgcgtttaaagactggggctaccagctggcgcgtgaagagtttggcggtgaactgatcgacggcggcccgtggctgaaagttaaaaacccgaacaccggcaaagagatcgtcattaaagacgtgattgctgatgcattcctgcaacagatcctgctgcgtccggctgaatatgatgttatcgcctgtatgaacctgaacggtgactacatttctgacgccctggcagcgcaggttggcggtatcggtatcgcccctggagcaaacatcggtgacgaatgcgccctgtttgaagccacccacggtactgcgccgaaatacgccggtcaggacaaagtaaatccaggctctatcatcctctccgctgagatgatgctgcgccatatggggtggactgaagcggctgatttaattgttaaaggtatggaaggtgctatcaacgcgaaaaccgtaacttatgactttgaacgtctgatggaaggcgctaagctgctgaaatgttcagagtttggtgaagcgatcatcgaaaacatgtaa

SEQ ID NO: 460071 - DNA, 495 bp, Shigella boydii
atgaaacaggaagtggaaaagtggcgaccttttggacatccggatggtgatattcgtgatttatcatttcttgatgctcatcaggctgtctacgttcagcatcatgagggcaaagagcctttagagtatcgcttttgggttacctactctcttcactgcttcacaaaagattatgaacatcagacgaacgaagaaaaacaatcgttaatgtaccacgcgcctaaagaatctcgtcccttctgccagcaccgttataacttagcgcgcacacacttaaaaagaactattttggcgctgccagaaagcaacgttattcatgccgggtatggtagctatgccgtgattgaggtggacttagacggaggagataaggcattttactttgttgcgttcagggctttcagggaaaagaaaaaactccgtttgcatgtaactagcgcttatcccatttctgaaaaacagaaaggtaaatcggtaatgactccaacttattga

SEQ ID NO: 460072 - DNA, 4224 bp, Shigella boydii
gtgaaagatttattaaagtttctgaaagcgcagactaaaaccgaagagtttgatgcgatcaaaattgctctggcttcgccagacatgatccgttcatggtctttcggtgaagttaaaaagccggaaaccatcaactaccgtacgttcaaaccagaacgtgacggccttttctgcgcccgtatctttgggccggtaaaagattacgagtgcctgtgcggtaagtacaagcgcctgaaacaccgtggcgtcatctgtgagaagtgcggcgttgaagtgacccagactaaagtacgccgtgagcgtatgggccacatcgaactggcttccccgactgcgcatatctggttcctgaaatcgctgccgtcccgtatcggtctgctgctcgatatgccgctgcgcgatatcgaacgcgtactgtactttgaatcctatgtggttatcgaaggcggtatgaccaacctggaacgtcagcagatcctgactgaagagcagtatctggacgcgctggaagagttcggtgacgaattcgacgcgaagatgggtgcggaagcaatccaggctctgctgaagagcatggatctggagcaagagtgcgaacagctgcgtgaagagctgaacgaaaccaactccgaaaccaagcgtaaaaagctgaccaagcgtatcaaactgctggaagcgttcgttcagtctggtaacaaaccagagtggatgatcctgaccgttctgccggtactgccgccagatctgcgtccgctggttccgctggatggtggtcgtttcgcgacttctgacctgaacgatctgtatcgtcgcgtcattaaccgtaacaaccgtctgaaacgtctgctggatctggctgcgccggacatcatcgtacgtaacgaaaaacgtatgctgcaggaagcggtagacgccctgctggataacggtcgtcgcggtcgtgcgatcaccggttctaacaagcgtcctctgaaatctttggccgacatgatcaaaggtaaacagggtcgtttccgtcagaacctgctcggtaagcgtgttgactactccggtcgttctgtaatcaccgtaggtccatacctgcgtctgcatcagtgcggtctgccgaagaaaatggcgctggagctgttcaaaccgttcatctacggcaagctggaactgcgtggtcttgctaccaccattaaagctgcgaagaaaatggttgagcgcgaagaagctgtcgtttgggatatcctggacgaagttatccgcgaacacccggtactgctgaaccgtgcaccgactctgcaccgtctgggtatccaggcatttgaaccggtactgatcgaaggtaaagctatccagctgcacccgctggtttgtgcggcatataacgccgacttcgatggtgaccagatggctgttcacgtaccgctgacgctggaagcccagctggaagcgcgtgcgctgatgatgtctaccaacaacatcctgtccccggcgaacggcgaaccaatcatcgttccgtctcaggacgttgttctgggtctgtactatatgacccgtgactgtgttaacgccaaaggcgaaggcatggtgctgactggcccgaaagaagcagaacgtctgtatcgctctggtctggcttctctgcatgcgcgcgttaaagtgcgtatcaccgagtatgaaaaagatgcaaacggtgaattagtagcgaaaaccagcctgaaagacacgactgttggccgtgccattctgtggatgattgtaccgaaaggtctgccttactccatcgtcaaccaggcgctgggtaaaaaagcaatctccaaaatgctgaacacctgctaccgcattctcggtctgaaaccgaccgttatttttgcggaccagatcatgtacaccggcttcgcctatgcagcgcgttctggtgcatctgttggcatcgatgacatggtcatcccggagaagaaacacgaaatcatctccgaggcagaagcagaagttgctgaaattcaggagcagttccagtctggtctggtaactgcgggcgaacgctacaacaaagttatcgatatctgggctgcggcgaacgatcgtgtatccaaagcgatgatggataacctgcaaactgaaaccgtgattaaccgtgacggtcaggaagagaagcaggtttccttcaacagcatctacatgatggccgactccggtgcgcgtggttctgcggcacagattcgtcagcttgctggtatgcgtggtctgatggcgaagccggatggctccatcatcgaaacgccaatcaccgcgaacttccgtgaaggtctgaacgtactccagtacttcatctccacccacggtgctcgtaaaggtctggcggataccgcactgaaaactgcaaactccggttacctgactcgtcgtctggttgacgtggcgcaggacctggtggttaccgaagacgattgtggtacccatgaaggtatcatgatgactccggttatcgaaggtggtgatgttaaagagccgctgcgcgatcgcgtactgggtcgtgtaactgctgaagacgttctgaagccgggtactgctgatatcctcgttccgcgcaacacgctgctgcacgaacagtggtgtgacctgctggaagagaactctgtcgacgcggttaaagtacgttctgttgtatcttgtgacaccgactttggtgtatgtgcgcactgctacggtcgtgacctggcgcgtggccacatcatcaacaagggtgaagcaatcggtgttatcgcggcacagtccatcggtgaaccgggtacacagctgaccatgcgtacgttccacatcggtggtgcggcatctcgtgcggctgctgaatccagcatccaggtgaaaaacaaaggtagcatcaagctcagcaacgtgaagtcggttgtgaactccagcggtaaactggttatcacttcccgtaatactgaactgaaactgatcgacgaattcggtcgtaccaaagaaagctacaaagtaccttacggtgcggtactggcgaaaggcgatggcgaacaggttgctggcggcgaaaccgttgcaaactgggacccgcacaccatgccggttatcaccgaagtaagcggttttgtacgctttactgacatgatcgacggtcagaccattactcgtcagacagacgaattgaccggtctgtcttcgctggtggttctggattccgcagaacgtaccgcaggtggtaaagatctgcgtccggcactgaaaatcgttgatgctcagggtaacgacgttctgattccgggtaccgatatgcctgcgcagtacttcctgccgggtaaagcgattgttcagctggaagatggcgtacagatcagctctggtgacaccctggcgcgtattccgcaggaatccggcggtaccaaggacatcaccggtggtctgccgcgcgttgcggacctgttcgaagcacgtcgtccgaaagagccggcaatcctggctgaaatcagcggtatcgtttccttcggtaaagaaaccaaaggtaaacgtcgtcttgttatcaccccggtagacggtagcgatccgtacgaagagatgattccgaaatggcgtcagctcaacgtgttcgaaggtgaacgtgtagaacgtggtgacgtaatttccgacggtccggaagcgccgcacgacattctgcgtctgcgtggtgttcatgctgttactcgttacatcgttaacgaagtacaggacgtataccgtctgcagggcgttaagattaacgataaacacatcgaagttatcgttcgtcagatgctgcgtaaagctaccatcgttaacgcgggcagctccgacttcctggaaggcgaacaggttgaatactctcgcgtcaagatcgcaaaccgcgaactggaagcgaacggcaaagtgggtgcaacttactcccgcgatctgctgggtatcaccaaagcgtctctggcaaccgagtccttcatctccgcggcatcgttccaggagaccactcgcgtgctgaccgaagcagccgttgcgggcaaacgcgacgaactgcgcggcctgaaagagaacgttatcgtgggtcgtctgatcccggcaggtaccggttacgcgtaccaccaggatcgtatgcgtcgccgtgctgcgggtgaagctccggctgcaccgcaggtgactgcagaagacgcatctgccagcctggcagaactgctgaacgcaggtctgggcggttctgataacgagtaa

SEQ ID NO: 460073 - DNA, 4029 bp, Shigella boydii
atggtttactcctataccgagaaaaaacgtattcgtaaggattttggtaaacgtccacaagttctggatgtaccttatctcctttctatccagcttgactcgtttcagaaatttatcgagcaagatcctgaagggcagtatggtctggaagcagctttccgttccgtattcccgattcagagctacagcggtaattccgagctgcaatacgtcagctaccgccttggcgaaccggtgtttgacgtccaggaatgtcaaatccgtggcgtgacctattccgcaccgctgcgcgttaaactgcgtctggtgatctatgagcgcgaagcgccggaaggcaccgtaaaagacattaaagaacaagaagtctacatgggcgaaattccgctcatgacagacaacggtacctttgttatcaacggtactgagcgtgttatcgtttcccagctgcaccgtagtccgggcgtcttctttgactccgacaaaggtaaaacccactcttcgggtaaagtgctgtataacgcgcgcatcatcccttaccgtggttcctggctggacttcgaattcgatccgaaggacaacctgttcgtacgtatcgaccgtcgccgtaaactgcctgcgaccatcattctgcgcgccctgaactacaccacagagcagatcctcgacctgttctttgaaaaagttatctttgaaatccgtgataacaagctgcagatggaactggtgccggaacgcctgcgtggtgaaaccgcatcttttgacatcgaagctaacggtaaagtgtacgtagaaaaaggccgccgtatcactgcgcgccacattcgccagctggaaaaagacgacgtcaaacttatcgaagtcccggttgagtacatcgcaggtaaagtggttgctaaagactatattgatgagtctaccggcgagctgatctgcgcagcgaacatggagctgagcctggatctgctggctaagctgagccagtctggtcacaagcgtatcgaaacgctgttcaccaacgatctggatcacggcccatatatctctgaaaccttacgtgtcgacccaactaacgaccgtctgagcgcactggtagaaatctaccgcatgatgcgccctggcgagccgccgactcgtgaagcagctgaaagcctgttcgagaacctgttcttctccgaagaccgttatgacttgtctgcggttggtcgtatgaagttcaaccgttctctgctgcgcgaagaaatcgaaggttccggtatcctgagcaaagacgacatcattgatgttatgaaaaagctcatcgatatccgtaacggtaaaggcgaagtcgatgatatcgaccacctcggcaaccgtcgtatccgttccgttggcgaaatggcggaaaaccagttccgcgttggcctggtacgtgtagagcgtgcggtgaaagagcgtctgtctctgggcgatctggataccctgatgcctcaggatatgatcaacgccaagccgatttccgcagcagtgaaagagttcttcggttccagccagctgtctcagtttatggaccagaacaacccgctgtctgagattacgcacaaacgtcgtatctccgcactcggcccaggcggtctgacccgtgaacgtgcaggcttcgaagttcgagacgtacacccgactcactacggtcgcgtatgtccaatcgaaacccctgaaggtccgaacatcggtctgatcaactctctgtccgtgtacgcacagactaacgaatacggcttccttgagactccgtatcgtaaagtgaccgacggtgttgtaactgacgaaattcactacctgtctgctatcgaagaaggcaactacgttatcgcccaggcgaactccaacctggatgaagaaggccacttcgtagaagatctggtaacttgccgtagcaaaggcgaatccagcttgttcagccgcgaccaggttgactacatggacgtatccacccagcaggtggtatccgtcggtgcgtccctgatcccgttcctggaacacgatgacgccaaccgtgcattgatgggtgcgaacatgcaacgtcaggccgttccgactctgcgcgctgataagccgctggttggtactggtatggaacgtgctgttgccgttgactccggtgtaactgcggtagctaaacgtggtggtgtcgttcagtacgtggatgcttcccgtatcgttatcaaagttaacgaagacgagatgtatccgggtgaagcaggtatcgacatctacaacctgaccaaatacacccgttctaaccagaacacctgtatcaaccagatgccgtgtgtgtctctgggtgaaccggttgaacgtggcgacgtgctggcagacggtccgtccaccgacctcggtgaactggcgcttggtcagaacatgcgcgtagcgttcatgccgtggaatggttacaacttcgaagactccatcctcgtatccgagcgtgttgttcaggaagaccgtttcaccaccatccacattcaggaactggcgtgtgtgtcccgtgacaccaagctggggccggaagagatcaccgctgacatcccgaacgtgggtgaagctgcgctctccaaactagatgaatccggtatcgtttacattggtgcggaagtgaccggtggcgacattctggttggtaaggtaacgccgaaaggtgaaactcagctgaccccagaagaaaaactgctgcgtgcgatcttcggtgagaaagcctctgacgttaaagactcttctctgcgcgtaccaaacggtgtatccggtacggttatcgacgttcaggtctttactcgcgatggcgtagaaaaagacaaacgtgcgctggaaatcgaagaaatgcagctcaaacaggcgaagaaagacctgtctgaagaactgcagatcctcgaagcgggtctgttcagccgtatccgtgctgtgctggtagccggtggcgttgaagctgagaagctcgacaaactgccgcgcgatcgctggctggagctgggcctgacagacgaagagaaacaaaatcagctggaacagctggctgagcagtatgacgaactgaaacacgagttcgagaagaaactcgaagcgaaacgccgcaaaatcacccagggcgacgatctggcaccgggcgtactgaagattgttaaggtatatctggcggttaaacgccgtatccagcctggtgacaagatggcaggtcgtcacggtaacaagggtgtaatttctaagatcaacccgatcgaagatatgccttacgatgaaaacggtacgccggtagacatcgtactgaacccgctgggcgtaccgtctcgtatgaacatcggtcagatcctcgaaacccacctgggtatggctgcgaaaggtatcggcgacaagatcaacgccatgctgaaacagcagcaagaagtcgcgaaactgcgcgaattcatccagcgtgcgtacgatctgggcgctgacgttcgtcagaaagttgacctgagtaccttcagcgatgaagaagttatgcgtctggctgaaaacctgcgcaaaggtatgccaatcgcaacgccggtgttcgacggtgcgaaagaagcagaaattaaagagctgctgaaacttggcgacctgccgacttccggtcagatccgcctgtacgatggtcgcactggtgaacagttcgagcgtccggtaaccgttggttacatgtacatgctgaaactgaaccacctggtcgacgacaagatgcacgcgcgttccaccggttcttacagcctggttactcagcagccgctgggtggtaaggcacagttcggtggtcagcgtttcggggagatggaagtgtgggcgctggaagcatacggcgcagcatacaccctgcaggaaatgctcaccgttaagtctgatgacgtgaacggtcgtaccaagatgtataaaaacatcgtggacggcaaccatcagatggagccgggcatgccagaatccttcaacgtattgttgaaagagattcgttcgctgggtatcaacatcgaactggaagacgagtaa

SEQ ID NO: 460074 - DNA, 366 bp, Shigella boydii
atgtctatcactaaagatcaaatcattgaagcagttgcagctatgtctgtaatggacgttgtagaactgatctctgcaatggaagaaaaattcggtgtttccgctgctgctgctgtagctgtagctgctggcccggttgaagctgctgaagaaaaaactgaattcgacgtaattctgaaagctgctggcgctaacaaagttgctgttatcaaagcagtacgtggcgcaactggcctgggtctgaaagaagctaaagacctggtagaatctgcaccggctgctctgaaagaaggcgtgagcaaagacgacgcagaagcactgaaaaaagctctggaagaagctggcgctgaagttgaagttaaataa

SEQ ID NO: 460075 - DNA, 498 bp, Shigella boydii
atggctttaaatcttcaagacaaacaagcgattgttgctgaagtcagcgaagtagccaaaggcgcgctgtctgcagtagttgcggattcccgtggcgtaactgtagataaaatgactgaactgcgtaaagcaggtcgcgaagctggcgtatacatgcgtgttgttcgtaacaccctgctgcgccgtgctgttgaaggtactccgttcgagtgcctgaaagacgcgtttgttggtccgaccctgattgcatactctatggaacacccgggcgctgctgctcgtctgttcaaagagttcgcgaaagcgaatgcaaaatttgaggtcaaagccgctgcctttgaaggtgagctgatcccggcgtctcagatcgaccgcctggcaactctgccgacctacgaagaagcaattgcacgcctgatggcaaccatgaaagaagcttcggctggcaaactggttcgtactctggctgctgtacgcgatgcgaaagaagctgcttaa

SEQ ID NO: 460076 - DNA, 705 bp, Shigella boydii
atggctaaactgaccaagcgcatgcgtgttatccgcgagaaagttgatgcaaccaaacagtacgacatcaacgaagctatcgcactgctgaaagagctggcgactgctaaatttgtagaaagcgtggacgtagctgttaacctcggcatcgacgctcgtaaatctgaccagaacgtacgtggtgcaactgtactgccgcacggtactggccgttccgttcgcgtagccgtatttacccaaggtgcaaacgctgaagctgctaaagctgcaggcgcagaactggtaggtatggaagatctggctgaccagatcaagaaaggcgaaatgaactttgacgttgttattgcttctccggatgcaatgcgcgttgttggccagctgggccaggttctgggtccgcgcggcctgatgccaaacccgaaagtgggtactgtaacaccgaacgttgctgaagcggttaaaaacgctaaagctggccaggttcgttaccgtaacgacaaaaacggcatcatccacaccaccatcggtaaagtggactttgacgctgacaaactgaaagaaaacctggaagctctgctggttgcgctgaaaaaagcaaaaccgactcaggcgaaaggcgtgtacatcaagaaagttagcatctccaccaccatgggtgcaggtgttgcagttgaccaggctggcctgagcgcttctgtaaactaa

SEQ ID NO: 460077 - DNA, 429 bp, Shigella boydii
atggctaagaaagtacaagcctatgtcaagctgcaggttgcagctggtatggctaacccgagtccgccagtaggtccggctctgggtcagcagggcgtaaacatcatggaattctgcaaagcgttcaacgcaaaaactgattccatcgaaaaaggtctgccgattccggtagtaatcaccgtttacgctgaccgttctttcactttcgttaccaagaccccgccggcagcagttctgctgaaaaaagcggctggtatcaagtctggttccggtaagccgaacaaagacaaagtgggtaaaatttcccgcgctcagctgcaggaaatcgcgcagaccaaagctgccgacatgactggtgccgacattgaagcgatgactcgctccatcgaaggtactgcacgttccatgggcctggtagtggaggactaa

SEQ ID NO: 460078 - DNA, 546 bp, Shigella boydii
atgtctgaagctcctaaaaagcgctggtacgtcgttcaggcgttttccggttttgaaggccgcgtagcaacgtcgctgcgtgagcatatcaaattacacaacatggaagatttgtttggtgaagtcatggtaccaaccgaagaagtggttgaaatccgtggcggtcagcgtcgcaaaagcgaacgtaaattcttccctggctacgtcctcgttcagatggtgatgaacgacgcgagctggcacctggtgcgcagcgtaccgcgagtgatgggcttcatcggcggtacttccgatcgtcctgcgccaatcagcgataaagaagtcgatgcgattatgaaccgcctgcagcaggttggtgataagccgcgtccgaaaacgctgtttgaaccgggtgaaatggtccgtgttaatgatggtccgttcgctgacttcaacggtgttgttgaagaagtggattacgagaaatctcgtctgaaagtgtctgtttctatcttcggtcgtgcgaccccggtagagctggacttcagccaggttgaaaaagcctaa

SEQ ID NO: 460079 - DNA, 384 bp, Shigella boydii
atgagtgcgaataccgaagctcaaggaagcgggcgcggcctggaagcgatgaagtgggtcgttgtggtggcattgctcttggtggcgattgtcggcaactacctttatcgcgacattatgctgccgctgcgtgcgctggccgtagtaattctgattgctgcagcgggtggtgtcgcgctgttaacgacaaaaggtaaagctaccgttgcttttgcccgtgaagcgcgtaccgaagtccgtaaggtcatttggccgactcgccaggaaacattgcacaccacgctgattgtggctgcggttaccgcagtaatgtcactgatcctgtggggactggatggtattctggttcgcctggtatcctttatcactggcctgaggttctga

SEQ ID NO: 460080 - DNA, 552 bp, Shigella boydii
atggctatcaatggattgtttgtcagaacggatccgcaacgtcgccgctatggcgttgcgttacttgtgggtgtactttcaggaattatttcagcatttgttaaatggggagcggaagtccccttgccaccgcgcacattttccggtggtcgcgatgaatttaacccgccgtatatctttctacgggattatttaggtatcgacccaacccaaactgtgtatacattctcggaacatattatcaacccggtgatggtgacgcatatcatcttctcactggtttttgcgatagggtattgtattgtcgcggaaattttcccgaaagtgaaattatggcaggggatattagcagggcttattgtgacagtggcagtccacggtatattttgcccggtgctgaatttaacgccgccgctcactcaattgccttttgacgaatatgcctctgaaatcctggggcatattttctggttctggataatagaaattatgcgccgcgacttacgtaatcgcattactcatgagccagatccggaagtcgcaatccggtga

SEQ ID NO: 460081 - DNA, 687 bp, Shigella boydii
atgcaaaagctaaaacagcaggtgtttgaagccaacatggatctgccgcgctatgggctggtgacctttacctggggcaacgtcagcgctatcgaccgcgaacgcgggctggtggtgatcaagcccagcggcgttgcctacgaaaccatgaaagcagacgatatggtggtggtcgatatgagcggcaaggtggtagaagggaagtatcgcccgtcttctgacaccgcgacgcatcttgaactctaccgtcgttacccgtcgctcggcggcattgtccatacccattccactcatgccaccgcatgggcgccggcggggctggcgatcccggcgttaggcaccacgcacgccgactacttctttggcgacatcccgtgtacgcgtggattaagcgaagaagaggtgcagggcgagtatgaactgaacaccggcaaagtgattatcgaaacgctgggtgacgccgagccgctgcatacgccgggaattgtggtgtatcagcacgggccgttcgcctgggggaaagatgcccacgacgcggtgcataacgcggtggtgatggaagaagtggcgaaaatggcgtggattgcgcgcagtattaacccacaactgaatcacatcgacagcttcctcatgaataaacacttcatgcgtaagcacggtcctaacgcctattacgggcagaagtaa

SEQ ID NO: 460082 - DNA, 855 bp, Shigella boydii
atgttgtccaaacaaatcccgcttggcatctatgaaaaagcgctccccgccggggagtgctggctggaacgcctgcgactggcaaaaacgttgggcttcgattttgtcgagatgtcggtagatgaaactgacgagcgcctgtcgcgcctcgactggagccgcgagcagcgtctggcgctggtgaatgcgattgttgaaaccggcgtgcgtgtgccgtccatgtgcctttctgcccatcgtcgtttcccgttgggcagcgaagatgacgcggtgcgggcgcaggggctggagattatgcgtaaagccatccagttcgcccaggacgttggcattcgcgtgatccagctggcgggctatgacgtttactatcaggaagccaataacgaaacgcgtcgtcatttccgtgacggcctgaaagagagcgttgagatggcgagccgcgcgcaggtgacgctggcgatggagatcatggattatccgttgatgaactccatcagcaaggcgctgggttacgcgcactatctcaacaacccgtggttccagctctacccagatatcggcaacctgtcggcgtgggacaacgatgtgcagatggagttgcaggccggaatcgggcatatcgtcgcggtgcatgtgaaagacaccaaaccgggcgtcttcaaaaacgtgccatttggcgaaggtgtggtggatttcgaacgttgcttcgaaacgctcaaacagagtggctattgcgggccgtacctgattgagatgtggagcgaaacggcggaagacccggcggcagaagtggtgaaagcgcgtgattgggtgaaagcgcgcatggccaaagcaggcatggtggaggcggcataa

SEQ ID NO: 460083 - DNA, 651 bp, Shigella boydii
atgtcattaccgatgttgcaagtcgcgctggacaaccagactatggatagcgcctacgaaaccactcgcctgattgccgaagaagtcgacattatcgaagtgggtaccattctgtgcgtgggcgaaggcgtgcgtgcggttcgcgatctgaaagcgctctacccgcacaaaatcgtgctggcagacgccaaaattgccgatgcgggcaaaattctttctcgtatgtgcttcgaagccaacgctgactgggtgaccgtgatttgttgtgcggatatcaacaccgccaaaggtgcgctggacgtagcaaaagagtttaacggcgacgtgcagatcgaactgaccggttactggacctgggaacaggcgcaacagtggcgcgacgcaggtattcagcaggtggtttatcaccgcagccgtgacgcgcaggccgctggcgtggcgtggggtgaagccgatatcactgcgatcaaacgtctttccgatatgggcttcaaagtcaccgtcaccggtggcctggtgctggaagatctgccgctgttcaaaggcattccaattcatgtgtttatcgccggtcgcagcatccgtgatgccgcttctccggttgaagccgcgcgtcagttcaaacgttccatcgccgaactgtggggctaa

SEQ ID NO: 460084 - DNA, 465 bp, Shigella boydii
atgaaattacgtgattcgctggcggagaataaatccatccgcctgcaggctgaagctgagacatggcaggacgcagtaaaaatcggcgttgacctgctggtggcggcggatgttgtcgagccgcgttactaccagacgattctggatgcggttgaacagcacggtccgtactttgtgctcgcaccaggcctggcaatgccgcacggtcgcccggaagagggcgttaagaaaaccggttttgcgctggtgacgctgaaaaagccgctggagttcaaccacgaagataacgacccggtggatatcctcatcaccatggcggcggtcgatgccaacacgcaccaggaagtgggcatcatgcagatcgtcaacctgtttgaagatgaagaaaatttcgaccgtttacgtgcctgccgtaccgagcaggaagtactggatctcattgaccgcaccaacgcggcagcttaa

SEQ ID NO: 460085 - DNA, 306 bp, Shigella boydii
atgaccgtacgtattctggctgtgtgtggcaacggacaaggcagttccatgatcatgaagatgaaagtggaccagtttttaacccaatcaaacattgaccacacggtaaatagctgcgcggttggcgaatacaaaagcgagttgagcggcgcggatatcatcatcgcttctacgcacattgcgggcgaaatcaccgtgaccggcaacaaatacgtggttggcgtgcgcaacatgctctctcctgccgactttggcccgaaactgctggaagtgatcaaagcgcatttcccgcaggatgtgaagtaa

SEQ ID NO: 460086 - DNA, 1353 bp, Shigella boydii
atgaccaatgccccgttgttgctgggtattgtgacctgtctgggctacatcctactgcgcaaaagtgtcagcgttattattaaaggcacgattaaaaccataattggtttcatgttgttgcaggcagggtccggcatcctcaccagcaccttcaaaccggtggtggcgaaaatgtccgaagtctacggcattaacggcgcaatttccgatacttacgcgtcgatgatggcaaccatcgaccgcatgggcgatgcctatagctgggtaggttacgcggtgttgttagcgctggcgctgaacatctgttacgtgctgctgcgtcgcattaccggtattcgtaccatcatgctgactggtcatatcatgttccagcaggcggggctgattgccgttacgttgtttattttcggctactccatgtggacaaccattatctgcacggcgattctggtttcgctctactggggcattacctccaacatgatgtacaagccgactcaggaagtgacggacggctgcggtttctccatcggtcaccagcaacagtttgcatcatggattgcctataaagttgcgccgttcctcggcaaaaaagaggaaagcgttgaagacctcaaactgccaggctggctgaatattttccacgacaacatcgtctccacggcgattgtgatgaccatcttctttggtgccattctgctctccttcggtatcgacaccgtgcaggcgatggcaggcaaagtgaactggacggtgtacatcctgcaaactggtttctccttcgcggtggcgatcttcatcatcattcagggcgtgcgcatgtttgtggcggaactctctgaagcatttaacggtatctcccagcgcctgatccctggtgcggttctggcgattgactgtgcggctatctatagcttcgcgccgaacgccgtggtttggggctttatgtggggcaccatcggtcagctgattgcggttggcatcctggtcgcctgcggttcctcgatcctgattattcccggctttatcccgatgttcttctccaacgccaccatcggcgtgttcgctaaccacttcggcggctggcgtgcggcgctgaagatatgtctggtgatggggatgattgaaatctttggctgcgtctgggcggtgaaactcaccggtatgagcgcctggatgggcatggcggactggtcgattctggcaccgccgatgatgcagggcttcttctccatcggtatcgcctttatggccgtcatcattgtaattgcactggcttatatgttcttcgctggccgcgcactgcgcgcagaagaagatgcagaaaaacaactggcagaacagtctgcttaa

SEQ ID NO: 460087 - DNA, 1065 bp, Shigella boydii
atgagtaaagtgaaaagtatcacccgagaatcctggatcctgagcactttcccggagtggggtagctggctgaatgaagaaattgaacaagagcaggtcgcccctggcacatttgcgatgtggtggctaggctgcaccgggatctggttgaaatcagaaggtggcaccaacgtttgcgttgatttctggtgcggcactggcaaacaaagtcacggtaacccgttaatgaaacagggtcaccagatgcagcgcatggctggcgtgaaaaaactgcagccaaacctacgcaccaccccgtttgttcttgatccgtttgcgattcgccagatcgacgcggtactggcgactcacgatcacaacgatcatatcgacgttaacgtcgctgctgccgtgatgcagaactgtgctgatggcgtaccattcattggaccgaaaacctgcgttgatttgtggattggctggggcgtaccgaaagagcgttgcatcgtggtcaaaccgggcgatgtggtgaaagtgaaagacattgaaattcatgcgcttgatgctttcgaccgtactgcactgatcaccctgcctgccgatcaaaaagcggctggcgtactgccggacggcatggacgatcgcgcggtgaactatctgttcaaaacgcctggcggctccctgtatcacagcggcgactcccactactctaactattatgcgaagcacggtaacgaacatcagatcgacgtggctttaggttcatacggcgaaaacccgcgcggtatcaccgacaaaatgaccagcgccgatatgctgcgtatgggtgaagccctgaatgcgaaagtggttatcccgttccaccacgatatctggtcaaacttccaggccgctccgcaagagatccgcgtgctgtgggagatgaaaaaagatcgtctgaagtatggcttcaagccgtttatctggcaggttggcggcaaatttacctggccactggataaagacaacctcgagtaccactatccgcgcggtttcgatgattgcttcactattgaaccggatctgccgttcaagtcattcctgtaa

SEQ ID NO: 460088 - DNA, 756 bp, Shigella boydii
atgactgaagcacaaagacatcaaatcctcctggaaatgctcgcacaattgggctttgtgaccgttgagaaagtcgttgagcgtctgggaatttcgcctgccactgcgcgacgcgatatcaataaacttgacgaaagcggcaaactcaaaaaggtgcgcaatggcgcagaagctattacccaacagcgcccgcgctggacgccgatgaatctgcatcaggcgcagaatcacgatgaaaaagtacgtattgctaaagcggcctcgcagctggttaatccgggcgaaagcgtagtcatcaactgcggctccaccgcgtttctgcttgggcgggaaatgtgtggcaagccagtgcaaatcatcactaattatctaccgctggcaaattacctgatcgatcaagaacatgacagcgtgatcattatgggtggacagtacaacaaaagtcagtccatcactttaagcccgcagggcagcgaaaacagtctctatgccgggcactggatgtttaccagcggaaaagggctgaccgcagaagggttgtataaaaccgatatgctgacagcaatggcagagcagaagatgctgagcgtggtagggaaactggtggtactggttgatagcagtaagattggcgaacgcgcgggaatgctttttagccgtgccgatcaaatcgatatgcttatcaccggcaaaaatgctaacccggaaatcctgcaacaactggaagcgcaaggggtcagcattctgcgtgtttaa

SEQ ID NO: 460089 - DNA, 750 bp, Shigella boydii
atgattgaaatagaatcacgcgagctggcagatattcccgttcttcatgcttatcctgtcgggcaaaaagataccccgttaccgtgcgtaattttttatcacggctttacttcatccagcctggtgtatagctattttgccgttgtgctggcgcaggctggtttgcgggtgatcatgccggatgcgcccgatcacggtagccgttttagtagcgacgaagcgcggcggttaaatcaattctggcaaatcttgctacaaagtatgcaggaattcactactttacgtgcggcaatagccgaagaaaactggctgcttgatgaccgtctggcagtcggtggcgcgtcgatgggcgcgatgacggcactgggaattaccgctcgccaccccacggtgaaatgtaccgccagcatgatgggatcgggctattttacatcgctcgcccgttcactgtttccaccgctgatacctgaaacggcagcacagcagaatgaattcaataacattatcgcgccgctggcagagtgggaagcgacaaaccacctggaacaacttggggacagacctctactgctgtggcatggcctcgaggatgacgttgtgcctgccgacgaatcactacgtttgcagcaggccttaagcgagacgggacgggataaactgctaacctgttcatggcagccaggcgtgcgtcaccgcattacgcctgaggcgttagatgctgccgtgacatttttccgccagcatctttaa

SEQ ID NO: 460090 - DNA, 330 bp, Shigella boydii
atggttagcaggaaacgtaatagcgttatttaccggtttgccagtttattattggtgttgatgttaagtgcctgtagcgcactgcaaggtacgccacagccagcaccgccagtaacgaaccatccgcaagagattcgccgcgaccagacgcaagggttacagcgaataggtagcgttagcacgatggttcggggttctccggatgacgcattagcagaaatcagagcaaaagctgtcgctgcaaaagctgattattacgttgtcgtcatggtggacgaaaccatcgtgacaggacagtggtattcacaagccattttgtaccgtaaataa

SEQ ID NO: 460091 - DNA, 276 bp, Shigella boydii
atgaaacaattacttgcttcaccctcgctgcaattagtgacttatcctgcgagcgccacggcacagtctgcagaattcgccagtgctgactgcgtgacgggcctgaatgaaataggtcagatctcagttagcaatatttcaggggatccgcaggacgtggaacgtatcgtggcgttaaaggccgatgaacaaggtgcgtcatggtaccgcattattaccatgtacgaagaccagcagcctgataactggcgcgtacaggcgatactgtatgcatga

SEQ ID NO: 460092 - DNA, 1626 bp, Shigella boydii
gtgcactggcaaactcacaccgtttttaatcaacctataccattaaataacagcaacttatacctgtctgatggcgcgctctgtgaagcggtaacgcgtgaaggtgctggctgggatagcgattttctagccagtattggtcagcagttaggaacggctgaatctcttgaactggggcggctggcgaatgtgaatccgcctgaattattgcgctacgatgcgcaaggacgccgtctggacgatgtgcgttttcaccccgcctggcacctgctgatgcaggcgttatgtaccaatcgggtgcacaatcttgcctgggaagaagacgctcgctccggcgcatttgtggcgcgcgcggcgcgttttatgttacatgcgcaggttgaggctgggtcgttatgtccaataacgatgacctttgccgccacgccattgttgttacagatgttacccacgccgtttcaggactggaccacgccgctgctgagcgatcgctacgattctcacttattgccaggtgggcaaaaacgcggtttgttgattggcatgggaatgacggaaaagcagggcggttccgatgtcatgagcaacaccacccgtgcagagcgtctggaagatggctcttatcggctggtggggcataaatggtttttctcggtgccgcaaagcgatgcgcatctggtgctggcgcagactacgggcggtttgtcctgcttttttgtgccgcgctttttgcctgatgggcaacgcaacgcgattcgcctcgagcggctgaaagataagctgggtaatcgctctaacgccagttgcgaagtggagtttcaggatgccattggctggttgttggggcaggaaggggaaggaattcgtctgatcctgaaaatgggtgggatgacgcgttttgattgcgccctgggtagccatgccatgatgcgccgtgcattttcgctggcgatttatcatgcacatcaacgccatgtttttggtaatccattgatccaacagccccttatgtgtcatgtcttaagtcgcatggcacttcagcttgaagggcaaacggcgttgctgtttcgtcttgcgcgagcgtgggaccggcgtgccgatgccaaagaagccctgtgggcgcgtttatttacgcctgcggcaaaatttgtgatctgcaaaagaggtatgccgtttgtggccgaagcgatggaggtgctgggcggcattggttattgcgaggagagcgagctgccgcggctttaccgggagatgccggtaaacagtatttgggaaggttccggcaatattatgtgcctggatgtgttgcgcgttctcaataagcaagcgggcgtatacgacttattgtcggaagcatttgtggaagtgaaagggcaggatcgctattttgatcgcgcggttcgtcgtttacagcagcagctgcgtaagccagctgaagaactggggcgagagattactcatcagctattcctgctgggctgcggtgcgcaaatgttgaaatatgcttctccgccaatggcgcaggcgtggtgtcaggtgatgttagatacgcgcggcggcgtacggttgtcagagcagatccagaatgatttattgctgcgggcgacggggggagtgtgtgtgtaa

SEQ ID NO: 460093 - DNA, 1059 bp, Shigella boydii
atgctgagacacaacgttcctgtgcgacgggatctggaccagatcgccgctaacaacggtttcgactttcatatcatcgacaatgaaatctattgggacgagagtcgggcttaccgttttactctgcgccagattgaagagcagatcgaaaaaccgactgcggaactgcatcagatgtgccttgaggtggtggatcgcgcggttaaagacgaagagatcctgacgcaactggcgatcccgccgttgtactgggatgtgatcgccgaaagctggcgcgcacgcgatccttcgctgtatggccggatggattttgcctggtgtggcaatgcgccggtgaagctgctggagtacaacgccattcaggaacgcctgatttcgcgctttagtgagctttacagtcgggaaccgttttatttttgctgctgtcaggacaccgatgaagacaggagtaccgtgctgtacttgcaggactgcgcccagcaggcagggcaggagtcgcggtttatctacattgaagatctcggtttgggcgtcggcggcgtactgaccgatcttgatgataatgtcatccagcgtgcatttaagctgtatccgctggagtggatgatgcgtgacgataacggtccgctgctgcgcaagcgtcgcgagcaatgggtggagccgttatggaaaagtatcttgagtaataaagggctaatgccgctgctttggcgcttctttcctggtcatcctaaccttcttgcatcctggtttgagggcgaaaaaccgcagattgccgctggcgaaagctatgtgcgtaaaccgatctactcacgcgaaggcggaaacgtcaccattttcgacggtcagaataacgtcgttgaccacgctgatggtgattacgccgatgaaccgatgatctaccaggcgtttcaacctctgccgcgatttggcgatagctacacactcatcggtagctggattgtcgatgatgaagcgtgcggaatggggatccgtgaagataacacgctgatcaccaaagacacctcacgtttcgttccgcattacattgctggataa

SEQ ID NO: 460094 - DNA, 639 bp, Shigella boydii
atggccagaaaacgcaaatcaagaaataacagtaaaattggtcacggagcgatcagtcgcattggtagaccgaataatccttttgaaccgcgtcgcaatcgctacgcacaaaaatacttaacgttggcgctaatgggcggtgccgctttttttgtattgaaaggttgtggcgatagtggcgatgtcgataacgacggcgacggaacgttttattcgacagtgcaggattgtattgatgacggtaataatgccgacatttgcgcgcgtggctggaacaacgccaaagcggcattttatgccgatgttccgaagaatatgactcagcagaattgtcagtctaagtacgaaaattgctactacgacaatgttgaacagagttggatcccggtcgtttctggatttttgttaagccgggttattcgtaaagatcgcgatgagccgttcgtctataacagcggcggatcctcatttgcttcccgccccgtctggcgcaacacttccggtgattactcctggcgctccggttctggcaaaaaagagtcttactcttcaggcggctttaccaccaaaaaagcgtcaaccgtttcgcgcggcggctatggtcgttcttccagcgcccgtgggcattggggaggctaa

SEQ ID NO: 460095 - DNA, 399 bp, Shigella boydii
atgcatatactggattcacttcttgcctttagtgcctatttttttattggcgtggctatggtgattatttttctgtttatctactccaaaattacaccgcacaacgaatggcaattaatcaaaaacaataataccgcggtgtcactggcattcagcggtacattgttgggttacgtgatccccttatccagtgcggcaatcaatgcggtgagtattccagactatttcgcctggggcgggattgcactggtgattcagttactcgtttttgctggtgtcagactttatatgcccgcattaagcgaaaaaattattaatcacaataccgcagcaggaatgtttatgggaaccgccgcgctggctggcggtatttttaacgcagcttgtatgacatggtaa

SEQ ID NO: 460096 - DNA, 345 bp, Shigella boydii
atgtatttacgaccagacgaggtggcgcgcgtacttgaaaaagtcggttttactgtcgatgtggtaacccagaaagcgtatggttaccgccgtggggaaaattatgtctatgttaatcgcgaagcgcgaatgggacgtaccgctctggtaattcatccaacattaaaagaacgcagttcaacactggctgaacccgcttccgatattaaaacttgcgatcattaccagcaatttccgctctatttagcaggcgagcgacacgagcattacggtatcccgcatggcttcagttcgcgtgttgcgcttgaacgttatttgaatggtttatttggcgaagccagttaa

SEQ ID NO: 460097 - DNA, 450 bp, Shigella boydii
atgttctcaccgcagtcacgcttgcgtcatgcagttgcagatacgttcgcgatggttgtttactgttctgtcgtgaacatgtgtattgaagttttcctctccggaatgagcttcgaacagtctttttattccagattggtagcgattccggtgaacatcttaattgcatggccatacggtatgtaccgcgatctgtttatgcgcgcggcacgcaaagttagcccgtcgggctggataaaaaatctggctgatatcctggcttatgtgacgttccagtcaccggtgtatgtggcgatcttgttagtggtgggcgcagactggcatcagattatggcggcggtcagttcaaacatcgttgtttcgatgttgatgggggcggtttatggctacttcctcgattattgccgccgactgtttaaagtcagccgttaccagcaggtaaaagcctga

SEQ ID NO: 460098 - DNA, 405 bp, Shigella boydii
atgtccgtaatgttacaaagtttaaataacattcgaaccctccgtgcgatggctcgcgaattctccattgacgttcttgaagaaatgctcgaaaaattcagggttgtcactaaagaaagacgtgaagaagaagaacagcagcagcgtgaactggctgagcgtcaggaaaaaattagcacctggctggagctgatgaaagctgacggaattaacccggaagagttattgggtaatagctctgctgctgcaccacgtgctggtaaaaaacgccagccgcgtccggcgaaatataaattcactgatgttaacggtgaaactaagacctggaccggtcagggccgtacaccgaagccaattgctcaggcgctggcagaaggtaaatctctcgacgatttcctgatctaa

SEQ ID NO: 460099 - DNA, 525 bp, Shigella boydii
atggctttgacaaccatttcgccgcatgatgcacaagaattaatcgcacgcggcgcaaagttaatcgatattcgtgacgctgatgaatatcttcgtgaacatattcctgaagcagatctggctccattatccgtgctggaacagtcaggtcttccacctaaattacgtcgcgagcaaattatattccactgccaggcaggtaaacgcaccagtaataacgccgataaattagcagcgattgccgctcccgcagaaatatttttactcgaagatgggattgatggctggaaaagagctggattgccagtagcggtaaataaatctcaacccttgccgttaatgcgccaggtgcagatcgctgcgggtggtttaatattaatcggcgttgtactgggttataccgtaaatagcggtttcttcttattaagtggctttgttggtgccgggttactgtttgcaggaatcagcggtttttgtggaatggcaaggttgttagataagatgccgtggaaccaacgagcttga

SEQ ID NO: 460100 - DNA, 300 bp, Shigella boydii
atgactgaactcgcgcaattacaggccagtgccgaacaggcagcggccttattgaaagcaatgagccatcctaaacgattgctgattctgtgcatgcttagcggttcccccggcaccagcgcgggagagctgacgcgcattaccggactgagtgcctctgcgacatcacagcatctcgctcgtatgcgggacgaagggcttatcgacagccaacgggatgcccaacgcattctatattccattaaaaatgaggcggtaaatgctattatcgccaccctgaaaaatgtctattgtccgtaa

SEQ ID NO: 460101 - DNA, 159 bp, Shigella boydii; identical to SEQ ID NO: 4185

SEQ ID NO: 460102 - DNA, 450 bp, Shigella boydii
atgggtctgttcaattttgtgaaagatgccggagaaaaactctgggacgcggttacaggtcagcacgataaagacgatcaggcgaagaaggtgcaggagcatctgagcaaaaccggtatacctgatgccgataaagtgaacattcaaattgccgacggcaaagcgacggtcactggtgacggcctgagtcaggaggcgaaggagaaaatccttgttgcggtggggaatatttccggtattgccagtgttgatgatcaggtgaaaacggcgacaccagccactgccagccagttttataccgttaagtctggcgacactctgagtgccatttccaaacaggtctacggtaacgctaatctgtacaataaaatcttcgaagcgaataaaccgatgctaaaaagcccggataaaatttatccggggcaagtgttgcgtattccggaagagtag

SEQ ID NO: 460103 - DNA, 663 bp, Shigella boydii
atgaccattacgtctctggatggctatcgctggctgaagaacgatattattcgcggtaattttcaaccggatgaaaaattacggatgagtttgctgacatcgcgttatgcacttggcgttgggccgttgcgggaagcactttctcaactggtggcggaacggctggtcacggtggtgaatcaaaaagggtatcgggtggcgtctatgtcagagcaggagctgctcgatattttcgatgcccgcgccaatatggaagcgatgttagtgagtctggcgattgcccgcggtagcgatgagtgggaggcagaagttctcgcaaaagcgcatctgctcagtaagctggaagcctgtgacgccagcgagaaaatgcttgatgagtgggatctgcgtcatcaggcgtttcatacagcaattgtggcgggctgtggttctcactatttgctgcaaatgcgtgaacggttgtttgatctggcggcgcgctatcgatttatctggctgcggcgaacggtgctttcggtagaaatgctggaggataaacacgatcagcaccagaccctgactgcggcggtactggcgcgagataccgcgcgcgccagtgagttaatgcgccagcatttactgacgccaattcccattatccagcaggcgatggctggcaattaa

SEQ ID NO: 460104 - DNA, 1401 bp, Shigella boydii
atggggcaatcatcgcaaccacatgagttaggcggcgggctgaaatcacgccacgtcaccatgttgtctattgccggtgttatcggcgcaagtctgtttgtcggttccagcgtcgccatcgccgaagcgggcccggcggtattactggcctatctgttcgccgggctactggtggttatgattatgcggatgttggcggaaatggcggttgccacgcccgataccggttcgttttccacctatgccgataaagccattggtcgctgggcgggctataccatcggctggttgtactggtggttttgggtactggttatcccgctggaagccaacatcgccgccatgatcctgcactcgtgggttccaggcattcccatctggttattttccctcgtcattacccttgccttaactggcagtaatttattaagcgttaaaaactacggcgaatttgagttctggctggcgctgtgcaaagtcatcgctatcctggcctttattttccttggtgcagtcgcaattagcggtttttacccttatgccgaagtgagcgggatctcaagattgtgggatagcggcggctttatgcccaacggcttcggtgcggtattaagcgcgatgttgatcaccatgttctcgtttatgggcgcagaaattgtcaccattgccgccgcggaatccgacacgccggaaaaacatattgtccgcgccactaactcggttatctggcgtatttctatcttctatttgtgctctatttttgtcgtcgtggcattaattccgtggaatatgcccggactaaaagccgtcggttcttatcgctcggtactggaattgctcaatattccccatgcgaaattaatcatggactgtgtgatattactttccgtaaccagctgcctgaactcggcgctgtataccgcttccaggatgctctactccttaagccgtcgcggagatgcgcctgcggtaatgggtaaaatcaaccgcagtaaaaccccgtacgtggcggtgttactctccaccggcgcggcattcttaacggtggtggtgaactattacgcgcctgcgaaggtatttaaatttctgatcgacagctccggcgctatcgccctgctggtttatttagtcatcgccgtttcacagttgcggatgcgcaaaattctgcgagcagaaggaagcgaaattcgcttgcgcatgtggctttatccctggctcacctggctggtcatcggctttattacctttgtgttggtagtgatgctattccgcccggcgcaacagttagaagtgatctccaccgacttattagcaatagggattatctgtaccgtgccaattatggcgcgctggaataagctgataatgtggcaaaaaacacccgttcataatacgcgctga

SEQ ID NO: 460105 - DNA, 426 bp, Shigella boydii
atggacgctgttgcaccgggcggtctgggcggcacctatgccggtaacccgattgcctgcgtggctgcgctggaagtgttgaaggtgttcgagcaggaaaatctgctgcaaaaagccaacgatctggggcagaagctaaaagacggattgttggcgatagccgaaaaacacccggagatcggcgacgtacgcgggctgggagcgatgattgccatcgagctgtttgaagatggcgatcacagcaaaccggacgcaaaactcaccgccgggatcgtggcacgcgcccgcgataagggcctgattcttctctcctgcggcccgtattacaacgtgctgcgcatccttgtaccgctcaccattgaagacgctcagatccgtcagggtctggagattatcggtcagtgttttgatgaggcgaagcagtag

SEQ ID NO: 460106 - DNA, 888 bp, Shigella boydii
atgaacagcaataaagagttaatgcagcgccgcagtcaggcgattccccgtggcgttgggcaaattcacccgattttcgctgaccgcgcggaaaactgccgggtgtgggacgttgaaggccgtgagtatcttgatttcgtgggcgggattgcggtgctcaataccgggcacctgcatccgaaggtggtggccgcggtggaagcgcagttgaaaaaactgtcgcacacctgcttccaggtgctggcttacgagccgtatctggagctgtgcgagattatgaatcagaaggtgccgggcgatttcgccaagaaaacgctgctggttacgaccggttccgaagcggtggaaaacgcggtaaaaatcgcccgcgccgccaccaaacgtagcggcaccatcgcttttagcggcgcgtatcacgggcgcacgcattacacgctggcgctgaccggcaaggtgaatccgtactctgcgggcatggggctgatgccgggtcatgtttatcgcgcgctttatccttgcccgctgcacggcataagcgaggatgacgctatcgccagcatccaccggatcttcaaaaatgatgccgcgccggaagatatcgccgccatcgtgattgagccggttcagggcgaaggcggtttctacgccgcgtcgccagcctttatgcagcgtttacgcgctctgtgtgacgagcacgggatcatgctgattgccgatgaagtgcagagcggcgcggggcgtaccggcacgctgtttgcggtggagcagatgggcgtggcgccggatcttaccacctttgcaaaatcgatcgctggcgggcgtcaccgggcgcgcggaagtgatggacgctgttgcaccgggcggtctgggcggcacctatgccggtaa

SEQ ID NO: 460107 - DNA, 549 bp, Shigella boydii
gtgtatgaccgctttgccgaaaaattgcagcaggcggtgagcaaactgcacatcggcgacgggctggataaaggcgtcaccatcgggccgctgatcgatgaaaaagcggtagcaaaagtggaagagcatattgccgatgcgctggagaaaggtgcgcgtgtggtttgcggcggtaaagcggatgaacgcggcggcaacttcttccagccgaccattctggtggacgtgccggccaacgccaaagtgtcgaaagaagagacgttcggccccctcgccccgctgttccgctttaaagatgaagccgatgtgattgcgcaagccaatgacaccgagtttggccttgccgcctatttctacgcccgtgatttaagccgcgtcttccgcgtgggcgaagcgctggagtacggcatcgtcggcatcaataccggcattatttccaatgaagtggccccgttcggcggcatcaaagcctcgggtctgggtcgtgaaggttcgaagtatggcatcgaagattacttagaaatcaaatatatgtgcatcggtctttaa

SEQ ID NO: 460108 - DNA, 927 bp, Shigella boydii
atgaaacttaacgacagtaacttattccgccagcaggcgttgattaacggggaatggctggacgccaacaatggcgggatcatcgacgtcaccaatccggcgaacggcgacaagctgggtagcgtgccgaaaatgggcgctgatgaaacccgcgccgctatcgacgccgccaaccgcgccctgcccgcctggcgtgcgctcaccgccaaagaacgcgccaacattctgcgcaactggttcaatttgatgatggagcatcaggacgatttagcgcgcctgatgaccctcgaacagggcaaaccactggccgaagcgaaaggcgaaatcagctacgctgcctcttttattgagtggtttgccgaagaaggcaaacgtatttatggcgataccattcccggtcatcaggccgataagcgcctgattgttatcaagcagccgattggcgttaccgcagctatcacgccgtggaacttcccggcggcgatgattacccgtaaagccggtccggcgctggcggcaggctgcaccatggtgctgaagcccgccagtcagacaccgttctctgcgctggcgctggcggagctggcgattcgcgcgggcattccggctggcgtgtttaacgtggtcaccggttcggcaggcgcggtcggtaatgaactgaccagcaacccgctggtacgcaaactgtcgtttaccggttcgaccgaaattggccgacagttaatggaacagtgcgcgaaagacatcaaaaaagtgtcgctggagctgggcggcaacgcgccgtttatcgtctttgacgatgccgatctcgataaagccgtggaaggcgcgctggcctcgaaattccgcaacgccgggcaaacctgcgtctgcgccaaccgtttggcgtgtatgaccgctttgccgaaaaattgcagcaggcggtga

SEQ ID NO: 460109 - DNA, 1269 bp, Shigella boydii
atgtatgattttgtgattattggcggcggcatcatcggcatgtcgaccgccatgcaactgattgatgtttatccggatgcccgcattgcgttgctggaaaaagagtccggcccggcctgtcaccagacgggccacaacagcggcgtgatccatgccggggtctattacacgcccggcagcctgaaggcgcagttttgcctggcgggaaaccgcgccaccaaagccttttgcgatcaaaacgacattcgctatgacaactgcggcaagatgctgatcgccacgtccgatctcgaaatggaacggatgcgcgcgttgtgggaacgcacggcggcgaacggtatcgagcgcgagtggttaaacgccgaggaactgcgcgagcgcgaaccgaatatcaccgggctcggcggcatttttgtgccgtccagcggcattgtcagctatcgcgaagtcacagcggcaatggcaaaaatcttccaggccagaggcggtgagattatttataacgccgaagtcagcgccctcagtgagcataaaaacggcgtggtcgtccgaacccgtcagggcggcgaatatgaagcatcgacgctgattagctgttccgggctgatggctaaccggctggtgaaaatgctcggcctcgaaccgggttttattatctgcccgttccgtggcgagtatttccgccttgcgccggagcataaccagattgttaaccatctgatttaccccatccctgacccggcaatgccgtttttgggcgtgcatctcacccgcatgatcgacggcagcgtgaccgtcgggccaaacgcggtgctggcttttaaacgcgaaggctatcgcaagcgcgacttctcatttagcgacacgctggaaattttaggctcgtcggggattcgccgggtgctgcaaaaccatctacgctcaggactgggcgagatgaaaaactcgctgtgcaaaagcggctatctgcggctggtgcaaaagtattgtccccggctttcgttaagcgatctccagccctggcccgccggtgtgcgggcgcaggcggtatcgccggacggcaagctgattgacgattttctgtttgtcaccaccccgcgcacgatccacacctgcaatgcgccctccccggcagcgacatcagcaattcctattggtgcgcatattgtcagcaaggtacaaacgctgttggcaagccagagtaaccccggacgcacgctgcgagcgacacgtagtgtggatgccttacacgccgcatttaatcaataa

SEQ ID NO: 460110 - DNA, 978 bp, Shigella boydii
atgaatgcactgatcgccgtacaaaataacgctgtcgattcaggccaggactatagcggattcactctcatcccgtcggcgcaatccccgcgtctgctggaactcaccttcaccgaacagacgaccaaacagtttctcgaacaggttgccgaatggcccgtgcaggcgctggagtacaaatcgtttctgcgttttcgggtaggcaaaattcttgacgatctgtgtgcgaatcagctgcaaccattgctgttgaagcccctgctaaaccgtgctgaaggtgcgctgttgatcaatgcggtgggtatcgatgatgtggcgcaggcagatgagatggtgaagctggcaacggcggtagcgcatctgattggtcgctcaaatttcgatgcgatgagcggtcagtattacgcgcgtttcgtggtgaaaaatgtcgataactcagacagctatctgcgtcagccgcaccgcgtgatggaactgcacaacgacggcacgtatgtcgaagagatcaccgattacgtgctgatgatgaaaatcgatgagcaaaacatgcagggtggaaattcgttgctgctgcatctcgatgactgggaacatctggaccactatttccgccatccactggcgcgtcgcccgatgcgctttgccgcgccgccgagcaaaaacgtcagcaaagatgttttccatccagtgttcgacgttgatcaacagggtcgcccggtgatgcgctatatcgaccagttcgtccagccaaaagattttgaagaaggcgtgtggttgagcgagctttccgatgccattgaaaccagcaaaggcattctttctgtacccgttcccgttggcaaattcctgttgataaacaacctgttctggctgcacggtcgcgaccgctttactccgcacccggatctgcgccgtgaactgatgcgtcagcgtggctatttcgcttacgccactcaccactaccagacgcatcagtaa

SEQ ID NO: 460111 - DNA, 1554 bp, Shigella boydii
atgtctgagtttgcacgttgccattatgggtatatacaaatccctccagtgacaactttccgcgccgacggaccagaaactcccgaagaagaaaaaggttactggtttcatgcttatcaacccgaagatctttgtaccatccataacccaatgggagatttgcaggattttatcgcattggttaaagatgctaaaaaatttggtatcgatatcattcctgattatacatttaactttatgggaatcgggggtagtggtaaaaatgacctggattatccctctgctgatatacgagcgaagatcagtaaagatatagaaagcggtatccctggctattggcaaggtcaggttttgattccattcattaaagatccagtaacaaaagaacgtaaacaaatccatccagaagatatacatctcactgcaaaagacttcgaagcaagtaaagataacatctctaaggatgaatgggaaaacctccatgcattaaaagaaaagcgtttaaatggaatgcctaaaacaacacccaaaagtggccaggttattatgttgcaaaatcaatacgttcgagaaatgcgaaaatatggcgtacgaggtttacgttatgatgcggcaaaacactcaaaacatgaacaaatagagaggtcgataaccccaccgcttaaaaattataatgagcggttacacaatactaatttatttaacccaaaatatcaaaaaaaagccgttatgaattacatggaatacctggtaacttgtcagttggatgaacaacaaatgtcatcactgctttatgagagagatgatttaagtgccattgatttttctttactcatgaaaacgataaaagccttttcatttggtggagatctccaaacccttgcatcaaaaccgggttccacaatctcaagtatcccatcagaaagacggatattgattaacattaaccacgattttcctaacaatggtaatcttttcaatggctttctatttaaccatcaacaagatgaacaattagcaatggcatatatggccgctctcccgttcagcagacctttagtttactgggatggccaagtattaaaatcaacgactgaaagtaaaaattatgatgggtccacgcgtgtcggcggtgaggcgtggcttaataaaggttgctctacctatcagcagctctacaatgaattccacgcattatatatagataaagcaggaatatggagcgcatttgagggtgtatttgcaactaaaaacgttctggcctttagtcgtggggattctgtgaacattaatcactctcctcatgatggactagttataataaataaaggaaacgaagaagttgaaggtacctggcctaacaaattgcaacctggaatatacaaaaacatggggagtaatagcgttaatattattattaataatacccgaaaaattatcccccctggtaaagtatttacgcttagaggcggaactctaaatatcaatattcctgggcgtagcgctcttcttttagggaaaacaggagaaccgccgaactatctctatttataa

SEQ ID NO: 460112 - DNA, 645 bp, Shigella boydii
atgattcgtattggttgcagttttggttttgggcgcagccatattgcgccagccattaccgaacttatgcgcaattatcctgagttacaggtgcattttgaattgttcgatcggcaaattgatttagtgcaggataatattgatctggatattcgtattaatgacgaaattcctgattattatattgcgcatctgttaacgaaaaataaaagaatattatgcgcagcacctgagtatctgcaaaaatatccgcagccacaatcattacaggaattaagtcgtcatgactgtctggtgaccaaagagcgcgatatgacccacggaatatgggagttggggaacggtcaggagaaaaaatcggtgaaggttagcgggcatctttcctccaatagcggcgagatagtgttgcaatgggcgctggagggcaaagggattatgctgcgttccgagtgggatgtgttgccgtttctggagagtggcaaactggtgcaagtattgccggagtatgcacaaagcgccaatatctgggctgtttaccgggagccgctctatcgcagcatgaaattacgtgtctgcgtggaatttctggcggcatggtgccagcaacggctgggcaagcccgatgaaggctatcaggtcatgtag

SEQ ID NO: 460113 - DNA, 618 bp, Shigella boydii
atgagtgcaatcgcgcctggaatgatcctcatcgcgtacctctgcggctccatttccagtgccattctggtttgccgcttgtgtgggctgcccgatccgcgaaccagcggctccggcaatccaggcgcaaccaatgtgttacgtatcggtggcaagggagcagccgtagcagtactgattttcgacgttctgaaaggaatgttgcccgtctggggcgcgtatgaattaggtgtcagccccttctggctaggcttaattgccatcgccgcctgtcttggacacatctggcccgttttcttcggatttaaaggaggaaaaggcgttgctaccgcttttggtgccatcgcacccattggctgggatctcaccggagtaatggcgggaacctggttactgaccgtgctattgagcggatactcgtcgctgggagcgattgtcagtgcactgattgctccgttttatgtctggtggtttaagccacaattcaccttcccggtttcgatgctctcttgcctgatcctgctgcgtcatcatgacaacatccagcgtctgtggcgtcgtcaggagacaaaaatctggacgaaattcaaaagaaagcgcgaaaaggatcccgagtga

SEQ ID NO: 460114 - DNA, 369 bp, Shigella boydii
atggatattgtatttatagagcaactttcggtaatcaccactattggtgtttacgactgggaacagaccatcgaacagaagttagtgttcgatatcgaaatggcatgggataaccgtaaagcggcgaaaagtgatgatgtggcggattgcctcagttacgctgacattgcagaaacggtggtcagccacgtcgagggggcgcgttttgcgctggtggaacgcgtggctgaagaggtggcggagctgctgttagcacgcttcaactcgccgtgggtgcgcatcaaactcagcaagccaggcgcagtggcgcgggcggcgaatgttggtgtaatcattgagcgtggcaataatctgaaagaaaataattaa

SEQ ID NO: 460115 - DNA, 822 bp, Shigella boydii
atgagcgatatgcactcgctgctgatagcggcaatattgggtgtggtcgaaggattgacagaatttctgccggtatccagcacgggccatatgattattgtcggtcacttgttggggttcgagggcgacacggcgaaaacctttgaagttgtgatccagttaggatcaattctggcggtagtagtgatgttctggcggcgtctgtttggcctgattggcatccactttggccgcccgttgcagcacgaaggagaaagcaaaggtcgtttaacgctgatccacattttgctggggatgattccggcggtggtactggggctgttgttccacgacacgattaagtcattgtttaacccgataaatgtgatgtatgcactggtcgttggcggtttgttgctgattgccgccgaatgcctgaagccgaaagagccgcgtgcgccgggtcttgatgatatgacctatcgtcaggcgtttatgattggctgtttccagtgtctggcgctgtggccgggtttctcccgttccggggccaccatttcaggtgggatgctgatgggcgtgagccgttacgctgcttccgagttctcgttcctgctggcggtaccgatgatgatgggcgcaacggcgctcgatctctacaaaagctggggcttcctgacaaccggcgatatcccgatgtttgccgttgggtttatcaccgcttttgtggtggcactgatagcgattaaaaccttcctgcaattgattaagcgcatttcgtttatcccgttcgccatttatcgctttattgtggcggctgcggtgtacgtcgtgttcttttga

SEQ ID NO: 460116 - DNA, 1239 bp, Shigella boydii
gtgaagatttatctggtcggtggtgctgttcgggatgcattgttagggctaccggtcaaagacagagattgggtggtggtcggcagtacgccacaggagatgctcgacgcgggctaccagcaggtaggccgcgattttcctgtgtttctgcatccgcaaacgcatgaagagtatgcgctggcacgtaccgaacggaaatccggttccggttacaccggttttacttgctatgccgcaccggatgtcacgctggaagatgatcttaagcgtcgcgatctgaccattaatgcgctggcccaggacgataacggcgagattatcgacccgtacaacggtctgggcgatctgcaaaatcgtctgttgcgccatgtttcccccgcttttggcgaagatccgttacgcgttctgcgcgtggcgcgttttgctgcgcgttatgcccacctcggttttcgtattgccgatgaaactctgacgctgatgcgcgagatgacccatgcgggtgaactggaacacctgacgcctgaacgggtatggaaagagacggaaagcgccctcaccacccgcaatccccaagtgttcttccaggtactgcgcgattgcggtgcacttcgcgttttattcccggaaattgacgccctgtttggcgttccggcccctgccaggtggcatccggaaatcgacaccggtattcataccttaatgacgctctcaatggcggcgatgctgagtccgcaggttgatgtccgtttcgcaactttatgccacgatctcggtaaaggactgacgccgccagaactttggccgcgtcatcatgggcatggcccggcgggtgttaagttagtggaacaactatgccagcgtctgcgcgtgccaaatgaaattcgcgatttagccagactggtggctgagtttcacgatctcatccacaccttcccaatgctgaacccaaaaaccatcgtcaaattatttgattccatcgatgcctggcgtaaaccgcagcgtgtcgagcaactggcgctgaccagcgaggctgacgtacgcggcagaaccggttttgaatcagcggactacccgcaaggccgttggttgcgcgaagcctgggaagtggcgcagtcagtgccgacaaaagcggtcgttgaagcgggatttaaaggtgtggagattcgcgaggagctgacccgacggcggattgcggcggtagccagttggaaggaacaacgttgcccaaagcctgactga

SEQ ID NO: 460117 - DNA, 225 bp, Shigella boydii
gtgatcaacggattaaaagaagaaaatcagaaattgaaaaacgagctgattgtcgcgcagaaaaaggtcgatgccgccagcgtacagctggatgacaaacagcgcaccatcatcatgcaatggtttatgtatggcggtggcgtgctggggcttggcttgctgctcggtctggtactgccacacctgatcccaacgcgcaaacgcaaagatcgctggatgaactaa

SEQ ID NO: 460118 - DNA, 1308 bp, Shigella boydii
atggctcaggaaatcgaattaaagtttattgttaatcacagtgccgttgaggcgttgcgtgaccatctcaatacgctgggcggcgagcaccatgaccccgtgcagttgctgaatatttactacgaaacgccggataactggctgcgtgggcacgatatgggcttacgtattcgtggcgaaaacggtcgctatgagatgaccatgaaagttgcaggaagagtgacaggcggcttacaccagcgcccggaatataacgtggcgttgagcgaaccgacgctcgacctggcgcagttaccgacggaagtctggccgaacggcgaattgcccgccgatctcgcttcccgcgtacaaccgctgttcagcaccgatttttatcgcgaaaaatggctggtggcggtcgatgacagccgaattgaaatcgctctcgatcagggggaggtgaaagcgggggaatttgctgaacctatctgtgagctggaactggaactggaactgcttagcggcgacacgcgcgcggtgctgaaactggcgaaccaactggtatcgcaaaccggattacgccagggcagcctgagcaaagcggcgcgtggctatcatctggcgcagggcaatccggcgcgtgaaatcaaaccgaccaccattttgcatgttgcggcaaaagccgatgtggaacaggggctggaagcggcgctcgagctggcgttagcgcaatggcagtatcatgaagaactgtgggtacgcggcaacgatgcggcgaaagaacaggtgctggcagccattggtctggtccgtcatacactgatgctgttcggtggtattgtgccgcgcaaagcgagcactcacttacgtgatttgctgactcaatgcgaagcgaccatcgcttctgcggtttctgccgtgacggcggtctactctaccaaaacggcaatggcgaagctggcgttgaccgaatggctggtaagcaaagcctggcagccgtttttagatgccaaagcgcagagtaaaatgagcgattccttcaaacgctttgccgatatccatctttcccgccatgccgctgaactgaaaagcgttttctgccagccgttgggcgatcgctaccgtgaccagttgccacgtctgacgcgtgatattgactcaatactgttgctggcgggttactatgatcctgtcgtcgcgcaagcctggctggagaactggcaggggctgcgtcacgctattgcgaccgggcaacgcattgaaattgaacatttccgtaatgaggcaaacaatcaggaaccgttctggttgcacagcggaaaacgttaa

SEQ ID NO: 460119 - DNA, 2841 bp, Shigella boydii
atgaagccgctctcttcaccgttacagcagtactggcagacggttgttgagcggctgccagagcctttagccgagaaatcacttagcacacaggcgaagtcagtacttactttcagtgattttgtgcaggacagcgtgattgcgcatccagagtggctgacggaactggaaagccaatcgccgcaggctgatgaatggcagcattacgcggcatggttgcaggaggcgctcagcaatgtgagtgacgaagccgggttaatgcgcgagctgcggctattccggcggcgcattatggtgcgcatcgcctgggcgcaaacgctggctttggttactgaagagagcatattgcagcagctcagccatctggcggagacgctgattgtcgccgcgcgtgactggctgtatgacgcttgctgccgcgagtggggaacgccgtgcaatgcgcagggcgaagcgcaaccgctgctgattttaggcatgggtaagctgggcggtggggaactgaatttctcctcagatatcgatctgatttttgcctggccggaacatggttgtacgcagggcggacgccgggaactggataacgcgcagttttttacccgcatggggcagcggctgattaaagtgttggatcaaccaacgcaggatggcttcgtctatcgcgtggatatgcggctgcgtccgtttggcgaaagtggcccgctggtgctgagctttgccgcgttggaggattattaccaggagcaggggcgcgactgggagcgttacgcgatggtcaaggcgcggattatgggcgatagcgaaggcgtctatgctaacgagttgcgtgcgatgctgcgcccgtttgttttccgtcgttacatcgatttcagcgtgattcagtcgctgcgcaacatgaaagggatgattgcccgtgaagtgcgtcgacgtggtttgaccgacaatatcaaactcggcgcaggcggcattcgcgaaattgaatttatcgttcaggtgttccagctcattcgcggtgggcgcgaaccgtcgctgcagtcgcgctctttactgccaacgctcagcgtcattgccgcgctgcatctgctttctgaaaacgatgctgaacaattgcgagtggcatatctgttcctgcggcgtctggaaaacctgctgcaaagcattaacgacgaacaaacccaaacgcttccttctgatgagcttaaccgtgcgcggctggcgtgggcgatggactttgctgactggccgcaactgaccggggcgctgaccgcacatatgaccaatgtgcgccgggtgtttaatgaattgattggcgacgacgaaagtgaaactcaggaagagtcgctgtcggaacagtggcgtgagctgtggcaggatgcgttgcaggaagatgacactacgccagtgctagcgcatcttagcgaggatgatcgcaaacaggtcctaacgctgattgctgatttccgcaaagagctggataagcgtactatcgggccgcgaggacgtcaggtgctcgaccatctgatgccacatctgctaagtgatgtctgtgcgcgtgaagacgctgccgttacgctgtcgcgcattaccgccttgctggtggggattgttacccgcaccacctatttagaattgctcagtgaattccctgcggcgcttaaacatttgatttctctgtgtgccgcatcgccgatgattgccagccagctggcgcgttatccattattgctggatgaattgctcgatccaaacactctttaccagccgacggcgaccgatgcctaccgcgatgagttgcgccagtatttgctgcgcgtgccggaagatgacgaagagcaacagcttgaggcgctgcgtcagttcaaacaggcgcagctgttacgcatcgccgcagcggatatcgctggtacgctaccggtgatgaaagtgagcgatcacttaacctggctggcagaggctatgatagatgccgtcgttcagcaggcgtgggttcaaatggtggcccgctacggtaagccaaatcacctcaacgatcgcgaaggccgtggttttgcggtggtcggctacggcaagctgggcggctgggagttaggctacagttccgatcttgacctgatcttcctccatgattgcccaatggatgcgatgactgacggcgagcgggaaatcgacgggcgacagttttatctgcgtctggcgcaacgcattatgcatctgttcaatacgcgaacctcttccggcattttgtatgaagtggatgcacgactgcgtccgtccggggcggcgggaatgctggtgacatccgcagaagcatttgctgattatcagaaaaacgaggcctggacgtgggagcatcaggcgctggtgcgtgcgcgtgtagtgtacggcgatccgcagctcaccgcgcactttgacgcagtgcgtcgcgagattatgacgctgccgcgtgaaggtaaaactctgcaaacggaagtgcgggaaatgcgcgagaaaatgcgcgctcatctcggcaataaacatcgtaatcgctttgatatcaaagccgatgaaggcggaattaccgatatcgaatttattacccaatatctggtgttgcgctacgctcatgaaaaaccgaagttaacgcgctggtcagacaacgtgcgtattctggagctgctggcgcaaaacgacattatggaagagcaggaagcgatggcgctgacccgtgcttacacgacgctgcgcgatgaacttcatcatctggcattacaggaattgccgggccatgtgtcggaggattgcttcaccgcagagcgtgatctggtgcgggcaagctggcagaagtggctggtggaagaatga

SEQ ID NO: 460120 - DNA, 1434 bp, Shigella boydii
atgaaagtaacgctgtcagagtttgaacgtgcaggagtgatggtggttggtgatgtaatgctggatcgttactggtacggtcccaccagccgtatctcgccggaagcgccggtgcccgtggttaaagtgaataccatcgaagaacgtccgggcggcgcggctaacgtggcgatgaatatcgcttctctcggtgctaatgcacgcctggtcgggttgacgggcattgacgatgcagcgcgcgcgctgagtaaatctctggccgacgtcaacgtcaaatgcgacttcgtttctgtaccgacgcatccgaccatcaccaaattacgggtactttcccgcaaccaacagctgatccgtctggatttcgaagaaggtttcgaaggcgttgatccgcagccgctgcacgagcggattaatcaggcgctgagttcgattggcgcgctggtgctttctgactacgccaaaggtgcgctggcaagcgtacagcagatgatccaactggcgcgtaaagcgggcgttccggtgctgattgatccaaaaggtaccgattttgagcgctaccgcggcgctacgctgttaacgccgaatctctcggaatttgaagctgttgtcggtaaatgtaagaccgaagaagagattgttgagcgcggcatgaaactgattgccgattacgaactctcggctctgttagtgacccgttccgaacagggtatgtcgctgctgcaaccgggtaaagcgccgctgcatatgccaacccaggcgcaggaagtgtatgacgttaccggtgcgggcgacacggtgattggcgtcctggcggcaacgctggcagcgggtaattcgctggaagaagcctgcttctttgccaatgcggcggctggcgtggtggtcggcaaactgggaacctccacggtttcgccgatcgagctggaaaatgcagtgcgtgggcgcgcagataccggctttggcgtgatgaccgaagaggaactgaagctggccgtagcggcagcgcgtaaacgcggcgaaaaggtggtaatgaccaacggtgtctttgacatcctgcacgccgggcacgtctcctatctggcaaatgctcgcaaactgggtgaccgtctgattgtcgctgtgaacagcgatgcctccaccaaacggctgaaaggggattcccgccccgttaacccgctcgaacagcgtatgattgtgctgggcgcactggaagcggtcgactgggtggtgtcgtttgaagaagacacgccgcagcgcttgatcgccgggatcctgccagatttactggtgaagggcggcgactataaaccagaagagatcgccgggagtaaagaagtctgggccaacggcggcgaagtgctggtgctcaacttcgaagacggttgctcgaccactaacatcatcaagaagatccaacaggataaaaaaggctaa

SEQ ID NO: 460121 - DNA, 1629 bp, Shigella boydii
atgtttaccgcgattattgccgtatgcattctgtttattattggaattattttcgccaggctctatcgtcgcgcttcggcagagcaagcttttgttcgtactggtttaggtgggcaaaaagtggtgatgagcggtggcgcaatcgtgatgccgatctttcatgaaataatccccatcaatatgaatactctgaagctggaagtcagccgctcaaccattgatagcctgattacgaaagatcgtatgcgtgtcgatgtagtagtcgctttctttgtacgggtaaaaccgtctgtagaaggcatcgccactgcggcgcagacgttggggcaacgcacgctatcaccagaagacttacgtatgttggttgaagataaatttgtcgatgccctccgtgcaacagctgcacaaatgaccatgcatgagttacaggatacccgcgagaacttcgtgcagggagtacaaaatactgtcgcagaagacctgtcgaaaaacggtcttgagctggaaagcgtttcacttaccaactttaaccagacctcgaaagaacatttcaatccgaacaatgcctttgacgccgaaggtttaaccaaactgattcaggagacggagcgccgtcgtcgcgaacgtaacgaagttgaacaggatgtagaagttgcggtgcgtgagaaaaaccgtgatgcactttcgcgcaagttggagattgaacaacaagaagcgtttatgacgcttgagcaggagcagcaggttaaaacccgtactgccgaacagaatgcacgtattgcggcttttgaagctgaacgtcgtcgtgaagcagagcagacgcgaattctggctgaacgacaaattcaggaaacggagatcgagcgcgagcaggccgtccgctcaagaaaggttgaggctgaacgtgaagttcgtattaaagagatcgaacagcagcaggtcaccgaaatcgccaaccagacgaaatcgatcgctattgccgccaaatcggaacaacagtcccaggcagaagcgcgtgctaaccttgcactcgcagaagcagtaagtgcgcaacaaaacgtagaaaccactcgccagaccgcagaagccgatcgtgctaaacaagttgccctaatcgctgccgcgcaggatgcagaaaccaaagcggttgaactgaccgtgcgggcgaaagcagaaaaagaagccgcagagatgcaggcggcggctatcgttgagttagccgaagctacacgtaaaaagggtctggcggaagcagaagcacaacgtgcgctgaacgatgctatcaacgtactttctgatgaacaaaccagccttaaattcaaactggccttgttgcaggcgctacctgcggtaatagaaaaatccgttgagccgatgaaatctattgacggtatcaagattattcaggtcgatggtctgaatcgtggcagcgctgcgggtgatgcaaacacgggtaatgtggggggcggaaacctggcggaacaagcattatcagccgctctctcttaccgcacacaggcaccgctgattgactccttgctcaatgaaattggcgtttcaggcggctcactggcggcattgacttcacccttaacctcaacaactcccgtcgccgaaaacgtagaataa

SEQ ID NO: 460122 - DNA, 906 bp, Shigella boydii
atggatgcaaaacaaacgcggcagggcgtattactcgctcttgccgcttattttatttggggtattgcgccagcatacttcaagctgatttactacgtgcccgccgatgagatcctgacgcatcgcgtgatctggtcgtttttctttatggtggtgctgatgagcatttgccgccagtggtcctatttaaaaacgctgattcagacgccacagaaaatttttatgctggcagtctctgccgtgctgattggtggcaactggctactgtttatctgggcggtgaacaatcaccatatgctggaagcgagccttggttactttattaacccgctggtgaacattgtgctggggatgattttcctcggcgagcgattccgccggatgcaatggctggcggtgattctggcgatatgtggcgtgttggttcagttgtggacttttggttcgctgccaatcatcgcgctggggctggcgtttagttttgccttctacggactggtacgcaagaaaattgccgttgaagcgcaaaccggcatgttaatcgaaaccatgtggctgctgcccgtggcggcgatttatctgtttgctattgccgacagctcaaccagccatatggggcaaaacccgatgttgctgaatttgctgctgatcgccgccggtattgtcaccaccgtaccgctgttgtgttttaccgcagctgctacacgcctgcgtctctccacgttaggcttcttccagtatattggcccgacgctgatgttcctgttggcagtgacgttttatggtgaaaaaccgggtgccgataagatggtgaccttcgcctttatttgggtggcgctggcaatttttgtgatggatgcgatttatacgcagcgtagaaaaagggtaatgactccaacttactga

SEQ ID NO: 460123 - DNA, 468 bp, Shigella boydii
atgtctgccgtactgaccgctgaacaagccctgaaattagtgggtgagatgtttgtttatcacatgccatttaaccgcgcgttagggatggagctggagcgttacgaaaaagagttcgcacagctggcctttaaaaatcagccgatgatggtgggtaactgggcgcaaagcattttgcacggcggagtcattgcgtcggcgctggatgtcgccgccggtctggtgtgcgtgggaagtaccttaacccgccacgaaaccatcagtgaagatgaactacgccagcggctatcgcggatggggaccattgatcttcgcgttgattatctgcgcccaggcaggggcgagcgttttactgctaccagtagcctgttgcgtgcaggcaataaagtcgccgtcgcccgcgttgaattacacaatgaagaacagctttatattgccagtgccaccgccacctatatggtaggttga

SEQ ID NO: 460124 - DNA, 870 bp, Shigella boydii
atgcggactctgcagggctggttgttgccggtgtttatgttgcctatggcagtatatgcacaagaggcaacggtgaaagaggtgcatgacgcgccagcggtgcgtggcagtattatcgccaatatgctgcaggagcatggcaatccgttcacgctctatccttatgacactaactacctcatctacacccaaaccagcgatctgaacaaagaagcgattgccagttacgactgggcggaaaatgcgcgtaaggatgaagtaaagtttcagttgagcctggcatttccactgtggcgtgggattttaggcccgaactcggtgttgggtgcgtcttatacgcaaaaatcctggtggcaactgtccaatagcgaagagtcttcaccgtttcgtgaaaccaactacgaaccgcaattgttcctcggttttgccaccgattaccgttttgcaggttggacgctgcgcgatgtggagatggggtataaccacgactctaacgggcgttccgacccgacctcccgcagctggaaccgcctttatactcgcctgatggcagaaaacggtaactggctggtagaagtgaagccgtggtatgtggtgggtaatactgacgataacccggatatcaccaaatatatgggttactaccagcttaaaatcggctatcacctcggtgatgcggtgttgagtgcgaaaggacagtacaactggaataccggttacggcggcgcggagttaggcttaagttacccgatcaccaaacatgtgcgcctttatactcaggtttacagcggctatggcgaatcgctcatcgactataacttcaaccagacccgtgtcggtgtaggagttatgctaaacgacttgttttga

SEQ ID NO: 460125 - DNA, 1836 bp, Shigella boydii
gtgaatgtggcgcaggcggaagtgttgaatctggagtccggagctaaacaggttttacaagaaacctttggctaccaacagtttcgccccggccaggaagaaattatcgacactgtgctttccggtcgcgattgcctggtcgtcatgcccaccggtggcggaaaatccctttgctatcaaattcctgccttattgctaaacggccttaccgtggttgtttcaccgctgatttcgttgatgaaagatcaggtggatcaactgcaagccaacggcgtggcggcggcgtgccttaactcgacgcaaacccgcgagcagcaacttgaagtgatgacaggctgccgcaccgggcaaattcgtctgctttatatcgccccggaacgcctgatgctggataactttcttgagcatctggcgcactggaatccggtgttattagccgttgatgaagcgcactgtatctcccaatggggccacgatttccgcccggaatatgccgcgcttggtcagttacgccagcgtttcccgaccctgccgtttatggcgctgactgccacagccgacgacaccacgcgccaggatatcgtgcgcttgctggggctgaacgatccgctgattcaaatcagcagttttgaccgtccgaatattcgctacatgctgatggagaagttcaaaccgctcgatcagttgatgcgctacgtgcaggaacagcgcggtaagtcaggcattatctactgcaacagccgcgcgaaagtagaagacaccgctgcgcgcctgcaaagcaagggaattagcgcggcggcctatcatgctgggctggaaaataatgttcgcgccgacgtgcaggaaaaatttcagcgcgatgacctgcaaattgtggtggcgacggtggcgttcggcatgggcatcaataaaccaaacgttcgcttcgtggtccactttgatattccgcgcaatatcgaatcctattatcaggaaaccggtcgcgccgggcgtgatggcctgcccgcggaagcgatgctgttttacgatccggccgatatggcgtggctgcgccgttgcctggaagagaagccgcaggggcagttacaggatatcgaacgtcataaactcaatgcgatgggcgcttttgccgaagcgcaaacttgccgtcgtctggtattgctgaactattttggcgaagggcggcaagagccgtgcgggaactgcgatatctgcctcgatccgccgaaacagtacgacggttcaaccgatgctcagattgccctttccaccattggtcgtgtgaatcagcggtttgggatgggttatgtggtggaagtgattcgtggtgctaataaccagcgtatccgcgactatggtcatgacaaactgaaagtctatggcatgggccgtgataaaagccatgaacattgggtgagcgtgatccgccagctgattcacctcggcctggtgacgcaaaatattgcccagcattctgccctacaactgacagaggccgcgcgcccggtgctgcgcggcgaatcctctttgcaacttgccgtgccgcgtatcgtggcgctcaaaccgaaagcgatgcagaaatcgttcggcggcaactatgatcgcaaactgttcgccaaattacgcaaactgcgtaaatcgattgccgatgaaagtaatgtcccgccgtacgtggtgtttaacgacgcaaccttgattgagatggctgaacagatgccgatcaccgccagcgaaatgctcagcgttaacggcgttgggatgcgcaagctggaacgctttggtaaaccgtttatggcgctgattcgtgcgcatgtcgatggcgacgacgaagagtag

SEQ ID NO: 460126 - DNA, 621 bp, Shigella boydii
atgttgatgttatttctcaccgtcgccatggtgcacattgtggcgcttatgagccccggtcccgatttcttttttgtctctcagaccgctgtcagtcgttcccgtaaagaagcgatgatgggcgtgctgggtattacctgcggcgttatggtttgggcagggattgcgttgcttggcctgcatttgattatcgaaaaaatggcctggctgcatacgctgattatggttggcggtggcctgtatctctgctggatgggttaccagatgctacgcggtgcactgaaaaaagaggctgtatctgcgcctgcaccacagattgagctggcgaaaagcgggcgcagtttcctgaaaggtttactgaccaatctcgctaatccgaaagcgattatctactttggctcggtgttctcattgtttgtcggagataacgttggcactaccgcgcgctggggcatttttgcgctgatcattgtcgaaacactggcgtggtttaccgtcgttgccagcctgtttgccctgccgcaaatgcgccgtggttatcaacgtctggcgaagtggattgatggttttgccggggcgttatttgccggatttggcattcatttgattatttcgcggtga

SEQ ID NO: 460127 - DNA, 621 bp, Shigella boydii
atgaccttagaatggtggtttgcctacctgctgacatcgatcattttaagcctgtcgccaggctctggtgcaatcaacactatgaccacctcgctcaaccacggttatcgcggcgcggtggcgtctattgctgggcttcagaccggactggcgattcatattgtgctggttggcgtggggttggggacgctattttcccgctcagtgattgcgtttgaagtgttgaagtgggcaggcgcggcttacttgatttggctgggaatccagcagtggcgcgccgctggtgcaattgaccttaaatcgctggcctctactcaatcgcgtcgacatttgttccagcgcgcagtttttgtgaatctcaccaatcccaaaagtattgtgtttctggcggcgctatttccgcaattcatcatgccacagcagccgcaactgatgcagtatatcgtgctcggcgtcaccactattgtagtcgatattattgtgatgatcggttacgccacccttgctcaacggattgctctatggattaaaggaccaaagcagatgaaggcgctgaataagattttcggctcgttgtttatgctggtgggagcgctgttagcatcggcgaggcatgcgtga

SEQ ID NO: 460128 - DNA, 1023 bp, Shigella boydii
atgtttcagcagcaaaaagactgggaaacaagagaaaacgcgtttgctgcttttaccatgggaccgctgactgatttctggcgtcagcgtgatgaagcagagtttactggtgtggatgacattccggtgcgctttgtccgttttcgcgcacagcaccatgaccgggtggtagtcatctgcccggggcgtattgagagctacgtaaaatatgcggaactggcctatgacctgttccatttggggtttgatgtcttaatcatcgaccatcgcgggcagggacgttccggtcgcctgttagccgatccgcatctcgggcatgttaatcgctttaatgattatgttgatgatctggcggcattctggcagcaggaggtccagcccggtccgtggcgtaaacgctatatactggcacattcgatgggcggtgcgatctccacattatttctgcaacgccatccaggtgtatgtgacgccattgcgctaactgcgccaatgtttgggatcgtgattcgtatgccgtcatttatggcacggcagatcctcaactgggccgaagcgcatccacgtttccgtgatggctatgcaataggcaccgggcgctggcgcgcgttgccgtttgctatcaacgtactgacccacagcagacagcgatatcgacgtaacttacgcttctatgctgatgacccaacgattcgcgtcggtgggccgacctaccattgggtacgcgaaagtattctggctggcgaacaggtgttagccggtgcgggtgatgacgccacgccaacgcttctcttgcaggctgaagaggaacgcgtggtggataaccgcatgcatgaccgtttttgtgaactccgcaccgccgcgggccatcctgtcgaaggaggacggccgttggtaattaaaggtgcttaccatgagatcctttttgaaaaggacgcaatgcgctcagtcgcgctccacgccatcgttgattttttcaacaggcataactcacccagcggaaaccgctctacagaggtttaa

SEQ ID NO: 460129 - DNA, 801 bp, Shigella boydii
atgtaccaggttgttgcgtctgatttagatggcacgttactttctcccgaccatacgttatccccttacgccaaagaaactctgaagctgctcaccgcgcgcggcatcaactttgtgtttgcgaccggtcgtcaccacgttgatgtggggcaaattcgcgataatctggagattaagtcttacatgattacctccaatggtgcgcgcgttcacgatctggatggtaatctgatttttgctcataacctggatcgcgacattgccagcgatctgtttggcgtagtcaacgacaatccggacatcattactaacgtttatcgcgacgacgaatggtttatgaatcgccatcgcccggaagagatgcgcttttttaaagaagcggtgttcaaatatgcgctgtatgagcctggattactggagccggaaggcgtcagcaaagtgttcttcacctgcgattcccatgaacaactgctgccgctggagcaggcgattaacgctcgttggggcgatcgcgtcaacgtcagtttctctaccttaacctgtctggaagtgatggcgggcggcgtttcaaaaggccatgcgctggaagcggtggcgaagaaactgggctacagcctgaaggattgtattgcgtttggtgacgggatgaacgacgccgaaatgctgtcgatggcggggaaaggctgcattatgggcagtgcgcaccagcgtctgaaagaccttcatcccgagctggaagtgattggtactaatgccgacgacgcggtgccgcattatctgcgtaaactctatttatcgtaa

SEQ ID NO: 460130 - DNA, 900 bp, Shigella boydii
gtggcgctacttatcatcaccacgattctgtgggccttctcctttagcttttatggcgagtaccttgcggggcacgtcgatagctattttgcggtgctggtgcgcgttggcctggcggcactcgtttttctgccgtttctgcgtacccgtggcaatagcctgaaaacagtcggcctgtatatgctggtgggcgcgatgcagctcggcgtgatgtatatgctgagtttccgcgcttatctctatctgacggtttccgaactgctgctgttcaccgtactgacgccgctctacatcacgctgatttatgacatcatgaataagcgccgtttgcgctggggatatgcttttagtgccttgttggcggtgattggtgccgggattattcgctatgatcaggtcaccgaccatttctggactggcttgttgctggtgcaactctccaatatcacttttgccatcggcatggtgggttacaaacgcctgatggaaactcgcccgatgccgcagcataacgcctttgcgtggttctatcttggcgcgttcctggtggcggtaattgcatggttcttgctgggaaatgcgcagaaaatgccgcaaaccacgttgcaatggggcattctggtgtttcttggcgtggtggcttccgggattggctactttatgtggaactacggcgcgacgcaggtggacgccggaacgctgggaattatgaataatatgcacgttccggcagggctgctggtaaacctggctatctggcaccaacagccgcactggccaacgtttattacaggcgcgctggtgatcctggcctcactgtgggtgcatcgtaagtgggtcgctccgcgctcttcacaaacggcagatgatcgcaggcgtgattgcgcgctgagcgaataa

SEQ ID NO: 460131 - DNA, 954 bp, Shigella boydii
atgatcgaagtaaaacatctgaaaacgctacaagcgttgcggaactgcggctcactcgcagccgctgcggcgacgttgcatcagacgcaatccgccctgtctcaccagtttagcgatctggaacaacgccttggcttccggctatttgtgcgtaaaagccagccgcttcgctttacaccgcagggagaaatcctgttgcaactggcaaaccaggtgctgccacaaattagccaggcactgcaagcctgcaatgaaccgcagcagacgcgtctgcgcattgccattgagtgccatagctgtatacagtggctgacgcccgcgttagaaaatttccataagaactggccgcaggtcgagatggactttaaatcgggcgtgacatttgacccgcagcccgccttgcaacagggagagctggatctggtaatgacgtccgatattctgccgcgcagtggtctgcattattcgccgatgttcgactatgaagtgcgtctggtgttagcacctgaccatccactggcggcaaaaacgcgtattacaccggaagatctcgccagcgagacgctattaatttatccggtgcagcgtagtcgactggatgtctggcggcattttcttcagccggcaggcgtcagtccgtcactgaaaagcgtcgataacaccttattgttgattcagatggttgccgcgcggatgggtattgccgcgctaccgcattgggtagtagagagttttgagcgccagggtctggtggtgaccaaaaccctgggcgaaggcttgtggagccgactgtacgccgccgtgcgcgatggcgagcagcgtcagccagttacggaagcgtttattcgctcagcgcgcaatcacgcctgcgatcatctgccgtttgtgaagagcgcggagcgacccacttacgatgcacccacagtgaggccaggatcaccagcgcgcctgtaa

SEQ ID NO: 460132 - DNA, 2262 bp, Shigella boydii
atgacaatattgaatcacaccctcggtttccctcgcgttggcctgcgtcgcgagctgaaaaaagcgcaagagagttattgggcagggaactccacgcgtgaagaactgctggcggtagggcgtgaattgcgtgctcgtcactgggatcaacaaaagcaagcgggtatcgacctgctgccggtgggcgattttgcctggtacgatcatgtactgaccaccagtctgctgctgggtaacgttccggcgcgtcatcagaacaaagatggttcggtagatattgacaccctgttccgtattggtcgtggacgtgcgccgactggcgaacctgcggcggcagcggaaatgaccaaatggtttaacaccaactatcactacatggtgccggaattcgttaaaggccaacagttcaaactgacctggacgcagctgctggaggaagtggacgaggcgctggcgctgggccacaacgttaagcctgtgctgctggggccggttacctggctgtggctggggaaagtgaaaggtgaacagtttgaccgcctgagcctgctgaacgacattctgccggtttatcagcaagtgctggcagaactggagaaacgcggcatcgagtgggtacagattgatgaacccgcgctggtactggaactaccacaggcgtggctggacgcatacaaacccgcttacgacgcgctccagggacaggtgaaactgctgctgactacctattttgaaggcgttacgccaaatctcgacacgattactgcgctgcctgttcagggactgcatgtggaccttgtacatggtaaagatggcgttgctgaactgcacaagcgcctgccttctgactggctgctgtctgcgggactgatcaatggtcgtaacgtctggcgcgccgatcttactgagaaatatgcgcaaattaaggacattgtcggcaaacgtgatttgtgggtggcatcttcctgctcgttgctgcacagccccatcgacctgagcgtggaaacgcgtcttgatgcagaagtgaaaagctggtttgccttcgccttacaaaaatgccatgaactggcactgctgcgcgatgcgctgaaaagtggtgacacggcagctctggcagagtggagcgccccaattcaggcgcgtcgtcactctactcgtgtacataatccggcggtagaaaagcgtctggcggcgatcaccgcccaggacagccagcgtgcgaatgtctatgaagtgcgtgctgaagcccagcgtgcgcgttttaaactgccagcgtggccgaccaccacgattggttccttcccgcaaaccacggaaattcgtaccctgcgtctggatttcaaaaagggcaatctcgacgccaacaactaccgcacgggcattgcggaacatatcaagcaggccattgttgagcaggaacgtttgggactggatgtgctggtacatggcgaggccgagcgtaatgacatggtggaatactttggcgagcacctcgacggatttgtctttacgcaaaacggttgggtacagagctacggttcccgctgcgtgaagccaccgattgttattggtgacgttagtcgcccggcaccgattaccgtggagtgggcgaagtatgcgcaatctctgactgataaaccggtgaaagggatgctgactggcccggtgaccattctctgctggtcgttcccgcgtgaagatgtcagccgtgaaaccatcgccaaacaaattgcgctggcgctgcgtgatgaagtggcggacctggaagccgcaggaattggcatcatccagattgatgaaccggcgctgcgcgaaggtttaccgctgcgtcgtagcgactgggatgcatatctccagtggggcgtggaggccttccgtatcaacgccgccgtggcgaaagatgacacacaaatccacactcacatgtgttattgcgagttcaacgacatcatggattccattgcggcactggatgcagacgtcatcaccatcgaaacctcgcgttccgacatggagttgctggagtcgtttgaagagtttgattatccgaatgaaatcggtccaggcgtctatgacattcactcgccaaacgtaccgagcgtagaatggattgaagccttgctgaagaaagcggcaaaacgcattccggcagagcgcctgtgggtcaacccggactgtggcctgaaaacgcgcggctggccagaaacccgcgcggcactggcgaacatggtgcaggcggcgcagaatttgcgtcggggatga

SEQ ID NO: 460133 - DNA, 276 bp, Shigella boydii
atgacttataccaccaggatgcacttgactatgataactgaaactgaaattaacgtactgaaagttatggctgagaaagatataaactggaactggatgaatctcgatcgcacactatccataaggcaaattccaggattcggtaatgttgttaacattgttaacaaattagctaacgagggtttggttattattgaggatagcggacataagtctatgcctcactaccacgttactgaaaagggatacaatttcgtgaaaagtgagaataaataa

SEQ ID NO: 460134 - DNA, 1365 bp, Shigella boydii
atgagcgataatgacactatcgtagcccaggccacgcctccgggacgtggcggcgttggcatcctgcgcatctccggcttcaaagcccgtgaagttgccgaaaccgtgctgggtaaactgcctaagccgcgctacgccgattatcttccgtttaaagacgccgacggcagcgtgctcgatcaggggattgcgctatggttccctggcccgaactcgttcactggcgaagatgtgctggaactgcaaggtcatggcggtccggtgatcctcgacctgctgttaaaacgcattctgaccattcccggcctgcggattgctcgccctggtgagttttccgaacgcgcgtttcttaacgataaacttgacttagcccaggccgaggcgattgccgatcttatcgacgccagttcggaacaggcggcccgttcggcacttaactcgctgcaaggcgcattctccgcacgggttaatcatctggtagaagccctcacccacttgcgcatttacgtcgaagcggcaattgatttccccgatgaagagatcgatttcctctccgacggaaaaattgaagcccagctcaatgacgttattgccgatcttgatgcagtgcgtgctgaagcacgtcagggtagtttgttgcgcgaagggatgaaagtggtgattgccggacgtcctaacgccggtaaatcgagcctgttaaacgcgctggcggggcgtgaagcggcaatcgtaaccgatatcgccggaactacgcgtgacgtgctgcgtgagcatatccacattgacggaatgccgctgcatatcatcgataccgccgggctacgtgaagccagtgacgaagtagaacgtattggtatcgagcgcgcgtggcaggaaattgaacaggccgaccgcgtgctgtttatggtcgatggcaccacaacagacgccgtggatccggcagagatctggccggaatttattgcccgtctgccagcgaaactgccgatcaccgtggtgcgcaataaagccgatatcaccggcgaaacgctgggaatgagtgaagtgaacggtcacgcgttaattcgtctctcagcaaggactggtgaaggcgtggacgtgctgcgtaaccatctcaaacagagcatgggctttgacaccaacatggaaggcggcttcctggcgcgtcgtcgccacctacaggcgctggaacaggcagcggaacatctacaacagggcaaagcgcaactgttgggagcctgggcaggtgaactgctggcggaagagttgcgtctggcacagcagaacttaagcgaaatcaccggggaatttacttcagacgacctgctggggcggattttctccagcttctgtattggtaagtaa

SEQ ID NO: 460135 - DNA, 1647 bp, Shigella boydii
atggattcgcaacgcaatcttttagtcatcgctttgctgttcgtgtctttcatgatctggcaagcctgggagcaggataaaaacccgcaacctcaggcccaacagaccacgcagacaacgaccaccgcagcgggtagcgccgccgaccagggcgtaccggccagtggccaggggaaactgatctcggttaagaccgacgtgcttgatctgaccatcaacacccgtggtggtgatgttgagcaagctctgctgcctgcttacccgaaagagctgaactctacccagccgttccagctgctggaaacttcaccgcagtttatttatcaggcacagagcggtctgaccggtcgtgatggcccggataacccggctaacggcccgcgtccgctgtataacgttgaaaaagacgcttatgtgctggctgaaggtcaaaacgaactgcaggtgccgatgacgtataccgacgcggcaggcaacacgtttaccaaaacgtttgtcctgaaacgtggtgattacgctgtcaacgtcaactacaacgtgcagaacgctggcgagaaaccgctggaaatctccacctttggtcagttgaagcaatccatcactctgccaccgcatctcgataccggaagcagcaacttcgcactgcacaccttccgcggcgcggcgtactccacgcctgacgagaagtacgagaaatacaagttcgataccattgccgataacgaaaacctgaacatctcttcgaaaggtggttgggtggcaatgctgcaacagtatttcgcgacggcgtggatcccgcataacgatggtaccaacaacttctataccgctaatctgggtaacggcatcgccgctatcggctataaatctcagccggtactggttcagcctggtcagactggcgcgatgaacagcaccctgtgggttggcccggaaatccaggacaaaatggcagctgttgctccgcacctggatctgaccgttgattacggttggttgtggttcatctctcagccgctgttcaaactgctgaaatggatccatagctttgtgggtaactggggcttctccattatcatcatcacctttatcgttcgtggcatcatgtaccctctgaccaaaacgcagtacacctccatggcgaagatgcgtatgctgcagccgaagattcaggcaatgcgtgagcgtctgggcgatgacaaacagcgtatcagccaggaaatgatggcgctgtacaaagctgagaaggttaacccgctgggcggctgcttcccgctgctgatccagatgccaatcttcctggcgttgtactacatgctgatgggttccgttgaactgcgtcaggcaccgtttgcactgtggatccacgacctgtcagcacaggacccgtactacatcctgccgatcctgatgggcgtaacgatgttcttcattcagaagatgtcgccgaccacagtgaccgacccgatgcagcagaagatcatgacctttatgccggtcatcttcaccgtgttcttcctgtggttcccgtcaggtctggtgctgtactatatcgtcagcaacctggtaaccattattcagcagcagctgatttaccgtggtctggaaaaacgtggcctgcatagccgcgagaagaaaaaatcctga

SEQ ID NO: 460136 - DNA, 327 bp, Shigella boydii; identical to SEQ ID NO: 1818

SEQ ID NO: 460137 - DNA, 141 bp, Shigella boydii
atgaaacgcacttttcaaccgtctgtactgaagcgcaaccgttctcacggcttccgcgctcgtatggctactaaaaatggtcgtcaggttctggcacgtcgtcgtgctaaaggccgcgctcgtctgaccgtttctaagtaa

SEQ ID NO: 460138 - DNA, 1404 bp, Shigella boydii
gtgtcactttcgctttggcagcagtgtcttgcccgattgcaggatgagttaccagccacagaattcagtatgtggatacgcccattgcaggcggaactgagcgataacacgctggccctgtacgcgccaaaccgttttgtcctcgattgggtacgggacaagtaccttaataatatcaatggactgctaaccagtttctgcggagcggatgccccacagctgcgttttgaagtcggcaccaaaccggtgacgcaaacgccacaagcggcagtgacgagcaacgtcgcggcccctgcacaggtggcgcaaacgcagccgcaacgtgctgcgccttctacgcgctcaggttgggataacgtcccggccccggcagaaccgacctatcgttctaacgtaaacgtcaaacacacgtttgataacttcgttgaaggtaaatctaaccaactggcgcgcgcggcggctcgccaggtggcggataaccctggcggtgcctataacccgttgttcctttatggcggcacgggtctgggtaaaactcacctgctgcatgcggtgggtaacggcattatggcgcgcaagccgaatgccaaagtggtttatatgcactccgagcgctttgttcaggacatggttaaagccctgcaaaacaacgcgatcgaagagtttaaacgctactaccgttccgtagatgcactgctgatcgacgatattcagttttttgctaataaagaacgatctcaggaagagtttttccataccttcaacgccctgctggaaggtaatcaacagatcattctcacctcggatcgctatccgaaagagatcaacggcgttgaggatcgtttgaaatcccgcttcggttggggactgactgtggcgatcgaaccgccagagctggaaacccgtgtggcgatcctgatgaaaaaggccgacgaaaacgacattcttttgccgggcgaagtggcgttctttatcgccaagcgtctacgatctaacgtacgtgagctggaaggggcgctgaaccgcgtcattgccaatgccaactttaccggacgggcgatcaccatcgacttcgtgcgtgaggcgctgcgcgacttgctggcattgcaggaaaaactggtcaccatcgacaatattcagaagacggtggcggagtactacaagatcaaagtcgcggatctcctttccaagcgtcgatcccgctcggtggcgcgtccgcgccagatggcgatggcgctggcgaaagagctgactaaccacagtctgccggagattggcgatgcgtttggtggtcgtgaccacacgacggtgcttcatgcctgccgtaagatcgagcagttgcgtgaagagagccacgatatcaaagaagatttttcaaatttaatcagaacattgtcatcgtaa

SEQ ID NO: 460139 - DNA, 1101 bp, Shigella boydii
atgaaatttaccgtagaacgtgagcatttattaaaaccgctacaacaggtgagcggtccgttaggtggtcgtcctacgctaccgattctcggtaatctgctgttacaggttgctgacggtacgttgtcgctgaccggtactgatctcgagatggaaatggtggcacgtgttgcgctggttcagccacacgagccaggagcaacgaccgttccggcgcgcaaattctttgatatctgccgtggtctgcctgaaggcgcggaaattgccgtgcagctggaaggtgaacggatgctggtgcgctccgggcgtagccgtttttcgctgtctaccctgccagcggcggatttcccgaacctcgatgactggcagagcgaagtcgaatttaccctgccgcaggcgacgatgaagcgtctgattgaagcgacccagttttcgatggcgcatcaggatgttcgctattacttaaacggtatgctgtttgaaaccgaaggcgaagaactgcgcaccgtagcgaccgatggtcaccgtctggcagtctgttcaatgccaattggtcaatctttgccaagccattcggtgatcgtgccgcgtaaaggcgtgattgaactgatgcgtatgctcgacggcggcgacaatccgctgcgcgtgcagattggcagcaataacattcgtgcccacgttggcgactttatcttcacctccaaactggtggatggtcgcttcccggattaccgccgcgttctaccgaagaacccggacaaacatctggaagctggctgcgatctgctcaagcaggcgtttgcccgtgcggcaattctctctaacgagaaattccgcggcgtacgtctttatgtcagcgaaaaccagctgaaaatcactgccaacaacccggaacaggaagaagcggaagagatcctcgacgttacctatagcggtgcggagatggaaatcggcttcaacgtcagctatgtgctggatgttctgaacgcgctgaaatgcgaaaacgtccgcatgatgctgaccgattcggtttccagcgtgcagattgaagatgcggccagccagagcgcggcttatgttgtcatgccaatgagactgtaa

SEQ ID NO: 460140 - DNA, 1074 bp, Shigella boydii
atgtccctcacccgcttgttgatccgcgatttccgcaatatcgaaaccgcggatctcgccttatctcccggctttaactttctggtaggtgccaacggcagtggcaaaaccagcgtgctggaagccatctatacgctcggccatggtcgggcgtttcgcagtttgcagattggtcgcgtcattcgccatgagcaggaggcatttgttctccatgggcgattacagggcgaagagcgcgagacggcgattggcttaaccaaagacaaacaaggcgacagcaaagtccgcatcgacggtactgacgggcataaagtcgcggagctggcgcacctgatgccgatgcagctgataacgccagaagggtttactttactcaacggcggccccaaatacagaagagcatttctcgactgggcatgctttcacaacgaacccggatttttcaccgcctggagcaatctcaagcgattgctcaagcagcgcaatgcggcgctgcgccaggtgacacgttacgaacagctacgcccgtgggataaagagctgatcccgctggcggagcaaatcagcacctggcgcgcggagtatagcgccggtatcgcggctgatatggccgatacttgtaagcaatttctccctgagttttctctgactttctctttccagcgcggctgggagaaagagacagaatatgctgaggtgctggaacgtaattttgaacgcgatcgcctgctaacctacaccgcgcatggcccgcataaagcggacttacgcattcgcgccgacggtgcgccggtggaagataccttatcgcgtgggcagcttaagctgttgatgtgcgccttacgtctggcgcaaggagagttcctcacccgtgaaagcgggcggcggtgtctctacctgatagatgattttgcctctgagcttgatgatgagcgtcgcgggctgcttgccagccgcttaaaagcgacgcaatcacaggtctttgtcagcgcgatcagtgctgaacacgttatagacatgtcggacgaaaattcgaagatgtttaccgtggaaaagggtaaaataacggattaa

SEQ ID NO: 460141 - DNA, 2415 bp, Shigella boydii
atgtcgaattcttatgactcctccagtatcaaagtcctgaaagggctggatgcggtgcgtaagcgcccgggtatgtatatcggcgacacggatgacggcaccggtctgcaccacatggtattcgaggtggtagataacgctatcgacgaagcgctcgcgggtcactgtaaagaaattatcgtcaccattcacgccgataactctgtctctgtacaggatgacgggcgtggcattccgaccggtattcacccggaagagggcgtatcggcggcggaagtgatcatgaccgttctgcacgcaggcggtaaatttgacgataactcctataaagtgtccggcggtctgcacggcgttggtgtttcggtagtaaacgccctgtcgcaaaaactggagctggttatccagcgcgagggtaaaattcaccgtcagatctacgaacacggtgtaccgcaggctccgctggcggttaccggcgagactgaaaaaaccggcaccatggtgcgtttctggcccagcctcgaaaccttcaccaatgtgaccgagttcgaatatgaaattctggcgaaacgtctgcgtgagttgtcgttcctcaactccggcgtttccattcgtctgcgcgacaagcgtgacggcaaagaagaccacttccactatgaaggcggcatcaaggcgttcgttgaatatctgaacaagaacaaaacgccgatccatccgaatatcttctacttctccaccgaaaaagacggtattggcgtcgaagtggcgttgcagtggaacgatggcttccaggaaaacatctactgctttaccaacaacattccgcagcgtgacggcggtactcacctggcaggcttccgtgcggcgatgacccgtaccctgaacgcctacatggacaaagaaggctacagcaaaaaagccaaagtcagcgccactggtgacgatgcgcgtgaaggcctgattgcggtcgtttccgtaaaagtgccggacccgaaattctcctcccagaccaaagacaaactggtttcttctgaggtgaaatcggcggttgaacagcagatgaacgaactgctggcagaatacctgctggaaaacccaaccgacgcgaaaatcgtggttggcaaaattatcgatgctgcccgtgcccgtgaagcggcgcgtcgcgcgcgtgaaatgacccgccgtaaaggtgcgctcgacttagcgggcctgccgggcaaactggcagactgccaggaacgcgatccggcgctttccgaactgtacctggtggaaggggactccgcgggcggctctgcgaagcaggggcgtaaccgcaagaaccaggcgattctgccgctgaagggtaaaatcctcaacgttgagaaagcgcgcttcgataagatgctctcttctcaggaagtggcgacgcttatcaccgcgcttggctgtggtatcggtcgtgacgagtacaacccggacaaactgcgttatcacagcatcatcatcatgaccgatgcggacgtcgacggctcgcacattcgtacgctgctgttgaccttcttctatcgtcagatgccggaaatcgttgaacgcggtcacgtctacatcgctcagccgccgctgtacaaagtgaagaaaggcaagcaggaacagtacattaaagacgacgaagcgatggatcagtaccagatctctatcgcgctggacggcgcaacgctgcacaccaacgccagcgcaccggcattggctggcgaagcgttagagaaactggtgtctgagtacaacgcgacgcagaaaatgatcaaccgcatggagcgtcgttatccgaaagcaatgctgaaagagcttatctatcagccgacgctgacggaagccgacctctctgatgagcagaccgttacccgctgggtgaacgcgctggtcagcgaactgaacgacaaagaacagcacggcagccagtggaagtttgatgtccacaccaatgccgaacaaaacctgttcgagccgattgttcgcgtgcgtacccacggtgtggatactgactatccgctggatcacgaatttatcactggtggcgaatatcgtcgtatctgcacgctgggtgagaaactgcgtggcttgctggaagaagatgcatttatcgaacgtggcgagcgtcgtcagccggtagccagcttcgagcaggcgctggactggctggtgaaagagtctcgtcgcggtctctccatccagcgttataaaggtctgggcgagatgaacccggaacagctgtgggaaaccaccatggacccggaaagtcgtcgtatgctgcgcgttaccgttaaggatgcgattgccgctgacctgttgttcaccacgctgatgggcgacgccgtagaaccgcgtcgtgcgtttattgaagagaacgccctgaaagcggcgaatattgatatttaa

SEQ ID NO: 460142 - DNA, 399 bp, Shigella boydii
atggggctttttgatgaagttgtcggtgcctttctgaaaggcgatgcggggaaatatcaggcaattttaagttgggttgaggagcagggcggcattcaggtgctgctggaaaaactgcaaagtggcggcttaggggccattctctcaacctggttgagtaatcagcagagcaatcaatcagttagcggcgagcaactggaatcggcgctcggcacaaatgcggtgtccgatctcgggcaaaaacttggcgtggataccagtacggcttccagtttactggcagaacaattgccgaagattattgatgcgctctcaccgcaaggtgaagtgtcttcacaagccaataacgatctgctttccgcaggtatggaactgctgaaagggaaactcttccgctaa

SEQ ID NO: 460143 - DNA, 330 bp, Shigella boydii
atggctatcaaactcattgctatcgatatggatggcacccttctgctgcccgatcacaccatttcacccgccgttaaaaatgcgattgccgcagctcgcgcccgtggcgtgaatgtcgtgctaacgacgggtcgcccttatgcaggcgttcacaactacctgaaagagctgcatatggaacagccgggcgactactgcattacttataacggcgcgctggtacagaaggccgctgatggtagcaccgtggcgcaaactgctctcagttatgacgactatcgtttcctggaaaaactctctcgcgaagtcggttcacgtataggaaattga

SEQ ID NO: 460144 - DNA, 267 bp, Shigella boydii
atggtgaggtacttcgggttccttgccaaccgggtgtgtggagagaagctgccgcaggtgtaccgtgctctggggatggataaacaggaaccagtggcgaaagtgtgctatgcacaaatggtgaaacagttcctgagtcgtgactcgttcgaatgcgtgctgtgtggcggccggatggtataccgccgggccatcgcgggactgaatgtggaggggctgaagaaaaacgcgcgggatatcagtctgctgaggtatatgccggcctga

SEQ ID NO: 460145 - DNA, 270 bp, Shigella boydii
atgaaaacagcacacatttattcacccggttatgcgctgttagcaggcctgctgctgaccgccagcacaggagcacaggcagtcgacaacaacctgcatttttacggcaacctgctgagtaaatcctgcacgctggtggtggatggtgccaacctggcagaaatccattttcccaccgtcagcaaccgggatttgatggtatctgggcagtccgcgcatctgccggttgtgtttaagctgaaagactgcaaaggtaagcgtacagcctga

SEQ ID NO: 460146 - DNA, 489 bp, Shigella boydii
atgaaaaaattcctgctccttttactgtgcgctggttgcggggctgtgctggcggcggaagatgacatcacattccacggtacgctgatgtcgccgcccgcctgtagcatcagcggcgggcaaaccatcgaagtgcaatttcgcgatctcattatcgacagcattgatggcaattatggtcgtcagaaagtggactacgaactgagctgcgactcggatgtccgcgatcccgagtggaatatgacactctcctggacggggactgccacctcctacaacgactctgctattgagacggatgtaccgggcttcggaattgagcttcagcatgacggtcagcgttttaagctcaacgagccgctttccattaacgccaccgattttagccagaagccaaagctggaggcggtaccggtcaaagcggctgatgcggtgctgacggacacgaccttttctgcttacgcaaccttacgggtggattaccaatga

SEQ ID NO: 460147 - DNA, 510 bp, Shigella boydii
atgagtcacaagtttgtagcgggcgcagggttgctggtgctggccggatggggcatcagcggtttggctgttgctggcagtgatatcaaacaggtggatctgacgctgcgaatcctggtcgatggaccgccgccttgctccgtgaagggaagcgctgtgaaatttggcaatgtgataatcaacaggatcgatggtaccaattaccaacaggatgcgaaatacaccctcaactgcggtaataaagtcagcgatgacttacggatgcagctcaaaggcaatactgccgtgatcaacggagaaacggttctcagcacggatatcgccggcctgggggtgcggatagaaaacgccgccgacaactccctgtttgcagttggtgaaaataactggacgccttttaatgtcaacactcagcctcagctgaaagcggtgccggtaaaacagagcggggtgcaactgacgccgtcggagtttaacgccacgatgaccatggtggtggattaccaatga

SEQ ID NO: 460148 - DNA, 753 bp, Shigella boydii
atgtttaatctgactaacactgcaaaaatcgttgtcccggcactggcgctgctggcgacagcggtcagtttctccagccacgcttcggtgacgcccgacaggacacggctggtgtttaacgaaagcgacaagtccatcagcgtcacgctgcgcaacaacgatcccacactgccttatctggcgcagagctggatagaggatgcaaagggcaacaaaatcagctcgccgcttgcggtgcttccgccagtgcagcgcatcgatgcgatgatgaacggccaggtgaaggtgcaggggctgccggatatcaacaaactgccggccgaccgcgagagcgtgttctatttcaacgtgcgcgaaattccgctgaaatcaaataaaccgaacacactgcagattgcgctgcagacgcgtatcaaactgttctggcgaccgaaggcgctggagaacaccagcatgaaaagtccgtggcagcataaggtgacgctcatccgtaacggccaggacttcaccgtcaataacccgacgccgtactacgtgatcatcagcaacgccagcgctaaaaaaggcggcaacccgccggcgggattcacaccgctgatgatggagccgaaaacctccgcaccgctgaatgcgaagatggacagcgtgccggtgctgacttacatcaacgactacggcgcgcggatgccgctgtacttcaaatgcaccggcaacagctgccaggtggatgaagagcagagccgcaaaggctga

SEQ ID NO: 460149 - DNA, 2643 bp, Shigella boydii
atgcctgaccattctctttttcgattacggattcttccgtggtgcattgcgctggcaatgtcagggagttatagcagtgtctgggctgaagacgacattcagtttgattcccgttttctggaattaaaaggcgacacaaaaattgatctgaagcgtttttccagccagggatatgttgagcccggaaaatacaatttacaggttcaactaaataaacagccattggcggaagagtacgatatttactggtatgctggtgaagatgacgcgagcaaaagctatgcttgtctgacaccggaactggtagcgcagtttggtttaaaagaagacgtggcgaaaaatctgcaatggagccacgatgctaaatgcctgaaatccggtcaactggaaggcatggaaattaaggctgatttaagccagtccgcattagtcatttcactgccacaggcttacctcgaatatacttatcccgactgggatccgccttcacgttgggatgacggcatctccgggatcgtcgcggactacagcatcaacgcacaaacccggcacgaagaaaatggcggtgatgatagtaacgagatcagcggcaacgggacggtcggggttaacctggggccgtggcgtatgcgtgctgactggcagactaactatcaacatactcgcagtaatgatgacgatgaattcagcggcgatgaaactcaaaaaaaatgggagtggagtcgctactatgcctggcgggcgttaccatcattaaaagccaaactggcgctgggcgaggattacctcagatccgatatttttgatggttttaactatgttggtggcagtgtcagtactgacgatcaaatgttgcctcccaatctgcgcggctacgcgccagacatttccggcgtggcacacaccacagcaaaagtgaccgtcagccagatggggcgtgtgatttacgaaacgcaggttccggctggaccgtttcgtattcaggatcttggtgattctgtctccggtacgttgcatattcgcattgaagaacagaacggccaggtgcaggaatatgacatcagcaccgcctcgatgccatacctcactcgtccaggtcagattcgctataagatcatgatgggccgtccgcaagagtggggacaccatgtcgagggtgaatttttttctggtgctgaagcttcctgggggatcgctaacggctggtcgttatatggcggcgcactgggagatgaaaactatcagtctgcggcgcttggcgtcggtcgcgatttgtctacattcggcgcggtcgcgtttgatgttactcactcgcacaccaaactggataaagacaccgcttatggcaaaggttcgctggacggtaactccttccgtgtgagttattccaaagactttgaccagctcaacagccgcgttacttttgctggatatcgcttctcggaagagaactttatgaccatgagcgagtatctggatgccagtgacagcggaatggtacgcacgggcaacgacaaagagatgtacaccgccacttataaccagaacttccgcgatgcgggtgtttcggtttatctcaactatacccgccatacctactgggatcgcgaggagcagataaactacaacatcatgctctcgcactatttcaatatgggcagtattcgtaatgtcagcatctcgatgactggctaccgttacgagtatgacaaccaggccgacaaaggcatgtacatttcgctcagtatgccgtggggcgacaacagtaccgttagctataatggtaactatggcagtgggacggacagcagtcaggtcggttatttcagccgtgtcgatgacgcgactcactatcagttgaacgtcggcaccagtgacaaacacaccagcgttgacggctattacagccatgatggttcgctggcgcaggttgacctcagtgcgaactaccatgaagggcaatacacctctgcgggcttgtcgttacagggcggcgcaacgcttactgcccacggtggcgcacttcaccgtacccagaatatgggcgggacacgcttgttgattgatgccgatggcgttgccgatgttccggtggaaggtaacggggctgctgtttataccaatatgtttggtaaagccgtcgtttctgacgtcaataactattaccgcaatcaggcgtatatcgacctcaacagattgcctgaaaacgctgaagcaacccagtcggtggtgcaagccacgctaactgaaggtgccattggctaccgtaaatttgctgtcattagcggacaaaaagcgatggcggtgctgcgcctgagcgacggcagccatcctccgtttggcgcagaagtaaaaaatgataacgagcagacagtgggccttgtcgatgatgacggcaatgtttatctggctggggtgaaacctggcgaacacatgagtgtgttctggagtggtgttgcgcattgcgatatcaacctgccggacccgctgcctgccgatctgtttaacggcttgttactgccatgccagcataaaggcaatgtagcacctatcacttcgccggcggtcaaaccggcgattcaggaacagacacagcgggtgacgccaacggaacctccgacttcaatttcagtaaaccagtaa

SEQ ID NO: 460150 - DNA, 297 bp, Shigella boydii
atgaccactacctttacaggtaccgtttcttctgcaaatagcggcaattattacaccattttcaataccgataccggtgcggcatttaacaatgttagcctggcgatcggtgactctctgggtacctcttacaaaagcggcatgggtattgaccagaaaatagtgaaagacacttctactaataaaggcaaagcgaagcagacactgaactttaaagcctggctggtcggcgcagctgatgcgccagatctgggtaatttcgaagcaaataccaccttccagattacttacctgtaa

SEQ ID NO: 460151 - DNA, 261 bp, Shigella boydii
atgagtaagtttgttaaaacagctattgctgcggcaatggtgatgggcgtgttcacctctacggcaacaatcgctgcgggtaacaacggtactgcacgtttttacggcaccattgaagactcagtgtgttctatcgttccggacgatcacaaactggaagttgatatgggtgatatcggtgccgaaaaactgaaaaataacggcaccaccacgccgaaaagtttccagattcgtctgcaagattgcgtatttgatacttag

SEQ ID NO: 460152 - DNA, 486 bp, Shigella boydii
atgcaagtttttatcatgcgtcacggcgacgcagccctcgatgccgccagtgattcggttcgtcctctgaccactaatggttgtgacgaatctcgcctgatggcgaactggctgaaaggtcaaaaagtggaaatcgaacgcgttctggtgagcccgttcctgcgagccgagcaaacactggaagaagtaggggattgtctgaacctgccttccagtgcagaagttctgccggagttaacgccctgcggcgatgttggtctggtcagtgcctatttgcaggcgttgaccaatgaaggtgttgcttcggtactggtgatctctcacttaccgttagtcgggtatctggttgccgagttatgtccgggcgaaacgccgcctatgtttaccacctcggccattgccagcgtaacgcttgatgaaagcggaaacggtacattcaactggcagatgagcccgtgtaatctgaagatggcaaaagctatctga

SEQ ID NO: 460153 - DNA, 2145 bp, Shigella boydii
atggaaatggcatcagcgtttactcttaatgttcgtctggacaacattgctatcatcaccatcgacgtaccggatgagaaaatgaataccctgaaggcggaatttgcctcgcaggtgcgcgccattattaagcaactccgtgaaaacaaagagttgcgcggcgtggtgtttatctccgcgaaaccggacaattttatcgccggagcagacatcaacatgatcggcaactgcaaaacggcgcaagaagcggaagctctggcgcggcagggccaacagttgatggcggagattcatgctttgcccattccggttatcgcggctattcatggcgcttgcctgggtggtgggctggagttggcgctggcgtgccacggtcgcgtttgtactgacgatcctaaaacggtgctcggtttgcctgaagtacaacttggattgttacccggttcaggcggcacccagcgtttaccgcgtctgataggcgtcagcacagcattagagatgatcctcaccggaaaacaacttcgggcgaaacaggcattaaagctggggctggtggatgacgttgttccgcactccattttgctggaagtcgctgttgagctggcgaagaaggatcgcccatcttcccgccctctacctgtacgcgagcgtattctggcggggccgttaggtcgtgcgctgctgttcaaaatggtcggcaagaaaacagaacacaaaactcaaggcaattatccggcgacagaacgtatcctggaggttgttgaaacgggattagcgcagggcaccagcagcggttatgacgccgaagctcgggcgtttggcgaactggcgatgacgccacaatcgcaggcgctgcgtagtatcttttttgccagtacggacgtgaagaaagatcccggtagtgatgcaccgcctgcgccattaaacagcgtgggaattttaggtggtggcttgatgggcggcggtattgcttatgtcactgcttgtaaagcggggcttccggtcagaattaaagatatcaacccgcagggcataaatcatgcgctgaagtacagttgggatcagctggagggcaaagttcgccgtcgtcatctcaaagccagcgaacgtgacaaacagctggcattaatctccggaacgacggactatcgcggctttgcccatcgcgatctgattattgaagcggtgtttgaaaatctcgaattgaaacaacagatggtggcggaagttgagcaaaattgcgccgctcataccatctttgcttcgaatacgtcatctttaccgattggtgatatcgccgctcacgccacgcgacctgagcaagttatcggcctgcatttcttcagtccggtggaaaaaatgccgctggtggagattattcctcatgcgggtacatcagcgcaaaccatcgccactacggtaaaactggcgaaaaaacagggcaaaacgcccattgtcgtgcgtgacaaagccgggttttacgtcaatcgcatcttagcgccttacattaatgaagctatccgcatgctgaccaaaggtgaacgggtagagcacattgatgccgcgctagtgaaatttggttttccggtaggtccaatccaacttttggatgaggtaggaatcgacaccgggactaaaattattcctgtactggaagccgcttatggagaacgttttagcgcgcctgcaaatgttgtttcttcaattttgaacgatgatcgcaaaggcagaaaaaatggtcggggtttctatctttatggtcagaaagggcgtaaaagcaaaaaacaggtcgatcccgccatttacccgctcattggcgcacaagggcaggggcgactctccgcaccgcaggttgctgaacggtgtgtgatgttgatgctgaatgaagcagtacgttgtgttgatgagcaggttatccgtagcgtgcgtgacggggatattggtgcggtatttggcattggttttccgccatttctcggtggaccgttccgctatatcgattctctcggcgcgggcgaagtggttgcaataatgcaacgactggccacgcagtatggttcccgttttaccccttgcgagcgtttggtcgagatgggcgcgcgtggggaaagtttttggaaaacaactgcaactgacctgcaataa

SEQ ID NO: 460154 - DNA, 1311 bp, Shigella boydii
atgggtcaggttttaccgctggttacccgccagggcgatcgtatcgccattgttagcggtttacgtacgccttttgcccgccaggcgacggcttttcatggcattcccgcggttgatttagggaagatggtggtaggcgaactgctggcacgcagcgagatccccgctgaagtgattgaacagctggtctttggtcaggtcgtacaaatgcctgaagcccccaacattgcgcgtgaaattgttctcggtaccggaatgaatgtgcataccgatgcttacagcgtcagccgcgcttgcgctaccagtttccaggcggttgcaaacgtcgcagaaagcctgatggcgggaactatccgagcggggattgccggtggggcagattcctcttccgtattgccaattggcgtcagtaaaaaactggcgcgcgtgctggttgatgtcaacaaagctcgaaccatgagccagcgcctgaaactcttctctcgcctgcgtttgcgcgatttaatgcccgtaccgcctgcagtagcagaatattctaccggcttgcggatgggtgacaccgcagagcaaatggcgaaaacctacggcatcacccgagaacagcaagatgcattagcgcaccgttcgcatcagcgtgccgctcaggcatggtcagacggaaaactcaaagaagaggtgatgactgcctttatccctccttataaacaaccgcttgtcgaagacaacaatattcgcggtaattcctcgcttgccgattacgcaaagctgcgcccggcgtttgatcgcaaacacggaacggtaacggcggcaaacagtacgccgctgaccgatggcgcggcagcggtgatcctgatgactgaatcccgggcgaaagaattagggctagtgccgctggggtatctgcgcagctacgcatttactgcgattgatgtctggcaggacatgttgttcggtccggcctggtcaacaccgctggcgctggaacgtgccggtttgacaatgagcgatctgacattgatcgatatgcacgaagcctttgcagctcagacactggcgaatattcagttgctgggtagtgaacgttttgctcgtgaagtactggggcgtgcacatgccactggcgaagtggacgatagcaaatttaacgtgcttggcggttcgattgcttacgggcatcccttcgcggcgaccggcgcgcggatgattacccagacattgcatgaacttcgccgtcgcggcggtggatttggtttagttaccgcctgtgctgccggtgggcttggcgcggcaatggttctggaggcggaataa

SEQ ID NO: 460155 - DNA, 285 bp, Shigella boydii
atgagtaaatgtagtgctgatgaaaccccggtttgctgctgtatggatgttggcaccattatggacaactccgactgcaccgcgtcttacagccgcgtgtttgcaaaccgcgcagaagcagaacaaacgctggcggcgttgactgaaaaagcccgtagcgtggaatccgaaccgtgcaaaatctccccgactttcactgaagagtctgacggtgtgcgcctggatatcgatttcacttttgcctgcgaagctgaaatgctgatcttccagctgggtctgcgttaa

SEQ ID NO: 460156 - DNA, 1341 bp, Shigella boydii
atgagccagaaaaccctgtttacaaagtctgctctcgcagtcgcagtggcacttatctccacccaggcctggtcggcaggctttcagttaaacgaattttcttcctctggcctgggccgggcttattcaggggaaggcgcaattgccgatgatgcaggtaacgttagccgtaaccccgcattgattaccatgtttgaccgcccgacattttctgcgggtgcggtttatattgacccggatgtgaatatcagcggaacgtctccgtctggtcgtagcctgaaagccgataacatcgcgcctacggcatgggttccgaacatgcactttgttgcaccgattaacgaccaatttggttggggcgcttctattacctctaactatggtctggcaacagagtttaatgatacttatgcaggcggctctgtcgggggtacaactgaccttgaaaccatgaacctgaacttaagcggtgcgtatcgcttaaataatgcatggagctttggtcttggtttcaacgccgtctacgctcgcgcgaaaattgaacgtttcgcaggcgatctggggcagttggttgctggtcagattatgcaatctcctgccgggcaaactcctcaagggcaagcattggcagctaccgccaacggtatcgacagtaataccaaaatcgctcatctgaacggtaaccagtggggctttggctggaacgccggaatcctgtatgaactggataaaaataaccgctatgcactgacctaccgttctgaagtgaaaattgacttcaaaggtaactacagcagcgatcttaatcgtgcgtttaataactacggtttgccaattcctaccgcgacaggtggcgcaacgcaatcgggttatctgacgctgaacctgcctgaaatgtgggaagtgtcaggttataaccgtgttgatccacagtgggcgattcactatagcctggcttacaccagctggagtcagttccagcagctgaaagcgacctcaaccagtggcaacacgctgttccagaaacatgaaggctttaaagatgcttaccgcatcgcgttgggtaccacttattactacgatgataactggaccttccgtaccggtatcgcctttgatgacagcccagttccggctcagaatcgttctatctccattccggaccaggaccgtttctggctgagtgcaggtacgacttacgcatttaataaagatgcttcagtcgacgttggtgtttcttatatgcacggtcagagcgtgaaaattaacgaaggcccataccagttcgagtctgaaggtaaagcctggctgttcggtactaactttaactacgcgttctga

SEQ ID NO: 460157 - DNA, 825 bp, Shigella boydii
atgcaatcattacatgggaattgtctaattgcgtacgcaagacataaatatattctcaccatggttaatggtgaatatcgctattttaatggtggtgacctggtttttgcggatgcaagccaaattcgagtagataagtgtgttgaaaattttgtattagtatcaagggatacgctttcattatttctgccgatgctcaaggaggaggcattaaatcttcatgcacataaaaaaatttcttcattactcgttcatcactgtagcagagatattcctgtttttcaggaagttgcgcaactatcgcagaataagaatcttcgctatgcagaaatgctacgtaaaagagcattaatctttgcgttgttatctgtttttcttgaggatgagcactttataccgctgcttttgaacgttttgcaaccgaacatgcgaacaagagtttgtacggttatcaataataatatcgcccatgagtggacactagcccgaatcgccagcgagctgttgatgagtccaagcctgttaaagaaaaaattgcgcgaagaagagacatcatattcacagttgcttactgagtgtagaatgcaacgtgctttgcaacttattgttatacatggcttttcaattaagcgagtcgcagtgtcctgtggatatcacagcgtgtcgtacttcatttacgtctttcgaaattattatgggatgacgcccacagagtatcaggagcgatcggcgcagggattgccgaaccgtgactcggcggcaagtattgttgcgcaaggaaatttttacggcactgaccgttctgcggaaggaataagattatag

SEQ ID NO: 460158 - DNA, 729 bp, Shigella boydii
atgactcatgtctgctcggtgatcctcattcgtcgttcattcgatatttatcatgaacagcataaaatatcgctgcataacgagagtatcgtgctgctggagaaaaatttggcagacgattttgcgttttgttcaccggatacgcgacgactggatatcgatgagctgacagtttgccattacttacaaaatattcgtcagctaccacgcaatttagggttacatagcaaagaccgtctattaattaaccagtcaccccccatgccgctggtgacggcgatttttgatagcttcaatgaatccggggtaaattcaccgatactgagcaatatgctctacctttcctgtttatcgatgttttctcataagaaagaactgatccccttacttttcaatagcatcagcactgtttcaggaaaagttgaacgccttattagctttgatatcgccaaacgttggtatctgcgcgatatcgcggaaagaatgtataccagcgagagtctcatcaaaaaaaagttgcaggatgaaaatacctgtttcagtaaaatattactcgcttccaggatgtcgatggccagacgattactcgagttacgtcaaattcctctgcatactattgcagaaaaatgtggctatagcagtacgtcgtactttataaacacatttcgacaatattatggtgtaacgccacatcagtttgcgcaacattcgccaggtaccttttcctga

SEQ ID NO: 460159 - DNA, 282 bp, Shigella boydii
atgtttgggattattaagctgacaattcatacgattacgggaatgtgggtcagtattgtgctgttcaaattgatgacgaatggctggagtggtttctactttcagtgctgtgtactaagcctggtattcctgacggttagctggttgttgagtggtgaatggttagcaggaaagagtaaggctgaaccttcacgttcaaccttactctcatttacacgttacgcttttttaaagcgggcaaagagatgttccactacaacgaaaaagaccggaacgaagtaa

SEQ ID NO: 460160 - DNA, 3114 bp, Shigella boydii
atggctaactattttattgatcgcccggtttttgcctgggtacttgccattattatgatgcttgcaggtggtctggcgatcatgaacttaccggttgcgcagtatccgcagattgcgccaccgaccattaccgtcagcgctacctatccaggtgccgatgcgcaaacggtagaagactcggtcactcaggtgattgagcaaaatatgaatgggcttgatggcctgatgtacatgtcttcaaccagtgatgcggcgggtaatgcctctatcactctgaccttcgagactgggacatctcctgatatcgcacaggttcaggtgcaaaataaactgcaactcgctatgccttcattacctgaagcggtgcagcagcaggggattagcgttgataagtcgagcagtaatattctgatggtagcggcgtttatttctgataacggcagcctcaaccagtacgatatcgcggactatgtagcgtctaatatcaaagacccgctaagccgtaccgcgggcgttggtagcgtacagctctttggttccgagtacgccatgcgtatctggctggacccgcaaaaactcaataaatacaatctggtaccttccgatgttatttcccagattaaggtgcaaaacaaccagatttccggtggtcaactgggtggcatgccacaggcggcagaccagcaactaaacgcctcgatcattgtgcagacgcgtctgcaaacgccggaagaatttggcaaaatcctgttgaaagttcagcaagatggttcgcaagtgctgctgcgtgatgtcgcccgcgtcgaacttggagcggaagattattccaccgtggcgcgctataacggcaaacctgctgccgggatcgccatcaaactggctaccggagcaaacgccctggatacctcgcgggcagtcaaagaggagctgaaccgcttatcagcctatttccccgcaagtctgaagacggtttatccttacgacaccacgccgtttatcgaaatttctattcaggaagtttttaaaacactggttgaggctatcatcctcgtcttcctggtcatgtatctgtttttgcagaatttccgtgccacaatcatcccgacgattgccgtaccggtggttattctcgggacgtttgcgatcttgtcggcggtcggtttcaccatcaacacgttaactatgttcgggatggtgctggcgatagggttactggtggatgacgccatcgtggtggtggagaacgtcgagcgtgtcattgcggaagataagctaccaccgaaggaagcgacgcataaatcgatggggcagatccaacgtgcgctggtcggtattgctgttgttctttccgcagtgtttatgccgatggcctttatgagcggcgcaaccggggagatctaccgccagttctccatcacgctgatctcctccatgctgctttcagtatttgtggcaatgagcctgacccctgccctgtgcgccaccattctgaaagccgcgccggaaggcggtcacaaacctaacgccctgttcgcacgcttcaacacgctgtttgaaaaatcaactcagcactataccgatagcacccgctcgctgttgcgttgtaccggtcgctacatggtggtctacctgctgatttgcgccgggatggcggtgctgttcctgcgtacaccgacctctttcttaccagaagaggatcagggggtatttatgaccaccgcgcagttaccttccggtgccaccatggttaacaccacgaaagtgctgcaacaggtgacggattattatcttacaaaagagaaagataatgttcagtcggtgtttaccgttggcggctttggcttcagcggccaggggcaaaacaacggcctggcgtttatcagtctcaagccgtggtctgaacgtgtcggtgaggaaaactcggttaccgcgatcattcagcgggcaatgattgcgttaagcagtatcaataaagccgtcgtcttcccgttcaacttacccgcggtggctgaactgggtaccgcgtcaggttttgatatggaactgctggacaacggtaacctggggcacgaaaaactaacccaggcacgaaacgagctgttatcactggcagcgcaatcgcctgaccaggtcaccggggtacgcccgaacggcctggaagatacgccgatgttcaaagtgaacgtcaacgccgcgaaagctgaggcaatgggtgtggcgctgtctgatatcaaccagacaatttccaccgccttcggcagcagctacgtgaacgacttcctcaaccaggggcgggtgaaaaaagtgtatgtccaggcaggcacgccgttccgtatgttgccggataacatcaaccaatggtatgtacgcaacgcctctggcacgatggcaccgctttctgcctactcgtctaccgaatggacctatggttcaccgcgattggaacgctacaacggcatcccgtcaatggagattttaggtgaagcggcggccgggaaaagtaccggtgacgctatgaaatttatggcagacctggtcgctaaacttccggcaggcgtcggctactcatggaccggactgtcgtatcaggaagcgttatcctcaaaccaggctcctgcactgtatgccatttcactggtcgtggtgttcctcgccctcgccgcactctatgagagctggtcaattccgttctcggtgatgttggttgttccgttaggcgtcgttggcgcattactggccaccgatctgcgcggcttaagtaatgacgtctacttccaggttggtttgctgaccaccatcgggctttccgccaagaacgccatcctgattgtcgaatttgccgttgagatgatgcagaaagaagggaaaacgccgataggggcaatcatcgaagcggcgcggatgcgtttacgcccaatcctgatgacctctctggcctttattctcggcgtgctgccgctggttatcagtcatggtgccggttctggcgcgcaaaacgcggtaggtaccggcgtgatgggcgggatgtttgccgcaacagtgctggcaatttacttcgttccggtctttttcgttgtagtggaacatctctttgcccgctttaaaaaagcgtaa

SEQ ID NO: 460161 - DNA, 1158 bp, Shigella boydii
atgaacagaagaagaaagctgttaataccgttgttattctgcggcgcgatgctcaccgcctgcgatgacaaatcggcggaaaacgccgccgccatgacgtctgaggtcggtgtcgtcacactctcccccggttcggtcaatgtgttgagcgaattgcccggtagaaccgttccttatgaagttgccgagatacgtccccaggtgggcggtattatcattaaacgcaactttatcgaaggcgataaagtgaaccagggcgattcgctgtatcagattgatcctgcacctttacaggccgagctaaactccgccaaaggctcgctggcgaaagcgctctctaccgccagcaatgcccgcatcacctttaaccgccaggcatcgttgctgaagaccaactacgttagccgtcaggattacgacaccgcgcgcacccagctgaatgaagcagaagccaatgtcaccgtcgccaaagcggctgttgaacaggcgacgatcaatctgcaatacgcgaatgtcacctcgccgattacgggcgtcagcgggaaatcgtcggtgaccgtcggcgcactcgttaccgctaatcaggcagattcgctggttaccgtacaacgtctggacccgatttatgtcgatctcacgcagtcggtgcaggatttcttgcgcatgaaagaagaggtcgccagtgggcaaatcaaacaggttcagggcagtacgccagtacagctcaatctggaaaatggtaaacgctacagccagaccggcacactgaaattctccgacccgacggtggatgaaaccacgggctccgtgacgttacgggcgattttccccaacccaaatggtgacttgctgcctggcatgtacgtcacggcattagtggatgaaggtagccgccagaatgtattactggtgccgcaggaaggcgtcacccacaacgcccagggtaaagcaacggcgctcattctggataaagacgatgttgtgcagctacgcgaaattgaagccagcaaagccatcggcgacgagtgggttgtcacctctggcttgcaggctggcgatcgggtgatcgtttccggtttgcaacgcattcgtccgggtatcaaagcacgagcaatttcctccagccaggaaaacgccagcaccgaatcgaaacaataa

SEQ ID NO: 460162 - DNA, 279 bp, Shigella boydii
atgagggatttacagaccagcggcatagtggggttgtcagccagtaaggtgggatacaggcacagtgatcgacatggtgaggtcaacgacaaaaaaaatgttgccgttctgccaacagttcctgccagcattcgggcaacgaagggttctactggtggatacacataccaggggaataaagtcgttttagcctctcctttagtaatcaccgggggtaatgaaatcagcatctgcatccctcgtcatgccagccatcaatttcagttgcttatgtcctga

SEQ ID NO: 460163 - DNA, 528 bp, Shigella boydii
atgatttttctcatgacgaaagattcttttcttttacagggcttttggcagttgaaagataatcacgaaatgataaaaatcaattccctgtcagagatcaaaaaagtaggcaataaacccttcaaggttatcattgatacctatcacaatcatatccttgatgaagaagcgattaaatttctggagaaattagatgccgagagaattattgttttggcaccttatcacatcagtaaactaaaagctaaagcgcctatttattttgttagccgcaaagaaagtatcaaaaatcttcttgagattacttatggtaaacacttgccccataagaattcacaattatgtttttcacataatcagttcaaaattatgcaactgattctgaaaaataaaaatgaaagcaatatcacgttgacgctcaatatttcgcaacaaacattaaagattcagaaattcaacattatgtacaagttgaaactaagacgtatgagcgacatcgtcaccctgggtatcacatcttatttttag

SEQ ID NO: 460164 - DNA, 573 bp, Shigella boydii
atgttatatatagataaggcaacaattttgaagtttgatctggagatgcttaaaaaacatcgcagagcaatccagtttattgccgtgctgctgtttatcgtcgggttgctgtgtatcagtttcccgttcgtctctggcgatattttaagcacagtagtgggtgcattattaatctgctcgggtattgcgcttattgtcgggttattcagcaaccgcagtcataatttctggccggtattatccggtttcctcgtcgcagtcgcctatttattgatcggctatttcttcatccgcgcaccggagctgggcatttttgccattgcggcatttattgccggtttgttctgtgttgcaggggttattcgcctgatgagttggtatcgtcagcgttcaatgaaaggcagctggctacagctcgttattggtgtgctggatatcgtcattgcctggatattccttggtgcaacgccgatggtgtctgtaacgctggtttccacactggtgggaattgaactgatatttagcgccgccagcctgttcagcttcgccagtttgttcgttaagcagcaataa

SEQ ID NO: 460165 - DNA, 333 bp, Shigella boydii
atgaaaaaagtattaggcgttattcttggtggtctgcttcttctgccagttgtgagcaatgcagcggatgcgcaaaaagcagctgataacaaaaaaccggtcaactcctggacctgtgaagatttcctggctgtggacgaatccttccagccaactgcagttggttttgctgaagcgctgaacaacaaagataaaccagaagatgcggttttagatgttcagggtattgcaaccgtaaccccagctatcgttcaggcttgtactcaggataaacaagccaactttaaagataaagttaaaggcgaatgggacaaaattaagaaagatatgtaa

SEQ ID NO: 460166 - DNA, 339 bp, Shigella boydii
atgggttacaaaatgaatatttcatctctccgtaaagcgtttatttttatgggcgctgtagcggctttgtcactggtgaacgcacaatctgcgctggcagccaatgaatccgctaaagatatgacctgccaggaatttattgatctgaatccaaaagcaatgaccccggttgcatggtggatgctgcatgaagaaacagtatataaaggtggcgataccgttactttaaatgaaaccgatctcactcaaattcctaaagtgatcgaatactgtaagaaaaacccgcagaaaaatttgtataccttcaaaaatcaagcatctaatgacttgccgaattaa

SEQ ID NO: 460167 - DNA, 576 bp, Shigella boydii
atgcgaggcaaaggagcagggttacgcacacatgtattaattggcatgggaagcgccctgtttatgattgtttcgaaatatggttttgctgacgtgctgtctttagatcacgtcggactcgaccccagccgtattgctgctcaggtggtgacgggcgtcgggtttatcggtgcaggtaacattctcgttcgtaaccaaaatattgtaggtttgacgacggcagcggatatctggatgaccgccgctataggtatggttattggcagtggtatgtacgaattgggtatgtatggttcagtgatgaccttgctggtgctggaagtcttccatcaattaaccttccgcctgatgaacaaaaattaccatttacagctgacattagtgaacggtaatacggtatcaatgctcgactggtttaagcagcaaaaaataaaaacggatttagtttcgttgcaggaaaatgaagatcatgaagtggtcgccattgatatccagcttcatgccacaacgtcgatagaagatctgttgcgattattaaaaggtatggcaggggtgaaaggcgtttcaattagctaa

SEQ ID NO: 460168 - DNA, 531 bp, Shigella boydii
atgtttcttataattaccagggatacgatgttcttcaccgcgatgaaaaacattttgagcaaaggtaatgtcgttcatatacagaacgaagaagagatcgacggaatgttgcatcagaatgcctttgtcattattgatacattaatgaataatgtatttcattctaattttctcactcaaattgaacgattaaaacctgtccatgtgattattttctccccctttaatattaaacgctgcctggggaaagtgccggtgacctttgttccgcggactatcactatcatcgattttgtcgcactcatcaatggcagttactgctctgtgcctgaagcggctgtgtcactttcgcgcaagcaacatcaggttctgagctgcattgcgaatcaaatgacaacggaggatattctggagaaactgaaaataacgctaaaaacgttctactgccataaacacaatatcatgatgatcctcaatcttaagcggatcaatgagctggtacgccatcagcatattgattatctggtgtga

SEQ ID NO: 460169 - DNA, 723 bp, Shigella boydii
atgccacgccccaaaatcaatggaattgaactaaacaaaagggatataaacatcagacaggtttacgttactatcaggcatatcacctcagaatcagatgaaaactataaagaaatatctattatggttttaatatttgttgataaggatagtaacatgaacatgacaaaaggtgcactcatcctcagcctttcatttttgcttgccgcatgtagttcaattccgcaaaatatcaaaggcaataaccaacctgatattcaaaaaagttttgttgctgttcataaccagccggggttatatgttggtcaacaagcgcgctttggtgggaaggttatcaacgttatcaatggcaaaacggatacgttgttagaaatcgctgtattaccgttggatagctatgcgaaacctgatattgaagccaactatcagggccgactgctcgccagacaaagcggcttccttgacccagtgaactatcgtaatcactttgttaccatcctcggtaccattcagggtgaacaacctggctttatcaataaagtcccgtataacttcctggaagtgaatatgcagggcatccaggtgtggcatttgagagaagtggttaataccacctataacctatgggattacggctatggtgcattctggccggaaccgggctggggtgcgccttactacaccaatgcggtgagtcaggtaacacctgagctggtcaaataa

SEQ ID NO: 460170 - DNA, 333 bp, Shigella boydii
atgagcggaaaaccagcggcacgtcagggcgatgccacaatgaaaggtggcccgatagtccaggggtcggcaggcgtgagaattggtgcgccaaccggcgtggcctgctcagtgtgccccggcggattcacttccggcaacccggtgaatccgctgctcggtgcaaaagtacagcccggcgaaaccgatttcgcgctgcccggcccgttaccgttcgtgctctccgcacctacagcagctaccggacgaaaacccctgcgcccgtcggtatcttcggtcctggctggaaagcaccctttgatatccgcttacagatacgcgataacgaactga

SEQ ID NO: 460171 - DNA, 3576 bp, Shigella boydii
gtgctgcctgccccattgccgccgtaccgggtgctgaccggcctggtggaccgcttcgggcgcacgcaaaccttccaccgtgaggccgcaggcgaatttaccggagaaatcaccggcgtgaccgatggggcaggccgtcagttctgcctggtgctgaccacgcaggcgcaacgggcagaaaacgcccggcagcaggccatcgccgcaggaacgaaaggatcggatatcccggattcactgccggactatacggagtatggccgggataacggtatccgcctgtcaggggtgtggctgacgcacgacccggaatacccggagaatctgcccgccgcccccctggtacgctacgactggacggcacgcggtgagctggcggcggtgtatgaccgcagcggtactcagatgcgccactttacttacgatgataaataccggggccggatggtggcgcaccgttacgcaggcaggccggagatgcgttaccgctacgacgacataggtcgcgtgacggagcagtttaatccggcaggcttaagctacgcctatcagtatgagaaaaaccgtatcaccatcaccgacagcctgaaccggcgggaggtgctgcacacggaaggtgaagccgggctgaaacgtgtggtgaaaaaggaattcgcggatggcagcatcacccgaagtaaatttgactatatggggcgactccagtcacagacggatgcagcaggccggacaacagaatacagtccgaatgtggtgacgggactcgtcacgtgcatcaccacgccggacggcaggaaatcggaattttactataacaatcaaaaccagttaacctcagccaccgggcctgacggactggaaatacgccggaaatatgatgagtacgggcgtctgacgcaggaaacagcacgcaacggcgatgtcacccgctacagttatgataatccacacagtgaattaccctctgtaacagaagatgcgacgggtagccgcaagcagatgacgtggagccgctacgggcagttacagaccttcaccgactgctcaggctatgaaacccgttatgaatatgaccgcttcgggcaaatgacggcggttcaccgtgaggaaagcatcagcctttaccgcagttacgacaaccgtggccagttaatctcggtgaaagatacgcagggccgtgaaacgcagtatgagtacaacgccgcaggcgacccgaccgccatcattgccccggacggcaaccggagtgagacacagtacgatgcgtggggaaaggccgtcagcaccgcacagggtgggctgacgcgcagcatggaatacgatgcagcgggacgtgtcatcagcctgaccaacgagaacggcagccatacagaatttagctgggatgtgcttgacctcctgatacagcagcgcggctttgacgggcggacgcagcgttaccgttatgacctgaccgggaaactcacgcagagcgaggatgaggggcttatcaccctctggcactacgatgcatcggaccgtatcacacaccgcacggtgaacggcgaaccggcagagcagtggcggtataacgaccacggctggctgacagaaatcagccatctcagcgaaggccaccgggtggcggtgcattacggttataaccgtaagggacgtctcacaggcgagcgccagacggtacatcacccggagacgggggaactgctctggcagcatgagacgcaacacacttacaacgagcaggggctggcaaaccgctttcaggcagacagcctgccaccggtggagtggctaacgtatggcagcggttacctggcgggaatgaaactgggcgacacgccgctggtggagtacacacgggatagactgcaccgggaaacggtgcgcagcttcggcaataatgcatatgaactgaccagcacttacacccccgcaggccggttacagagtcagcacctgaacagcctggtgtatgaccgtgactatggctggaatgacaatggcgacctggtgcgcatcagcggcccgtggcagtcgcgggaatacggctacagtgccacgggcaggctggagagtgtgcgcacccttgcatcagacctggatatccgcatcccgtatgcctccgacccggcgggaaaccgcctgccggacccggagctgcacccggacagtacactcacggcgtggccggataaccgaatcaccgaagacgcgtactacctgtaccgctatgacaggtatggcaggctgacggagaagacggaccgcatcccgacgggtgtgatacggacggacgacgagcggacccaccactaccactacgacagccagcaccggctggtgttttatacgcggatacagcatgaggagccactggtcgagagccgctatctctacgacccgctgggccgccggacggggaaacgggtgtggcgttgcgagcgtgacctgacgggatggatgtcgctgtcgcgtaaaccggaggtgacgtggtacggctgggacagcgaccggctgacgacggtacagaccgataccaagcgtatccagacggtataccagccggggagcttcacgccgctcatccgtatcgaaacagagaatggtgagctgcagaaagcgcagcgccgcagcctggcggagaagttgcagcaggaaggaagcgaggacggccacggtgtggtgttcccggcagaacttgtgaggatgctggacaggctggagggggaaatccgggcagaccgcgtgagcagtgaaagccgccagtggctggcacagtgcgggctgacggtggagcggctggcggcacagatagagccggtttatttacctgagcgaaaaattcatctttatcactgtgaccaccgggggctgccgctggcgctcatcagtaccgaaggagcaacggaatggcgtggggagtatgacgagtgggggaatcagcttaatgaggagaacccgcatcatctgttccagccataccgcctgccggggcagcagtacgatgatgaatcggggctgtgctataatcgttatcgttactacgagccgttacaggggaggtatattacacaggacccgattgggttaaatggggggtggaatttatataaatatccgctgaatccaataaattatgcagatcctcttggcttagccgtagatataaaccacttcccagttaacgaagacatacgaaattatgcagagaaagtttggaataatcctaatatcattacaattggaacacatggtgatcctcaatcagtatatgatgaaaattataataagatagatgtcaagacattagctaatgaggttcgaaatcatcctaaatttaaacatggaatgtcagtaagactgttatcctgtaatacaggaaaaggaaataactcttatgcacagcaattggcagatgaactaggtgtgagagtctatgctcctgaccaatatgactggtactattcaaatggtaaggtagagccttggggaggattctatgatgcaaacaatcaattgcaaatggacacgaatcagcctggacatgagtttacattcaagcgaaggaaaccatag

SEQ ID NO: 460172 - DNA, 549 bp, Shigella boydii
atgagtaatgatagcgaaaagataatatcaacatattcgctcaattttttatcaccagatgatgtgaggaaagaagaacttaaggcatcacaaggtgatagtgatgctgcatttaaattatacaaatattaccttttttgcgagccaaaatcatacagaaaacagcacgaatggttaataatatcggcaaataatggaaatgctatagctcaatataacttatcaagagaacttgagtcagaaggaaaagtagatgaatcaatacaatggctgaagaaatcagcggaacatggtaataattacgcacaatatcagatgtcaaaatatttattaaaaataggtgatattagaggatcggaatattatctaaacttatctgcggataacggatgtgtatttgcaataaaagatattatcaaaaatatgatggatagtggaaagtacgatgacgccctcatttgggttgaaaaattgaaaaaattgtatcctgacacaaataccgaactttacatacaaaaaataacgcagaaaaaaaagcaatccaaataa

SEQ ID NO: 460173 - DNA, 138 bp, Shigella boydii
atgtttaccagaaaaaaggtggtcaatctggtggccttgacaatctcgattttttgttttagctttccaatcagccagttaatggctacggcgatcccagtcagaggagccaaatttctgaaaagcccgcttttatag

SEQ ID NO: 460174 - DNA, 951 bp, Shigella boydii
gtgaatttccaacaactaaagataatccgcgaggctgcacgtcaggattacaacctgacagaggttgcgaatatgctttttacctcacagtccggcgtcagccgtcatattcgggaactggaggatgaacttggcatcgaaatatttgttcgacgaggtaagcggctgctgggcatgactgaaccgggcaaagcattactggtcattgcagaacgtattctgaatgaagccagtaatgttcgtcggcttgcagacctgtttaccaacgatacgtttggcgttctcactattgcaacgacgcatactcaggcacgttatagcttgccagaggtcattaaagcttttcgcgaacttttcccggaggttcggctcgagctaatccaggggacgccacaggaaattgcgacgttgttgcaaaatggcgaagctgatattggtatcgccagcgagcgtttgagtaatgacccgcagctcgtcgccttcccgtggtttcgttggcaccatagtttgcttgttccactcgatcatcccttaacgcaaattacaccattgacgctggaatcaatagcgaagtggccgttaatcacttaccgacaggggattacggggcgctcacgtattgatgacgcatttgcccgcaaaggtttgctggcagatattgtattaagtgcgcaggattctgatgtcattaaaacctatgttgctcttgggcttgggatcggattagttgccgaacaatccagcggcgaacaagaggaagagaatttaatccgtctggatacgcggcatcttttcgatgctaatactgtctggttgggactgaagcgaggacaacttcagcgtaactatgtctggcgctttctggaactttgtaatgcaggactgtcagttgaggatatcaagcggcaggtgatggaaaacagtgaagaggaaattgattatcagatatag

SEQ ID NO: 460175 - DNA, 942 bp, Shigella boydii
atgaacttcagacgcctgaaatacttcgtaaaaattgtagatattggtagcctgacccaggctgctgaagtattgcatatcgcacaaccagcgctcagccagcaggttgccacactggaaggtgagttaaatcaacaacttttgatccgtacaaagcggggcgttacgccaacagacgccggaaaaattctctatacccatgcgcgggccattttacgtcagtgtgaacaggcccaactggcggtgcataacgttggtcaggcattatcggggcaagtctcgattggctttgcaccaggaaccgctgcgtcatccatcaccatgcccttattacaggcggttcgcgctgaatttccggagatcgttatctatcttcatgaaaatagtggtgcagtgcttaacgaaaaattgataaatcaccaactcgatatggcggtgatttatgagcattcccctgtggctggtgtatccagtcaggctttgctgaaagaagatctttttctggtaggaactcaagattgcccggggcaaagcgttgatgtgaatgctattgcgaaaatgaacctctttctccccagtgattacagtgctattagacttcgtgttgatgaggctttttccttacggcgactcacagcaaaagtcattggtgaaattgagtctattgccacgcttaccgcagcgattgcaagcggcatgggcgttgcagtattacccgaatcggccgcgcgttcgttatgtggcgcagtaaatgggtggatgtcacgcattaccactccttccatgagtctctctttgtcattaaatttacccgccagagcgaacttatcgccacaggcacaggcacaggcacaggcacaggcacaggcagtgaaagagttgttaatgtcagtgattagttccccagtgatggaaaaaaggcagtggcaattggtgagctaa

SEQ ID NO: 460176 - DNA, 936 bp, Shigella boydii
atgatgcgtcgtgtaaatattttttgctcatttgctctgctttttgccagccatactagcctggcggtaacttatccattacctccagagggtagccgtttagtggggcagtcgtttactgtaactgttcctgatcacaatacccagccgctggagacttttgccgcacaatacgggcaagggttaagtaacatgctggaagcgaacccgggcgctgatgtttttttgccgaagtctggctcgcaactcaccattccgcagcaactgattttgcccgccactgttcgtaaagggattgtggttaacgtcgctgagatgcgtctttattactacccaccagacagtaatactgtggaagtctttcctattggtatcggccaggctgggcgagaaaccccgcgtaactgggtgactaccgttgaacgtaaacaagaagctccaacctggacgccaacgccgaacactcggcgcgaatatgcgaaacgaggggagagtttgcccgcatttgttcctgcgggccccgataatcccatggggctgtacgcgatttatattggcaggttgtatgccatccatggtaccaatgccaattttggtattgggctccgggtaagtcagggctgtattcgtctgcgcaatgacgatatcaaatatctgtttgataatgttcctgttgggacgcgtgtgcaaattatcgaccagccagtaaaatacaccactgaaccagatggctcgaactggctggaagttcatgagccgttgtcgcgcaatcgtgcagaatatgagtctgaccgaaaagtgccattgccggtaaccccatctttgcgggcgtttatcagcgggcaagaagttgatgtaaatcgcgcaaatgctgcgttgcaacgtcgatcgggaatgcctgtgcaaattagttctggttcaagacagatgttttaa

SEQ ID NO: 460177 - DNA, 1086 bp, Shigella boydii
atgcaaacacttgccgatttactgaatacgatccctgctatcgatcctgccgctatgtcgcgtgcacaacggcatattgacgggttactcaaacctgttggtagcctgggaaggctggaggcgcttgccatacaactggcgggaatgccggggttgaatggcataccgcatgtgggcaaaaaagcggtactggttatgtgtgccgatcacggcgtctgggaggaaggggtcgctatttccccaaaagaagtgacagccattcaggctgaaaatatgacccgcggaacaaccggcgtgtgtgtgctggcagcacaagcgggcgctaacgtccacgtagttgatgttggtattgatagtgctgagcctatccccgggcttatcaacatgcgtgtcgcacgaggtagcggcaatattgcttcagctccggcaatgagtcgccgtcaggctgaaaagttgcttttggacgtcatatgttatacgcgggagctggcaaaaaacggtgtcacgctgtttggtgtaggtgaactggggatggcaaacacgacaccggcagcggcagcggcaatagtcagcacaatcactggccgggatcctgaagaagtggttgggattggcgcaaacctgccgacagataaactggctaataaaattgatgttgtgcgccgggcgattacgttgaatcaaccaaatccgcaggatggcgttgatgtcctggcaaaagtgggtggatttgatttggtcggaatggctggcgtgatgttaggcgctgcttcctgcggtttacccgtgttgctggatggatttctttcttatgctgccgcgctcgcagcctgccagatgtctcctgcaatcaaaccgtatctcattccttctcacctgtcggcagaaaaaggggcgcgtattgcgctgtcgcatttggggctggagccttatctcaatatggagatgcgtttaggtgaggggagtggcgcagctctggcgatgcccatcatcgaagctgcctgtgcgatatataacaacatgggcgaacttgctgccagtaatattgttctaccggggaatacgacttctgatttgaacagttaa

SEQ ID NO: 460178 - DNA, 744 bp, Shigella boydii
atgagtaaattattttgggcgatgctctcatttattacgcgtctgcctgtaccgcgtcgctggtcccagggactggatttcgagcattattctcgcggtattattacttttcctttaattggattattgcttggcgcgattagcgggctggtcttcatggtgctgcaggcatggtgtggcgtaccactggcggcactgtttagcgtacttgtgctggcgctgatgaccgggggattccacctggacggcctcgccgatacctgtgatggcgtattttctgcacgtagccgcgatcgcatgttggaaatcatgcgtgatagccgtttaggcacccatggcggtctggcattgatttttgttgtactggcaaagattctggtattaagcgagttggctctgcgtggcgaaccgatccttgcatcgctggcggcagcatgtgcggtcagccgcgggactgccgcattattgatgtatcgtcatcgttatgcgcgggaagaagggcttggcaatgtgttcattggcaaaattgatgggcgacaaacctgcgtcacactcggcttagccgctatttttgctgccgtattattgccgggtatgcatggtgtggctgctatggtggtaacgatggtggcgattttcatcctcggtcagcttctcaaacgtacgctgggcgggcaaaccggcgatacgctgggagctgctatagagcttggtgaactggtcttcctgctggcactgctataa

SEQ ID NO: 460179 - DNA, 543 bp, Shigella boydii
atgattttggtgacggggggcgcacggagcgggaagagtcgccacgcagaggcgcttattggggactcttcacaggttctgtatatcgctacctcgcaaatccttgatgatgagatggctgcacggatagaacatcatcggcaaggccgcccggagcactggcgcacagtggagcgctggcaacatcttgatgaattaattcatgcagacattaacccgaatgaggttgtgttgctggaatgcgttaccacaatggtgactaatctgttgtttgattatggcggcgataaagaccctgatgaatgggattatcaggcgatggaacaggcgattaatgctgagattcagtcgttgattgctgcctgccaacgttgccccgcaaaggttgtattagtgactaacgaagtgggaatggggattgtgccggagagtcgtctggcacgacattttcgtgatattgccgggcgggtaaatcagcagttggccgctgcggcaaatgaagtatggctggtggtttcgggtattggagtaaaaatcaaatga

SEQ ID NO: 460180 - DNA, 276 bp, Shigella boydii; identical to SEQ ID NO: 459365

SEQ ID NO: 460181 - DNA, 342 bp, Shigella boydii
atgcgacgctggcacacctgtttttttattctgctgttctgtggcttcagcggaaacgtgttgtgcaaagaatcgattaatgaagcgatagaacgtttgtaccaaccattgaccagtaatgacgatataccaataaccgatgaattcagtctcgatttgcgaagtaatatgagcgctactcctggcaaaatgacaccctggctgaataataatcttttgtgtcgctgtgtcgctgtgtcgctgtgtcgctgtgtcgatgacgctttcgtttctgcagaaataatccaaagcacacacctaaatggcggccgaacgcatgtactgtttagactggccccctga

SEQ ID NO: 460182 - DNA, 258 bp, Shigella boydii
atgaaaacgattttcaccgtgggagctgttgttctggcaacctgcttgctcagtggctgcgtcaatgagcaaaaggtcaatcagctggcgagcaatgtgcaaacattaaatgccaaaatcgcccggcttgagcaggatatgaaagcactacgcccacaaatctatgctgccaaatccgaagctaacagagccaatacgcgtcttgatgcacaggactattttgattgcctgcgctgcttgcgtatgtacgcagaatga

SEQ ID NO: 460183 - DNA, 927 bp, Shigella boydii
atgaaaataatacttctgtttttagcagccttggcaagttttaccgtacacgcgcagcctccttcacagaccgtagaacaaacagtccggcagatttatcagaactataaatcagatgccagtacgccttatttcggtgaaaccggagagcgggcgataacttcagcgcgtattcaacaggcgcttaccctgaacgacaatcttacgctgccgggcaatattggctggctggattatgatccggtttgtgattgtcaggattttggcgatctggtgctagaaagcgttgcgataacccaaactgacgccgatcatgccgatgccgttgtgcgctttcgtatctttaaagatgataaagaaaagaccacgcagacactgaaaatggtggcggaaaatggtcgttgggtcattgacgatattgtcagcaatcatggcagcgtcttacaagcagttaatagcgagaatgaaaaaacgctggccgctttagcttcgttgcaaaaagaacagccggaagcctttgttgccgaactctttgaacatattgctgattatagctggccgtggacgtgggtggtttccgactcttaccgccaggcggttaatgccttctataaaaccaccttcaagacggccaataatcccgatgaagatatgcaaatagaacggcaatttatttacgacaatccgatctgttttggcgaagagtcgctattttcacgcgttgatgaaattcgagtcctggagaaaaccgccgattccgcccgcattcatgttcgttttacgctgaccaatggcaacaacgaagagcaagaactggttttacagcggcgcgaaggcaagtgggaaatcgctgattttatccgcccgaacagcggcagcctacttaagcagattgaggcaaaaactgccgccagattaaagcaatga

SEQ ID NO: 460184 - DNA, 828 bp, Shigella boydii
atggctaatccaaccgttattaagctacaggatggcaatgtcatgccccagcagggactgggcgtctggcaagcaagtaatgaggaagtaatcaccgccattcaaaaagcgttagaagtgggttatcgctcgattgataccgccgcggcctacaagaacgaagaaggtgtcggcaaagccctgaaaaatgcctcagtcaacagagaagaactgttcatcaccactaagctgtggaacgacgaccacaagcgcccccgcgaagccctgctcgacagcctgaaaaaactccagcttgattatatcgacctctacttaatgcactggcccgttcccgctatcgaccattatgtcgaagcatggaaaggcatgatcgaattgcaaaaagagggattaatcaaaagcatcggcgtgtgcaacttccagatccatcacctgcaacgcctgattgatgaaactggcgtgacgcctgtgataaaccagatcgaacttcatccgctgatgcaacaacgccagctacacgcctggaacgcgacacacaaaatccagaccgaatcctggagcccattagcgcaaggagggaaaggcgttttcgatcagaaagtcattcgcgatctggcagataaatacggcaaaaccccggcgcagattgttatccgctggcatctggatagcggcctggtggtgatcccgaaatcggtcacaccttcacgtattgccgaaaactttgatgtctgggatttccgtctcgacaaagacgaactcggcgaaattgcaaaactcgatcagggcaagcgtctcggtcccgatcctgaccagttcggcggctaa

SEQ ID NO: 460185 - DNA, 1164 bp, Shigella boydii
atgaacaactttaatctgcacaccccaacccgcattctgtttggtaaaggcgcaatcgctggtttacgcgaacaaattcctcacgatgctcgcgtattgattacctacggtggcggcagcgtgaaaaaaaccggcgttctcgatcaagttctggatgccctgaaaggcatggacgtgctggaatttggcggtattgagccaaacccggcttatgaaacgctgatgaacgccgtgaaactggttcgcgaacagaaagtgactttcctgctggcggttggcggcggttctgtactggacggcaccaaatttatcgccgcagcggctaactatccggaaaatatcgatccgtggcacattctgcaaacgggcggtaaagagattaaaagcgccatcccgatgggctgtgtgctgacgctgccagcaaccggttcagaatccaacgcaggcgcggtgatctcccgtaaaaccactggcgacaagcaggcgttccattctgcccatgttcagccggtatttgccgtgctcgatccggtttatacctacaccctgccgccgcgtcaggtggctaacggcgtagtggacgcctttgtacacaccgtggaacagtatgttaccaaaccggttgatgccaaaattcaggaccgtttcgcagaaggcattttgctgacgctgatcgaagatggtccgaaagccctgaaagagccagaaaactacgatgtgcgcgccaacgtcatgtgggcggcgacgcaggcgctgaacggtttgattggcgctggcgtaccgcaggactgggcaacgcatatgctgggccacgaactgactgcgatgcacggtctggatcacgcgcaaacactggctatcgtcctgcctgcactgtggaatgaaaaacgcgataccaagcgcgctaagctgctgcaatatgctgaacgcgtctggaacatcactgaaggttccgacgatgagcgtattgacgccgcgattgccgcaacccgcaatttctttgagcaattaggcgtgccgacccacctctccgactacggtctggatggcagctccatcccggctttgctgaaaaaactggaagagcacggcatgacccaactgggcgaaaatcatgacattacgttggatgtcagccgccgtatatacgaagccgcccgctaa

SEQ ID NO: 460186 - DNA, 957 bp, Shigella boydii
atgctacaaaattgcgcacaatcaaattgccgcattattcctaagaaattacgcgatatgaaacgtgaagagatttgccgcttgctggcggataaagttaataaactgaaaaataaagaaaatagtttgtcagaactgttgcccgatgtgcgtttgttgtatggcgagacgcctttcgcacgtacaccggtgatgtacgagcctggcatcataattctcttttccgggcataaaatcggttatatcaatgaacgcgtgtttcgttatgatgccaatgaatacctgctgctgacggtgccgttgccgtttgagtgcgaaacctatgccacgtcagaggtgccgctggcagggttgcgtctcaatgtcgatattttgcagttacaggaactgttgatggacattggcgaagatgagcatttccagccgtcgatggcagccagcgggattaactccgccacgttatcagaagagattttatgcgcggcggagcggttactcgacgtgatggagcgaccactggatgcgcgtattctcggcaaacagatcatccgcgaaattctgtactacgtgctgaccggaccttgcggcggcgcgttactggcgctggtcagtcgccagactcacttcagtctgattagccgcgtgctgaaacggattgagaataaatacaccgaaaacctgagcgtcgagcaactggcggcagaagccaacatgagcgtatcggcgttccaccataattttaagtctgtcaccagcacctcgccgttgcagtatttgaagaattaccgtctgcataaggcgcggatgatgatcatccatgacggcatgaaggccagcgcagcagcgatgcgcgtcggctatgaaagcgcatcgcaatttagccgtgagtttaaacgttacttcggtgtgacgccgggggaagatgcggcaagaatgcgggcgatgcaggggaattaa

SEQ ID NO: 460187 - DNA, 660 bp, Shigella boydii
atggctgttattcaagatatcatcgctgcgctctggcaacacgactttgccgcgctggcggatcctcatattgttagcgttgtttactttgtcatgtttgccacgctgtttttagaaaacggcctgctgcccgcctcatttttgccaggcgacagcttgttgatactggcaggcgcattgattgcccagggggttatggattttctgcctacgattgcgattctgaccgccgcagcaagtctgggctgctggctaagttatattcaggggcgctggttagggaataccaaaacggtgaaaggctggctggcacagcttcctgctaaatatcaccagcgcgccacctgcatgtttgaccgccacggtctgctggcgctgctggctggacgttttcttgcatttgtccgtacgctgctgccaaccatggcgggaatttccggtctgccaaaccgccgcttccagtttttcaactggttaagtggattgctgtgggtcagcgtggtaaccagttttggctatgccttaagtatgattccgttcgttaaacgccatgaagatcaggtaatgacgttcctgatgatcctgccaattgccttgttaaccgctggcttgttaggcatgctgtttgtggtgattaaaaaaaaatactgtaacgcctga

SEQ ID NO: 460188 - DNA, 1188 bp, Shigella boydii
atggcggacaaaaagcttgatactcaactggtgaatgcaggacgcagcaaaaaatacactcttggcgcggtaaatagcgtgattcagcgcgcttcttcgctggtatttgagagtatggaagccaaaaagcacgcgacgcgcaatcgcgccaatggcgagttgttctatggacggcgcggaacgttaacccatttttccttacaacaagcgatgtgtgaactggaaggtggcgcaggctgcgcgctatttccctgcggggcggcagcggttgctaattcgattcttgcttttgtcgaacagggcgatcatgtgttgatgaccaacactgcctatgaaccgagtcaggatttctgtagcaaaatcctcagcaaactgggcgtaacgacatcgtggtttgatccgctgattggtgccgatatcgttaagcatctgcagccaaacactaaaatcgtgtttctggaatcgccaggctccatcaccatggaagtccacgacgttccggcgattgttgccgccgtacgcagtgtggtgccggatgccatcattatgatcgacaacacctgggcagccggtgtgctgtttaaggcgctggattttggcatcgatgtttctattcaagccgccaccaaatatctggttgggcattcagatgcgatgattggcactgccgtgtgcaatgcccgttgctgggagcagctacgggaaaacgcctatctgatgggccagatggtcgatgccgataccgcctatataaccagccgtggcctgcgcacattaggtgtgcgtttgcgtcaacatcatgaaagcagtctgaaagtggctgaatggctggcagaacatccgcaagtagcgcgagttaaccaccctgctctgcctggcagtaaaggacacgaattctggaaacgagactttacaggtagcagcgggctgttttcctttgtgcttaagaaaaaactcagtaatgaagagctggcgaactatctggataacttcagtttattcagcatggcctactcgtggggcgggtatgaatcgttgatcctggcgaatcaaccagaacatatcgccgccattcgcccacaaggcgagatcgattttagcgggaccttgactcgcctgcatattggtctggaagatgtcgacgatctgattgccgatctggacgccggttttgcgcgaattgtataa

SEQ ID NO: 460189 - DNA, 735 bp, Shigella boydii
gtgggtaataatttaatgcagacggacctttccgtctggggtatgtatcagcacgccgatattgtcgttaagtgcgtgatgattgggcttattttggcctccgtagtcacctgggcaatcttcttcagtaagagcgtagagttcttcaatcagaagcgtcgcctaaagcgcgagcagcaactgctggctgaagcgcgttccttaaaccaggccaacgatatcgccgctgattttggtagcaaaagcttaagcctgcatttgttcaatgaagcgcagaatgagctggaactgtcagaaggcagcgacgataacgaaggtattaaagaacgtaccagcttccgtctggagcgtcgggtcgccgcagtgggtcgtcaaatgggccgcggtaacggctatctggcaaccatcggcgcgatttctccgttcgttggtctgtttggtacggtctggggcatcatgaacagctttattggtatcgcgcaaacgcagaccactaacctggcagtcgttgcgccgggtatcgcagaagctctgttagcaacggcaatcggcctcgtggcagcgattcctgcggtcgttatctataacgtatttgcacgccagattggcggctttaaagcgatgctgggtgatgttgcagcgcaggtattgttgctgcaaagccgtgacctggatctggaagccagcgccgctgcgcatccggttcgtgtcgcacaaaaattacgcgcaggataa

SEQ ID NO: 460190 - DNA, 426 bp, Shigella boydii
atggcaatgcatcttaacgaaaacctcgacgataacggcgaaatgcatgatatcaacgtgacgccgtttatcgacgtgatgttggttctgctgattatctttatggtggcggcaccgttagcgacggtagatgtgaaggtgaacttgcctgcttctaccagcacgccgcagccgcgcccggaaaaaccggtttatctgtcggtgaaggcagacaactcgatgtttatcggtaacgatccggtcaccgatgaaacaatgattacggcgttgaatgcgttaaccgaaggcaagaaagacaccaccatcttcttccgagcggataaaaccgtcgattacgagacgttgatgaaggtaatggatacgctgcatcaggcgggttacctgaagataggtctggtcggcgaagaaaccgccaaagcgaagtaa

SEQ ID NO: 460191 - DNA, 885 bp, Shigella boydii
atgtctcatttaaaagacccgactacgcagtattacactggtgaatatcccaaacagaaacaaccgacgccaggcatccaggcgaagatgacaccggtaccggattgcggcgagaaaacctatgttggtagcggtcgcctgaaagatcgtaaagcactggtgacagggggcgattccggaataggtcgcgctgccgccatcgcttacgcgcgtgaaggggctgacgtggcgatcagttatcttcccgtggaagaagaagacgctcaggatgtgaaaaagatcattgaagaatgcggacgcaaagccgttctgctgccaggcgatttaagcgatgagaaattcgcccgttcgctggttcacgaagcgcacaaggcgttaggtgggctggatattatggcgctggtcgccgggaaacaggttgccattccggatattgcagacctcaccagcgaacagtttcaaaagacctttgccattaacgttttcgcgctgttctggctaacccaggaagcgatccccctgctaccgaaaggtgcaagtatcatcaccacttcgtcaatccaggcataccagccaagtccgcatttactggactatgcggctacgaaggcggcgattctgaactacagccgtggcctggcaaaacaggtcgcggagaaaggtattcgggtgaatattgtcgcgccaggccctatctggacggcactgcaaatttccggcggacaaacgcaggataagatcccgcagtttggtcagcaaacgccgatgaagcgtgcggggcaaccggcggaactggcccctgtatatgtttatctggcaagtcaggagtcgagctacgtcaccgcagaagtgcacggtgtgtgcggcggcgagcatttaggttaa

SEQ ID NO: 460192 - DNA, 495 bp, Shigella boydii
atggaacgttttcttgaaaatgcaatgtatgcttctcgctggctgcttgcccccgtgtactttggcctttcgctggcgttagttgccctggcgctgaagttcttccaggagattattcacgtactgccgaatatcttctcgatggcggaatcagatttgatcctcgtgttgctgtcgctggtggatatgacgctggttggcggtttgctggtgatggtgatgttttccggttatgagaatttcgtctcgcagctggatatctccgagaacaaagagaagctgaactggctggggaaaatggacgcaacgtcgctgaaaaacaaagtagcagcgtcgattgtggcaatttcttccattcacttactgcgcgtctttatggatgcgaaaaatgtcccggataacaaactgatgtggtacgtcattatccatctgacgtttgtgctctctgcatttgtgatgggctatcttgaccgactgactcgtcataatcactga

SEQ ID NO: 460193 - DNA, 1041 bp, Shigella boydii
atggtctggttagcgaatcccgaacgttacgggcagatgcagtaccgctattgcggaaaaagtggtttacgcctgcccgcgttatcgctcggtttatggcacaatttcggtcacgttaacgcgctggaatcacagcgtgcaatcctgcgtaaagcgtttgatttaggcattacgcactttgatttagccaacaattacgggccgcctccaggaagcgcagaagagaactttggtcgcctgctgcgggaggattttgccgcttatcgcgatgaactgattatctctaccaaggctggctacgatatgtggcccggcccttacggctctggcggttcacgtaaatacctgctcgccagcctcgaccaaagcctgaagcgtatggggcttgagtatgtcgatatcttttactctcatcgcgtcgatgaaaatacgccgatggaagaaaccgcctctgcgctggctcatgcggtacaaagcggtaaggcgctgtatgccgggatctcctcttactcgccagagcggacgcaaaaaatggtcgagttgctgcacgagtggaaaattccgcttttaattcatcaaccttcgtacaatttactgaaccgctgggtggataaaagcggcctgctggataccctgcaaaataacggcgtgggctgtattgcctttactcctctggctcagggattgctgaccggaaaatatctcaacggcattccgcaagattcacggatgcatcgtgaagggaataaagttcgtggtctgacgccgaaaatgcttaccgaagccaacctcaacagcctgcgcttattgaatgaaatggcacagcagcgtggacaatcaatggcgcaaatggcgttaagctggttgctgaaaaatgatcgcgtgacgtcggtattgattggtgtcagccgcgcggagcaactagaggagaacgtgcaggcgctgaataatctgacatttagcaccgaggagctggcgcagattgatcagcatatcgccgatggcgagctgaatctgtggcaggcgtcttccgataaatga

SEQ ID NO: 460194 - DNA, 438 bp, Shigella boydii
atgccgcgtttaaccgccaaagatttcccacaagagttgttggattactacgactattacgctcacgggaaaatttcgaaacgtgagttcctcaaccttgcggcgaagtatgcggtgggcgggatgacggcattagcgttgtttgatttgctcaagccaaattatgcgctgacgactcaggtagagtttaccgacccggagattgttgctgagtacatcacgtatccttcgccaaatggtcacggcgaggtacggggttatctggtgaaacccgcaaaaatgagcggcaaaacgccagccgtggtggtggtgcatgagaatcgtggactgaatccgtatatcgaagatgtggcacggcgagtgacgaaggcggggtatatcgccctggcacctgacggcttaagttccgttggaggggtaatgctgccaacttactga

SEQ ID NO: 460195 - DNA, 861 bp, Shigella boydii
atggaagatttgaatgttgtcgatagcataaacggcgcgggaagctggctggtagctaaccaggcgctgctgctaagttatgcagtaaacatcgtggcggcactcgcgatcatcatcgttggtttgattatcgcgcggatgatttccaacgcggtgaatcgcctgatgatctcccgtaaaatcgatgccactgttgctgattttctttctgcattagtccgttacggtattatcgcctttacgctaatcgctgccctgggacgcgtgggtgtacaaacagcgtcagtcattgctgtactcggtgccgcaggcttagctgttggtctggctttgcaggggtcactttctaacctggccgctggcgtgttacttgtcatgttccgaccgttccgtgccggagaatatgttgacctcggcggcgtagccggtactgtgctgagtgtgcagattttctccaccaccatgcgtactgcagacggtaaaattatcgttattccgaacggtaaaattattgccggaaatattattaacttctcccgcgagccagttcgccgtaacgaatttattattggcgtggcgtatgattccgatatcgatcaggttaagcagatcctgaccaatattatccagtctgaagatcgcattttgaaagatcgcgaaatgactgtgcgcctgaacgaacttggtgcatcgtcgattaatttcgtggtccgcgtctggagcaacagcggcgatctgcaaaacgtgtactgggatgtgctggagcgtattaaacgtgaatttgatgccgccggtatcagcttcccgtacccgcaaatggatgtgaactttaagcgggtgaaagaagacaaagctgcgtaa

SEQ ID NO: 460196 - DNA, 1080 bp, Shigella boydii
atgtctaagatttttgatttcgtaaaacctggcgtaatcactggtgatgacgtacagaaagttttccaggtagcaaaagaaaacaacttcgcactgccagcagtaaactgcgtcggtactgactccatcaacgccgtactggaaactgctgctaaagttaaagcgccggttatcgttcagttctccaacggtggtgcttcctttatcgctggtaaaggcgtgaaatctgacgttccgcagggtgctgctatcctgggcgcgatctctggtgcgcatcacgttcaccagatggctgaacattatggtgttccggttatcctgcacactgaccactgcgcgaagaaactgctgccgtggatcgacggtctgctggacgcgggtgaaaaacacttcgcagctaccggtaagccgctgttctcttctcacatgatcgacctgtctgaagaatctctgcaagagaacatcgaaatctgctctaaatacctggagcgtatgtccaaaatcggcatgactctggaaatcgaactgggttgcaccggtggtgaagaagacggcgtggacaacagccacatggacgcttctgcactgtacacccagccggaagacgttgattacgcatacaccgagctgagcaaaatcagcccgcgtttcaccatcgctgcgtccttcggtaacgtacacggtgtttacaagccgggtaacgtggttctgactccgaccatcctgcgtgattctcaggaatatgtttctaagaaacacaacctgccgcacaacagcctgagcttcgtattccacggtggttccggttctactgctcaggaaatcaaagactccgtaagctacggcgtagtgaaaatgaacatcgataccgatacccaatgggcaacctgggaaggcgttctgaactactacaaagcgaacgaagcttatctgcagggtcagctgggtaacccgaaaggcgaagatcagccgaacaagaaatactacgatccgcgcgtatggctgcgtgccggtcagacttcgatgatcgctcgtctggaaaaagcattccaggaactgaacgcgatcgacgttctgtaa

SEQ ID NO: 460197 - DNA, 1164 bp, Shigella boydii
atgtctgtaattaagatgaccgatctggatcttgctgggaaacgtgtatttatccgtgcggatctgaacgtaccagtaaaagacgggaaagtaaccagcgacgcgcgtatccgtgcttctctgccgaccatcgaactggccctgaaacaaggcgcaaaagtgatggtaacttcccacctgggtcgtcctaccgaaggcgagtacaacgaagaattctctctgctgccggttgttaactacctgaaagacaaactgtctaacccggttcgtctggttaaagattacctcgacggcgttgacgttgctgaaggtgaactggttgttctggaaaacgttcgcttcaacaaaggcgagaagaaagacgacgaaaccctgtccaaaaaatacgctgcactgtgtgacgtgttcgtaatggacgcattcggtactgctcaccgcgcgcaggcttctactcacggtatcggtaaattcgctgacgttgcgtgcgcaggcccgctgctggcagctgaactggacgcgctgggtaaagcactgaaagaacctgctcgcccgatggtggctatcgttggtggttctaaagtatctaccaaactgaccgttttggactccctgtctaaaatcgctgaccagctgattgttggtggtggtatcgctaacacctttatcgcggcacaaggccacgatgtgggtaaatccctgtacgaagctgacctggttgacgaagctaaacgtctgctgaccacctgcaacatcccggttccgtctgatgttcgcgtatcaaccgagttctctgaaactgcaccggctaccctgaaatctgttaacgatgtgaaagctgacgagcagatcctggatatcggtgatgcttccgctcaggaactggctgaaatcctgaagaatgcgaaaaccattctgtggaacggtccggttggcgtgttcgaattcccgaacttccgcaaaggtactgaaatcgtggctaacgctatcgcagacagcgaagcgttctccatcgctggcggcggcgacactctggcagcaatcgacctgttcggcattgctgacaaaatctcctacatctccactggcggcggcgcattcctcgaattcgtggaaggtaaagtactgcctgcagtagcgatgctcgaagagcgcgctaagaagtaa

SEQ ID NO: 460198 - DNA, 1020 bp, Shigella boydii
atgaccgtacgcgtagcgataaatggcttcggtcgcatcgggcgtaatgtggttcgtgctttgtatgaatccggacgccgggcggaaattaccgtggtggcaatcaacgaactggcggatgctgcgggcatggcgcatttgttgaaatatgacaccagccatggccgttttgcatgggaagtacgacaggaacgcgatcaactttttgttggtgatgacgccatccgcgtattgcatgaacgttcactgcaatcgctcccctggcgtgaacttggcgttgatgtagtcctcgactgcaccggcgtatatggctcccgcgagcatggcgaagcgcatattgccgccggggccaaaaaagtgctcttttcacatcctggcagtaacgatctcgacgcgaccgttgtttacggcgtcaatcaggatcaacttcgtgcggaacaccgcatcgtttctaacgcttcctgtaccacgaattgcataattcccgtcatcaaattgttagatgatgcgtacggtattgagtccggcactgtgaccacaattcactccgccatgcacgatcaacaggttattgatgcataccatcctgacctgcgtcgcacccgggcagccagccagtcgatcattccggtcgatactaaactggccgccggtatcacacgattttttccgcaatttaacgatcgctttgaagcgattgcggtacgtgtgccaaccataaatgtgacggcaatcgatttaagcgtgacggtgaagaaacctgtaaaagccaatgaagtcaacctgttgctgcaaaaagcagcacaaggtgcatttcatggtatagttgactatacggaattgccgttggtctctgtagattttaaccacgatccgcacagtgccattgtcgatggcacccaaacccgggtcagtggcgcacacctgatcaaaacgttggtctggtgcgataacgaatggggctttgctaaccgaatgctcgacacgacgttagctatggctactgttgctttcaggtaa

SEQ ID NO: 460199 - DNA, 432 bp, Shigella boydii
atgatgacattgccctacccatattcttcctccgcacgcttttacgcactgcgcctcctccccgggcaggaagttttttcccagctacacgcttttgcacagcagcatcaacttcatgccgcctggattgcaggctgtaccggtagcctgactgacgtcgccttgcgctatgccaggcaagaaggcaccacgctcctgaacggtacattcgaagtgatctcactaaacggcacgctggaacagagtggtgagcatcttcatctctgcgtttccgatccacacggcacgatgcttggcggtcatatgatgcccggctgtaccgtgcggaccacgcttgaactggtgatcggtagccttgaggaactggcgtttagccgccaaccttgcgcgctttctggttacgacgagttgcatatttcccccgttaaataa

SEQ ID NO: 460200 - DNA, 579 bp, Shigella boydii
atggcgcgtagccacttttccagtcaggcactggtgttgatcgttatatctatcgccatcaatatgatcggcgggcaactggccagcatggtcaaattacctatatttctcgactccatcggcacacttattagcgcggtactgcttggtccggtgatcggaatgctgaccggcttactgaccaatttactctggggattgctgaccgacccgatcgccgccgcatttgcacccgtcgcgatggtcatcggcctggtcgccggttggctggcgcgagcgggttggtttcgcaccctgccaaaagtcgttgtcagcggcgtgattattacgcttgcggtaacggtcgtcgctgtaccgctgcgtactgcgctgttcggcggtgtcaccggtagcggagccgatttgttcgttgcctggatgcactcgatggggcaaaacctggtggagtcggtggcgattacggtgataggcgcgaacctggtcgataaaattcttacagcggtgattgtctggcttttactgcgccagctgccgattcgcaccacgcgccattttccggcaatggctgccgtgcgctaa

SEQ ID NO: 460201 - DNA, 708 bp, Shigella boydii
atgcatccatttacctcattaacactgtgggcattggcggcctgcaccacgcttatcctgcccgcgcagaccattttgccgatctatagcgcggcgacctttttctgccttattgcgctaaaggccacgcggcggcgggcaaaatatgtcgtctggctgatgttctcgctgggagccgggctgtggctggtacacggtggctggctaccagaatggctaagcggcacgccacgctcgccagaacggtggtcgcatgctattacgctctggttgcggattctggcgattgtttcaacctcacagttgtggatgcagtacgtccccgtgcaatgttttattcgcgctctgtttgcttctcgcctgccgccaggcgtcgcttatctgtttgccgggccgttattggtcgttgagcagttaaaacggcaattagcgattattcatgaagcgcagcgtgcccgcggcgtgccgctggatgagggctggtatcagcgtttacgtgcgatgcccgcgttaattattccgctaacacacaatgcgcttaacgatctggctgtccgtggtgcggcgctggatatgcgggcatttcggatccacaaccgacgaacaacgttgtgggcaccagccgatagcaccctacaacgcgtagcgcgttacaccatgatcttgctgatgctgacagaattcggagcgtggatatggttacgttag

SEQ ID NO: 460202 - DNA, 678 bp, Shigella boydii
atggttacgttagaacagttccgttattgcccgacacactcaacgcatcctccgttctgttatgactttcactatgtcaaaccggggatggtcgccatctttggtgacaacggcagtggcaaaagtacgctggcacagctgatggcgggctggtatccggactttctgccaggagagataacaggcacggggacgctcctcggtacgcccattgggcatctcccgcttaatgaacaatccgccaccatccagctcgtccagcaatcgccctatttgcagctctccggctgtacctttagcgtggaagaagaagttgcctttgggccagaaaatctgtgtcttgctgaagcagagattatggcgcggattgatgccgccctgactctgaccgagtgccagccgttgcgccatcgtcacccggcaacactctccggtggagagacacagcgcgtggtcatcgcctgcgccatcgcgatgcagccaaagctcttaattcttgatgaagcctttagccgcctgacgccgcaggccagcgaaatgctgttgcagcgcttacaacactgggcgtttgaacgtggttcgctgattattctttttgaacgtcatcgcacacctttcctgaactactgccagcaagcgtggcaattgcaaaacggagcgctccagccactatgttaa

SEQ ID NO: 460203 - DNA, 678 bp, Shigella boydii
atgttaacgttaaatcagatatcttatcgctggcctggcgcggcaacggattgtctttgcgacatttctctgcaactcaaacaaggtgaatggttggcgctgaccggtgacaatggcgcagggaaatcgacgctgttacgagtaatggcaggtcttcttacgcccacagccggtacggttatgctgcaacaacaggcgatgaaaaacctgaaaaaccgccagcgcgcggcaaaggttggcgtactgtttcaggaagcggaaaaccaactttttcacagcaccgtcgctgacgagatcgcatttggtttgaaactgcaaaaatgcccggcggatgaaatcactcaacgtacccatgctgccctgcaatgttgtcagttagcagacactgccaactcgcacccgttggatctgcatagtgcgcagcgacggatggtcgccatcgcctgcctggaagcactctctccgccactattactgctggacgagccgagtcgggattttgacgaaaattggttgagcgtgtttgaaagctggctggagaagtgccgccagcgaggcacgagcgtggtagcaatcagtcatgacgccgcatttacccggcgtcatttctctcgtgtggtgcgactggaagatggtgtaatcaggaacgttaatccaccagacgatattcacccgtag

SEQ ID NO: 460204 - DNA, 714 bp, Shigella boydii
gtgaaaattgaattaacggtgaatgggctgaagatacaggcacagtaccagaacgaagagattgaaaatgtacataaaccgttgctgcgtatgctggcggccttacagacggtaaatccgcagcggcgtacggtggtttttctttgcgctccgccggggacgggtaaatctaccctaaccaccttctgggaatatctcgcgcaacaagccccggagctgcccgctattcagacgctcccgatggatggttttcaccattacaatagctggctggacgcgcatcaattgcgccccttcaaaggcgcaccagagacatttgacgttgcgaaactggcggaaaatctgcgccaggtggtggaaggggattgtacgtggccgcagtacgatcgacaaaagcatgatcctgttgaagatgcgttgcacgttaccgcaccactcgtcatcgtcgaaggaaactggttgttgctggacgacgagaagtggtgccagcttgcgcaattttgtgatttctcgatctttatcaacgcgccagctactgcgttgcgggagcgtctggtggggcgcaagctggcgggaggggtatcgctggcagatgcagaagccttttatgaccgtaccgacgggccgaatgttcgccgggtgctggaagagagtctgcctgcaaatttgaccttaatgatgaccgctacgggtgaatatcgtctggtggattaa

SEQ ID NO: 460205 - DNA, 486 bp, Shigella boydii
gtgcttgagcaactggatgcacaggacaatttattttcatttatgaaaactgcgcattctattttgctccaggggatacgccagtttctgccgtcgctgtttgtcgataacgatgaagagatcgtggaatatgcagtgaagccgttactcgcccaaagcggcccgcttgacgatattgatgttgcgctgcgtttgatttatgcgctggggaaaatggataaatggctgtacgccgatatcacgcatttttcccagttctggcattacctgaacgaacaggatgaaacgcccggatttgccgatgacatgacctgggattttatcagcaacgtcaatagcataacccgcaatgcgatgctctatgacgcgttgaaagcgatgaagttcgccgatttcgccgtctggtcagaggcgcgttttagcgggatggtcaaaacggcgctgacgctggcagtaacgacaatcttaaaggaattaacgccgtga

SEQ ID NO: 460206 - DNA, 966 bp, Shigella boydii
atgatgtccctggcgtggccattatttcgcgttacggaacaggcagcgttggctgcctggccgcaaaccggatgtggcgacaaaaataaaattgatggcctggcggtcaccgcgatgcgccaggcattaaacgacgtcgcttttcgtggacgagtggttatcggcgaaggagaaattgaccatgcgccgatgctgtggattggcgaagaggtgggcaaaggcgatgggccagaagtcgatatcgcggttgatcctattgaaggcacgcggatggtggcgatggggcagagcaatgcgctggcggtcatggctttcgcccctcgggatagcctgttacatgcgcccgatatgtatatgaaaaagctggttgttaatcgactggctgccggggtgattgatctgtctttgcctctggcggacaacttgcgtaacgtggcgcgggcgttaggtaaaccgctggacaagctgcgcatggttacgctggataaaccgcgcctgagtgccgcgattgaggaagcaacacagctgggcgtgaaggtttttgccctgccggatggcgatgtcgccgccagcgtgctgacctgctggcaggataatccttacgatgtgatgtacaccatcggcggtgcgccagaaggcgtgatttctgcctgtgccgttaaagcattaggcggggatatgcaggccgagctgattgacttttgtcaggctaaaggggattacacggaaaatcggcagattgcagagcaggagagcaagcgttgcaaggcaatgggcgttgacgttaaccgtgtgtactcgctcgatgaactggtgagggggaacgatatcctctttagcgctacgggcgtgacgggcggcgagttggtgaacggtatccaacagacggcgaatggggtgcggacgcagacattactgatcggcggcgcggaccaaacgtgtaatataatagactccctgcattga

SEQ ID NO: 460207 - DNA, 924 bp, Shigella boydii
atgattattcccgaaatcgccattaatttgggctgcgtattaccgtatcacggctcttattttgctgcggcgtcgctggtagagcctatgtgctgcattattggtgcttatcatgccaattatcacaccacgcaatatgtttatgagcatcgcatgggcgtcaaacctggcggcaatattgcactgctggcgtgtgcgggtccgatgggcattggcgctatcgattacgccattaacggtggcatacaaccgtcacgggtggtggtggtcgatatcgacgacaaacgcctggcgcaggtgcagaagctgctgccggtggatctggcggccagtaaaggcattgagctggtgtatgtgaataccaaagggatgagcgatccggtccagacgctgcgggcgctgacaggagatgtcgggttcgatgacatttttgtttatgcggcggtgccagctgtcgttgagatggctgacgaattactggcggaagatggctgtctgaacttctttgccgggccgacggataaaaacttcaaagtgccgtttaatttctacaacgtccattacaacagcacgcacgtagtcggtacatccggcggttcaacggacgacatgaaagaggcgattgcgttaagcgccacggggcagttgcaaccgtcctttatggtcacgcatatcggtgggctggatgcggtgccagataccgtgctcaatctgccggatatccctggcggtaaaaaactcatttataacggcgtgaccatgccgctcactgccattgccgattttgccgaaaaaggcaaaaccgatccgctatttaaagagttggcgcggctggttgaggaaacgcacggcatctggaatgaacaggccgagaaatatctgctggcacaatttggcattgatatcggggaggccgcgcaatga

SEQ ID NO: 460208 - DNA, 294 bp, Shigella boydii
gtggcgcacgtcttcggtgaacgcactctgaccacactggagcgtcttctgagcctgctgtcggcctttgaggtcgtggtatggatgacggatggctggccgctgtatgaatcacgcctgaagggaaagctgcacgttatcagcaagcgttacactcagcgcattgagcgacataatctgaatctgagacaacatctggcaaggctgggacggaagtcactgtcgttctcaaaatcggtggagctgcatgacaaggtcatcgggcattatctgaacataaaacactatcagtaa

SEQ ID NO: 460209 - DNA, 174 bp, Shigella boydii; identical to SEQ ID NO: 935

SEQ ID NO: 460210 - DNA, 1074 bp, Shigella boydii
atggcagagaaaaaaagaacccgctggcagcggcggccaggcacgacgggcggcaaattaccgtggaatgactggcgcaatgccacgacctggcgtaaagcgacgcaattattactgttggcaatgaatatttatattgccatcacgttctggtattgggtgcgctattacgaaacggcaagtagcacgacatttgtcgccagaccgggaggtatcgaaggctggctaccgattgccggtctgatgaatctgaaatatagccttacaacaggtcagttaccgtccgtccacgccgccgcgatgctgttattggtcgcttttatcgtcatcagtctattactcaaaaaggccttttgctcatggttatgcccggttggtacgctttctgaattaatcggcgatctcggtaacaaactgtttggtcggcaatgtgtccttccccgctggctggatattcctctgcgcggcgtgaagtatttgctgttgagtttttttctctatatcgcgttattgatgcccgctcaggcgattcactattttatgttgtcgccctacagcgtggtgatggacgtaaaaatgctcgatttctttcgtcatatggggaccgcgacattaatcagcgtgaccgttttgctgattgccagcctgtttattcgccatgcctggtgtcgttatctttgcccatatggcgcgctgatgggcgtggtttcgctattatcgccgtttaagattcgtcgcaatgccgaaagttgtatcggctgtggcaaatgcgcaaaaaattgcccatcacggatcccggtagataaattaattcaggtacgaacagtggaatgtaccggctgtatgacttgcgtagagtcatgtccggtagcctcaacattgaccttttcactgcaaaaacctgcggcaaataaaaaagcttttgcgttgtctggctggttaatgacgctactggttctggggattatgttcgcggtgattggttacgcaatgtatgcgggagtatggcaaagcccggtgccggaggaattgtaccgacgcttaattccacaagcgccaatgattggtcactaa

SEQ ID NO: 460211 - DNA, 2700 bp, Shigella boydii
atggcgctgttaaccctaaccagtaccctggtgggatggtacaacctgcgctttatcagccaggtggaaaaagacaacactcaggcattgattcctaccatgaatatggcgcgccagttgagcgaagccagcgcctgggaacttttcgccgcgcagaacctgaccagtgccgataacgaaaagatgtggcaggcgcaggggcgaatgctcaccgcacaaagcctgaagattaatgcgttgctgcaagcgttacgggaacaaggttttgataccaccgctattgaacaacaggagcaggagatctcccgttcgttacgtcagcaaggggaactggtggggcggcgtctgcaactacgccagcaacaacagcaactcagtcagcagatagtcgctgccgccgatgagatcgcacgcctggcgcaaggtcaggcgaataatgcgacaacttccgctggagcgacccaggccgggatttacgatttgatcgaacaagatcagcgtcaggctgctgaaagtgcactcgatcggctgattgatatcgatcttgagtatgttaaccagatgaatgaactgcgccttagcgctctgcgggtgcagcaaatggtgatgaatctggggctggagcagatccagaaaaatgcaccaacgctggaaaagcagctcaataatgcggtgaaaattctgcaacgtcggcaaatacgcattgaagatccgggtgttcgtgcgcaggtcgcaacaacgttaactaccgttagccaatatagcgatttgctggcgctgtatcagcaggacagtgaaatcagcaatcacctacaaactctcgcacaaaataacatcgcccagttcgcgcagtttagtagcgaagtcagtcagctggtcgacaccattgagctgcgtaatcagcacggactggcgcatctggaaaaagccagtgcacgcgggcaatacagcctgttattgctggggatggtttcactttgcgcactgattctgatcctttggcgcgtggtttatcgctcagtcacgcgtccacttgccgaacaaacgcaggcgctgcaacggctgctggacggtgatattgactcccctttcccggaaaccgctggcgtacgggagctggataccatcgggcggctgatggatgcgtttcgcagcactgttcatgcactgaatcgccaccgtgaacagctggcggcgcaggtcaaagcgcgtacagctgaattgcaggaactggtgatagaacaccgacaggcacgggcggaagcagaaaaagccagccaggcaaaatcggcctttctggcggcgatgagccatgagatccgcacaccgctgtacggtattctcggcactgctcaactgctggcagataaccccgcacttaacgcccagcgtgatgatttgcgggcgattaccgactctggcgaatcgttgctgaccatcctcaacgatattctcgattattcggctatcgaagcaggtggcaagaatgtttcggtcagcgatgagccctttgaaccgcgcccgctgctggaaagtaccctgcaattaatgagcggacgggtgaaaggtcgcccgattcgcctggcaacagcaattgccgacgatgtaccgaccgcgttaatgggcgatccgcgacgtattcgtcaggttataaccaacctgttgagcaacgccctgcgttttactgacgaagggcagatcgttttacgtagccgcactgatggcgagcaatggctggtcgaagtggaagacagcggctgcggtattgatcccgcgaaactggcagaaatcttccagccatttgtgcaggtaagcggcaaacgcggcggcaccgggctgggactgactatcagtagccgtctggcccaggcgatgggcggcgaactgagcgccaccagcacgccggaggttggaagctgtttttgtttacgcttgccgttacgtgttgccacggcacccgtgccaaaaacagtcaatcaggcggtgcgtcttgacggtttacgtttgctgttaattgaagataacccgctaacccagcgaattaccgttgagatgctgaacaccagtggtgcgcagattgttgctgttggcaatgccgcgcaggctttagagacactgcaaaatagcgaaccgtttgctgccgcactggtggattttgatctgccggatgtcgacggcattacgcttgcccgacaactggcacagcaatatccgtcgctggttttgattggctttagcgcccatgtcattgacgaaacgctgcgccagcgtaccagttcattattccgcgggattatccctaaaccggtgccgcgtgaagtgctcggtcagttactggcgcactatctccaactgcaagtcaataacgatcaatcgctggatgtatcgcaactcaatgaagatgctcagttaatggggacggagaagatccacgaatggctggtattatttacacaacatgccctgccgcttctcgatgaaatcgacattgcccgcgccagtcaggatagcgagaaaataaagcgtgccgcgcatcagctaaaaagcagttgctcgagtttgggaatgcgtatcgccagccagctatgcgcacaactggagcagcagccattatctgccccccttccacacgaagaaattacacgcagtgttgccgctctggaagcatggttgcataagaaagacctgaacgcgatttga

SEQ ID NO: 460212 - DNA, 441 bp, Shigella boydii
atgcgcgtactgctatttttacttctttcccttttcatgttatcggcattttcgggtgataacctgttgcgctggcatgatgcgcagcattacacggtgcaagcctctacgccgcttaaagccaaacgcgcatggaaactgtgcgcgctttatcccagcctgaaagattcatactggttatcgttgaactatggtatgcaggaggcaggcggctacagccagttggctacccagcaagcacaaatcgaccagtgtaaacagtggggcgcagaggccattttgctcggtagtagcactacgtcatttcccgacctgcaaaagcaggtagcaaatctgccggtgatcgaactggtaaatgctcttgatgatcccctggtgaaaagccgcgttggtgtaccctggtttcagatgggctatcaacctgggcgatatttggtgtaa

SEQ ID NO: 460213 - DNA, 477 bp, Shigella boydii
atgcccggacccgataatgccgggggcagtaaagagatggtcgagggttttcgcgcagccattgccggaagcccggtgcgtattgttgatattgcgcttggtgataacgatattgaaatccagcgtaacctgttgcaggagatgctggaacgccacccagaaatcgacgtcgttgccggaacggccattgcggcagaggcggcaatgggtgaagggcgtaacctgaaaacgccgcttaccgtggtgtcgttttatctttcacatcaggtgtatcgcgggctgaagcggggaagagtgattatggctgccagcgatcaaatggtctggcaggggcaatcggtgtctgataatgtcagcccaccgattttagttctgacgccgaaaaatgccgaccgtgaacatattcgccgctcgctgtcaccagggggatttcgtccggtctatttttatcagcacacatcagcggctaagaaataa

SEQ ID NO: 460214 - DNA, 693 bp, Shigella boydii
atgccacatcacattgttattgttgaagatgagccggttacccaggcgcgattacaatcttacttcactcaggaggggtataccgtttccgttacagcgagcggtgccgggctgcgggaaattatgcagaatcagccggtagatttaattctgctggatatcaacttacccgatgaaaatggcctgatgttaacccgcgccctgcgagaacgctcaacggtggggattattctggttaccggacgcagcgatcggattgaccgtattgttgggctggaaatgggcgcagacgattacgtcaccaaaccgctggaactgcgcgaactggtagtacgggtgaaaaatctgctctggcgaatcgacctcgcgcgacaagctcaaccgcacactcaggacaactgctatcgctttgccggttattgcctgaatgtgtcgcgccatacgctggagcgggatggcgagccgattaaactgacccgcgcagagtatgaaatgttggtggcatttgtgacgaatccgggcgaaattctcagccgtgaacgtctgctacgtatgctttctgcgcgtcgggtggaaaaccctgacctgcgcaccgtcgatgtgttaattcgtcgtttacgtcataaactcagcgcggatttactggtgacgcaacatggtgaaggttatttcttagccgctgatgtgtgctga

SEQ ID NO: 460215 - DNA, 282 bp, Shigella boydii
atgcggaaactctggaacgcgctacgccgacccagtgctcgttggtcggtactggcgctggtcgcaattgggattgtgattggcattgcgctgattgtattgccacacgttgggatcaaagtcaccagcacaaccgaattttgtgtcagttgccacagtatgcaaccggtgtatgaagaatataaacagtcggtgcatttccagaacgcctccggcgtgcgagctgaatgccatgccggatattccaggcatggtgaagcgcaaactggaagcgagcaatga

SEQ ID NO: 460216 - DNA, 927 bp, Shigella boydii
atgccggatattccaggcatggtgaagcgcaaactggaagcgagcaatgatatctaccagacctttattgctcactccattgatacacctgaaaaattcgaagccaaacgcgcggaacttgccgagcgtgaatgggcgcgaatgaaagaaaacaactcggcaacctgccgctcctgccataactacgatgcgatggatcatgcgaagcagcatcctgaagcggcacgtcagatgaaggtggcagcgaaagataatcaatcctgcatcgactgtcataaaggtattgcccaccagttaccggatatgagtagcggcttccgtaagcagttcgatgagctgcgcgccagtgctaatgacagtggtgacacgctgtactctattgatattaagccaatttatgcggcgaaaggcgataaagaagcctctggttctctgctgcctgcttcggaagtgaaagtccttaaacgtgacggcgactggctgcaaattgaaattaccggctggacggaaagcgccggacgtcagcgtgtactcacccaattcccaggtaaacgcatctttgttgcctcgattcgtggtgatgtgcagcagcaggtaaaaacgctggagaaaaccaccgttgccgacaccaataccgagtggagcaagttgcaggccactgcgtggatgaagaaaggtgatatggtgaacgatatcaaaccgatctgggcttatgcggattcgttgtacaacggcacctgtaaccagtgccacggcgcaccggaaatctctcactttgatgctaacggctggattggcacgctcaacggcatgattggctttaccagtctcgataaacgtgaagaacgcaccttgttgaaatatctgcaaatgaatgcgtctgacatcgcaggtaaggctcacggcgataagaaggaagaaaaataa

SEQ ID NO: 460217 - DNA, 2565 bp, Shigella boydii
atgaacaataacgatctctttcaggcatcacgtcggcgttttctggcacaactcggcggcttaacagtcgccgggatgctggggccgtcattgttaacgccgcgcagtgcgactgcggcgcaagcggcggctgtcatctcgaaagagggcattcttaccgggtcgcactggggggctatccgcgcgacggtgaaggatggtcgctttgtggcggcaaaaccgttcgaactggataaatatccgtcgaaaatgattgccggattgccggattgccggattgccggattgccggatcacgtacacaacgcggcgcgtattcgttatccgatggtacgcgtggactggctgcgtaagcgccatctcagcgatacctcccagcgcggtgataaccgttttgtgcgcgtgagctgggatgaagccctcgacatgttctatgaagaactggaacgcgtgcagaaaactcacgggccgagtgccttgctgaccgccagtggttggcaatcgacggggatgttccataacgcttcggggatgctggcgaaagctattgccttgcatggtaatagcgttggtacgggcggagattactctaccggtgctgcgcaggtgatcctgccgcgcgtagtcggttcgatggaagtgtatgaacagcaaacctcctggccgctggtattgcagaacagcaaaaccattatgctgtggggctccgatttgctgaaaaaccagcaagcgaactggtggtgcccggatcacgatgtttatgaatattacgagcaactaaaagcgaaagtcgccgccggtgaaattgaggtcatcagcatcgatccggttgtcacatccacccatgagtatctggggcgcgagcatgtgaagcacattgcggttaacccgcaaactgacgtgccgctgcaactggcgctggcgtatacgctgtacagtgaaaacctgtacgacaaaaacttcctcgctaactactgtgtaggttttgagcagttcctgccgtatctgctgggtgagaaagacggtcagccgaaagatgccgcatgggctgaaaaactgaccggcattgatgccgaaaccattcgtgggctggcgcggcagatggcggcgaacagaacgcaaattattgctggctggtgcgtgcagcgtatgcagcacggtgaacagtgggcgtggatgattgtggttctggcggcgatgctggggcaaattggcctgccaggtggtggttttggttttggctggcactacaacggcgcaggcacgccggggcgtaaaggcgttattctgagtggtttctccggctctacgtcgattccgcctgttcacgacaacagtgactacaaaggctacagcagcaccattccgattgcccgttttatcgatgcgatcctcgaaccggggaaagtgatcaactggaacggtaaatcggtaaaactgccgccactgaaaatgtgtatttttgccggaactaacccattccatcgccatcagcagatcaaccgcattattgaaggctggcgcaagctggaaacggttatcgccatagataaccagtggacctcaacctgccgctttgccgatattgtactgcctgcgaccacgcagtttgagcgtaacgatctcgaccagtacggcaaccactccaaccgtggcattatcgccatgaaacaggtggtgccgccgcagttcgaggcgcgcaacgactttgatattttccgcgagctgtgccgtcgctttaatcgcgaagaagcctttaccgaagggctggacgaaatgggctggctgaaacgcatctggcaggaaggtgtacaacaaggcaaaggacgcggcgttcatctgccagcgtttgatgacttctggaataacaaagagtacgtcgagtttgaccatccgcagatgtttgttcgccaccaggcattccgcgaagatccggatctcgaaccgctgggcacgccgagtggcctgattgagatctactcgaaaaccatcgccgatatgaactacgacgattgtcaggggcatccgatgtggtttgagaaaatcgaacgctcccacggtgggcccggctcgcagaagtatccgttgcatctgcaatctgtgcatccggatttccgacttcactcgcagttatgtgagtcggaaactctgcgtcagcaatatacggtagcgggtaaagagccagtattcattaacccgcaggatgccagcgcgcgcggtattcgtaacggtgatgtggtacgcgtctttaacgctcgcggtcaggtgttggcaggggcagtagtttctgaccgctatgcacccggcgtggcacgaattcacgaaggggcatggtacgatccagataaaggcggcgagcctggtgcgctgtgcaaatacggtaaccccaacgtgctgaccatcgacatcggtacttcgcagctggcgcaggcgaccagtgcgcacactacgctggtggaaattgagaagtacaatggagcagtggagcaggtgacggcgtttaacggccctgtggagatggtggcgcagtgcgaatatgttcccgcgtcgcaggtgaaatcatga

SEQ ID NO: 460218 - DNA, 600 bp, Shigella boydii
atgaccacgctgacagcacaacagattgcctgtgtttacgcctggctggcgcagttgttctcccgtgaactggacgatgaacaactgacgcaaatcgccagtgcgcagatggctgaatggttttcgttgctgaaaagcgaaccgccgctggctgcggcggtgaatgagctggaaaactgtattgccacgctgacagtacgtgacgatgcccgtctggaactggccgctgacttttgcggcctgtttttgatgactgataagcaggcggcgctgccgtatgcatcggcctacaaacaggacgagcaagagattaaacgcttgttagttgaggcagggatggaaaccagcggcaatttcaacgaaccggcagaccatctggcgatctatctcgagttgttgagtcatctgcatttttcgctgggagaggggaccgttcctgcgcgaagaatcgacagtttgcggcaaaaaacactgacggcgctgtggcaatggttaccagagtttgctgcgcgttgccatcagtatgacagctttggtttttacgcggcactaagccagttattgctggtgttagtggagtgcgaccaccaaaacaaataa

SEQ ID NO: 460219 - DNA, 306 bp, Shigella boydii
atggctaatgttacggtgacttttactattaccgaattttgcctgcataccggcatctctgaagaggagttgaatgaaattgtcggtttgggggtggttgaaccgcgtgagatccaggaaacaacctgggtatttgacgaccatgccgccattgtggtgcaacgcgcggtacgcctgcgtcatgaactggctctggactggccggggatcgcggtggcgctgacgttaatggatgatattgcacacctgaagcaggaaaaccgcctgctacgccagcggctttcccggtttgtagctcatccgtga

SEQ ID NO: 460220 - DNA, 921 bp, Shigella boydii
atggaattaaaggattattacgccatcatgggcgtgaaaccgacggacgatctcaagacaatcaagaccgcctatcgtcgactggcccgtaaataccatcctgatgtcagcaaagaaccggatgccgaagcccgcttcaaagaggtcgctgaagcctgggaagtgttaagtgatgaacaacgtcgcgctgagtatgatcagatgtggcaacatcgcaacgatccgcaatttaaccgtcagttccatcatggcgacggtcagagttttaatgccgaagattttgacgatatcttctcgtcaattttcggtcagcatgcccgccagagccgtcaacgccccgccgcacgcggccacgatattgaaatcgaagtggcggtattcctcgaagaaacgctgactgagcataagcgtaccatcagctataacctgccggtttataacgcctttggcatgatcgaacaggaaatcccgaaaacgctgaatgtgaagatcccggcgggcgtcggcaatggtcaacgcatccgtctgaaaggccaggggacgccgggcgaaaacggtggtccaaatggcgatttgtggctggtgattcatattgcgccacatccgctgttcgatattgtcggccaggatctggaaattgtggtgccggttagcccgtgggaagcggcgctgggtgctaaagtcaccgttccaacactgaaagaaagcattttgctgactatcccgccaggcagccaggccgggcaacgattgcgcgttaaaggcaaaggtctggtgagcaaaaaacagaccggcgatctgtatgcggtactgaaaatcgtgatgccgccgaaaccggatgaaaacactgccgcgctgtggcagcaactggcagacgcccagtcgtcttttgatccacgtaaagattgggggaaagcatga

SEQ ID NO: 460221 - DNA, 834 bp, Shigella boydii
atggataatgctgttgatcgccacgttttttatatttctgatggtacggcaataactgcggaggtattaggacacgcagtaatgtcacaatttcccgtcactatcagcagcattacgctgccgtttgtcgaaaatgagagccgtgcacgggcagtgaaggatcagattgacgcaatttatcaccagacaggtgtgcgcccgctggtcttctactccatcgtgttgccggagattcgcgccatcatcttgcaaagtgaaggcttttgccaggatatcgttcaggcgctggttgccccgctacaacaagagatgaaactggatccaacgccgattgctcatcgtacccatggccttaaccctaataatctcaataaatatgatgcgcgcattgcggcgattgattacacccttgcccacgatgacggcatttcgttgcgcaatctggatcaggctcaggtgatcctgctcggtgtttctcgctgtggtaaaacccccaccagtctgtatctggcaatgcaatttggtatccgcacggcaaactacccctttattgccgacgatatggataatctggtgctacccgcgtcgctcaaaccgcttcagcataaattgttcggcctgactatcgacccggaacgtctggcggcgattcgcgaggaacgtcgggagaacagtcgctatgcctcgcttcgtcagtgcagaatggaagtcgcggaagtggaagccttgtaccgtaaaaatcagatcccgtggattaacagtaccaattattcggtagaagagattgccaccaagatcctcgatatcatgggccttagtcgccgaatgtactag

SEQ ID NO: 460222 - DNA, 1047 bp, Shigella boydii
atgaacagaactgacgaactccgtactgcgcgtattgagagcctggtaacgcccgccgaactcgcgctacggtatcccgtaacgcctggcgtcgccacccatgtcaccgactcccgccgcagaattgaaaaaatactgaatggtgaagataagcgactgttggtcattattggcccctgctcgatccacgatctcaccgctgcaatggagtacgccacccgtctgcagtcgctgcgcaaccagtaccagtcacggctggaaatcgtaatgcgcacctattttgaaaaaccacgaactgttgtcggctggaaagggctaatctccgatccggatttaaacggcagctatcgggtaaatcacggtctggagctggcgcgcaaattacttttacaggtaaatgagctgggtgtccctaccgcgactgagtttctcgatatggtgaccggtcagtttattgctgatttaatcagttggggcgcgattggcgctcgtactaccgaaagtcagatccaccgcgaaatggcttcagcactctcctgtccggtaggttttaaaaatggtaccgatggcaacacgcggattgccgtggatgctatccgcgcagcccgcgctagccatatgttcctctcgccagacaaaaatggtcagatgaccatctatcagaccagcggcaacccgtatggccacattattatgcgtggcggcaaaaaaccgaattatcatgccgatgatatcgccgcagcctgcgatacgctgcacgagtttgatttacctgaacatctggtggtggatttcagccacggtaactgccagaagcagcaccgtcgccagttagaagtttgtgaggatatttgtcagcaaatccgcaatggctctacggcgattgctggaattatggcggaaagtttcctgcgcgaaggagcgcaaaaaatcgtcggcggtcagccgctcacttacggtcaatccattaccgacccgtgtctggactgggaagataccgaacgcctggtcgaaaaactcgcctctgcggtagatacccgcttctga

SEQ ID NO: 460223 - DNA, 192 bp, Shigella boydii
atgcgttatgcggatagcagaaaactcacgcctgaaacggatgccaatcacaagaccgcttccccgcagcccatccggcgaattaccagccagacactgttaggtccggatggcaaactgattatcgatcatgacgggcaagaatatctgctccgtaaaactcaggctggcaagctgctgttaactaagtag

SEQ ID NO: 460224 - DNA, 1437 bp, Shigella boydii
atgaccctgtcttttgttacccgctggcgcgatgaattgccagaaacctatacagcactttcccctacgcctttaaataatgcccggctggtttggcataataccgaactggctaacacgctgagtattccatcgtcgctgtttaaaaatggcgcaggtgtctggggcggcgaagccctactgcctggtatgtcaccactggcgcaggtttacagtggtcatcagttcggcgtctgggcgggccaactgggtgatgggcgcggcattttactcggcgaacaactgcttgctgatggcactacaatggactggcatctgaaaggtgctggcctgacgccttattcgcgaatgggtgatggacgggcggttttacgttcgacgatacgagaaagtctcgccagtgaggcgatgcattatctgggcattccgacgacccgcgcgttaagtatcgtcaccagcgattcgccagtgtatcgggaaacggcggagccaggcgcgatgctgatgcgtgtggcaccaagtcatctgcgctttggtcatttcgaacatttttactaccgccgcgagtcggaaaaggttcgtcagttagctgactttgctattcgtcattactggtcacatcttgaagatgatgaggacaaataccgtctctggtttagcgatgttgtcgcacgtaccgcgtcgttaattgcccaatggcagacggtcggctttgcacatggggtgatgaataccgacaacatgtcgctgctgggactgacgcttgattacgggccgtttggttttcttgatgattacgaacccggttttatttgtaatcactcggatcatcaagggcgttatagctttgataatcaacctgctgtcgcgttgtggaatttacagcgtctggcgcagacattgtcaccatttgttgccgtagatgccctgaatgaggccctggacagctatcagcaggttttgttgacgcattatggacaacggatgcggcagaaactgggcttcatgacggagcaaaaagaggataacgcgctactgaatgaattattcagtctgatggcgcgagagcgcagcgattatacccgcacattccgcatgctgagtctgaccgagcagcacagcgcggcgtcaccgctacgtgatgagtttattgatcgtgcggcatttgatgactggtttgcccgttatcgggggcgtttgcaacaagacgaggttagcgatagtgagcgtcagcaactgatgcaaagcgttaacccagctctggtattgcgcaactggttggcgcaacgggcgattgaagcggcagaaaagggtgatatgatggaattgcaccgcctgcatgaggcgttgcgaaatcctttcagcgacagagatgatgactatgtcagtcgtccacctgactggggtaaacggctggaagtcagctgctcgagttaa

SEQ ID NO: 460225 - DNA, 714 bp, Shigella boydii
atgaagatttttttggagaatctttatcattctgattgctatttcctgccgataagagataaccagcaagtccttgtcggcgttgagttaattacccatttctccagtgaagatggcacggtgcgtatcccgacgagtcgggttatagcgcaacttaccgaggagcaacattggcaattattttcagagcagttggaattactaaaatcatgccaacatttttttattcaacataaactctttgcctggcttaatttaacgccacaagtggctacattattattagagagggataattacgcaggcgaactattaaaatatccgtttattgaactgttgattaatgagtattacccgcatctcaatgaaggaaaagataaccgcggtcttttatccttatcgcaagtgtatccccttgtgttaggtaatttgggagcaggcaatagcacaatgaaagcggtttttgatggtcttttcacccgcgtcatgctggataaaagttttattcagcaacaaatcacgcaccgctccttcgaaccgtttattcgtgcgatccaggcgcaaatttccccttgttgcaattgcatcattgcgggaggcattgatacggcagaaatattggcacagattacccccttcgatttccatgctctccagggatgcctgtggcctgccgttcccataaatcagataacgacgttggttcagcgataa

SEQ ID NO: 460226 - DNA, 465 bp, Shigella boydii
atgcgtttctgccttattttgatcacagcactgtttctggccgggtgtagccaccataaagcaccgccgccaaatgccagactttctgattcgattaccgttattgccggtttgaacgaccagctacaaagctggcatggcacgccgtatcgttatggtggcatgacgcggcgcggtgtggactgttcgggatttgtggttgtgacgatgcgcgatcgtttcgatttgcagctgccccgtgaaaccaaacaacaagcctctattggcacgcaaattgataaagacaagttgctgccaggtgacctggtctttttcaaaacggggtccggacaaaatggtttgcatgtaggtatttacgataccaacaaccaatttatccacgcctctaccagcaagggagtgatgcgttcctcacttgataatgtctattggcagaaaaatttctggcaggcgagacgaatctag

SEQ ID NO: 460227 - DNA, 750 bp, Shigella boydii
atgtctattgtgatgcagttacaggatgttgcggaatctacccgcctggggccactttctggcgaggttcgggctggggagatcctgcacctggtggggccgaatggcgcgggtaagagtaccttgcttgcacgaatggccggaatgaccagcggtaagggaagcattcagttcgcggggcaacccctggaagcatggtccgcaacaaaactcgcgctgcatcgcgcctatctttcacaacagcagacgccgccgtttgcaatgccggtctggcactacctgacactgcatcagcacgataaaacgcgtaccgaactactgaatgatgtcgcaggggcgctggctcttgatgacaaactcggtcgtagcaccaatcaactttccggcggtgaatggcaacgcgtacgtcttgctgcggtggtgttgcaaatcacaccacaagccaatcccgcaggccaattgctgcttcttgatgagccgatgaacagtcttgatgttgcgcaacaaagtgcgttagacaaaattctgagcgcgctgtgtcagcaaggactggcgattgtgatgagcagtcacgatctcaaccacacgttgcgtcatgcgcatcgggcgtggttgctaaaaggtggaaaaatgctggccagtggacgcagagaagaggtgctcacgccgccaaatctggcgcaggcctatgggatgaattttcgccgtctggatatcgaaggtcacagaatgctgattttgaccatctga

SEQ ID NO: 460228 - DNA, 552 bp, Shigella boydii
atgcaagattccattctgacgaccgtagtgaaagatatcgacggtgaagtgaccacgctggagaagtacgccggtaatgtgctgttgattgtcaatgtcgcctcaaagtgtggcttaacgccgcaatatgagcagttggagaatattcagaaagcctgggccgatcgaggttttgtggtgctgggattcccgtgcaaccagtttctggaacaagaaccgggcagcgatgaagagattaaaacttactgtaccaccacatggggggggacgttcccgatgttcagtaagattgaagttaacggcgaaggacgccatccgctgtatcaaaaattgattgccgcagcgccgaccgcagtcgcgccggaagagagcggattctatgcccgtatggtcagcaaaggtcgtgcaccgctgtaccctgatgatattttatggaattttgagaaatttttagttggcagggacggattggtcatccagcgtttttccccggatatgacgccggaagaccccattgtgatggaaagcattaaactggcgttggcaaaataa

SEQ ID NO: 460229 - DNA, 981 bp, Shigella boydii
atgctgacacttgcccgccaacaacagcgacaaaatattcgctggttattatgcctgtcagttttgatgctgctggcgcttctcttaagcctttgcgccggtgaacaatggatctcgctaggtgactggtttactcctcgtggcgaactgttcgtctggcaaattcgcctgccacgtacgctggctgtattgctggttggtgcggcgctggctatatccggcgctgtaatgcaggcgttgtttgaaaatcctctggcagaacctggactacttggggtctctaacggcgcaggcgtggggcttatcgccgcggtattgcttgggcaagggcaactccccaactgggcgctagggctgtgtgcgattgctggcgcgcttatcatcactttaatactcttacgtttcgcccgtcgtcatctttcgaccagtcggttattgctggctggcgttgcattagggattatctgtagcgcactaatgacgtgggctatctacttttccacctctgttgatttacgtcagctgatgtactggatgatgggcggttttggcggcgtagactggcggcaaagctggctgatgctggcattgatccccgtgttgttgtggatctgttgtcagtccaggccgatgaatatgttagcacttggcgagatctcggcgcggcaactgggtttacccctgtggttctggcgcaatgtgctggtggccgcgaccggctggatggttggcgtcagtgtggcgctggcgggtgctatcggctttattggtctggtgatcccacatattcttcggttgtgtggtttaaccgatcatcgcgtattacttcccggctgcgcgctggcaggggcgagcgcattgctgctggccgatattgtagcgcgcctggcattagctgccgcagagctgcctattggcgtggtcaccgcaacgttgggtgcgccggtgtttatctggttattgttaaaagcaagacgttag

SEQ ID NO: 460230 - DNA, 438 bp, Shigella boydii
atggcagagaatgttgcacatatttcgcggttcagaaaaaagaaagagaatgcctataatgtatccaacaaccaagtaacaggaagtggtaatgatggaggtgatggcatgaatgacgaccttgaacggcgggtcagttgcctggaaagtgatgtgactgaaatcaaaaacaacctgattactctcactacaagaagcgaatcctttgctaccaaatctgatgtactggagattcgcgaagggttgaggcttgagatggcagaatcgcgccaatccctgaagtctgagatggctgatttacgccagtctctgaaagttgagatggctgagcatcgtactgaacttcagaaatcatttgcaaatcagacttggttactcacaggtattgtcctgtctgcgatggccgtgcttgtggctgtggttactgttattaagtaa

SEQ ID NO: 460231 - DNA, 363 bp, Shigella boydii
gtgaagtttcatttagatgaacttaaaagaatggcaacgctcgataattttgcgcgttttctcaatgagtcgtctacgaatgaaaaatgtttgtcgtgtggcgatacggatatgtacatgtatttgacgaatattgttgaggtggggcctgagccgaaaactgctgaggagtgtgatttaggcacttttgttatgcttgattacatcggtccatttactgggtatccgggatatgagggacatgatcgggaaaatatccataactatgaattccgacttacctgtaacagatgtgggtttgttcatcgttactcggcccgggcctttatgaactgggtaggcaagcagggtgatgagaagtga

SEQ ID NO: 460232 - DNA, 939 bp, Shigella boydii
atgtgccctgaggggcgtaaaggcaaacgcattcgcaaaaaatttaaaacgaaatcggatgcagttttatatgagcggtgggtgctggcgcaacagcataacaatgagtggaaaggaaactctattgatcgccgtcctctgtcagtgcttattgacttgtggtggaaataccacggccagctaatgaagtcagggcataacacgcgccttaaattgctgcgcttgagtgaagcaatggatgacccgtgcgtgcataaacttaatacaacgatgctcaccgagctacgtgtgtccaggatagagcaggggatacagcccagcaccataaatcgagagattggggcgttaagcgcgatgtttaccgcactcatctcatccggccattttcttaacgataaccccgttcaaggccttaaaggaatgaaggttaaggagcgcgaaatgggatatctgagtaagtctgaatgtgttcagttgctggatgcactggctgaaaatcccgatgaacgactggctgtcgaaatccttctgtcgaccggggcgcgatggggcgaggtagcggcactggagcagcgccgtgttcttcattgtcgaatcactttttcaaaaacgaagaacagcaaaaaccgtaccgttcctatttctgaaagcctgtttgaaaagatcaaaaaacggggcgggaaactggtgtttccgacgctggattattcattggttcgcgatgtcatcaaaacggtcgcacctgatgttcctgacggccaggctgttcatgcgctgcaccacaccttcgccagtcatttcatgatgaacggcggcaatattctgacgctccagaaaattctggggcacgcaaagattcagacaacgatgatttatgcccatcttgcgccggattacctgcaggatgcggtgaggtttaatccactaggaggtgcttaa

SEQ ID NO: 460233 - DNA, 309 bp, Shigella boydii
atgcttatcggtgaaaaaattagagtgattcgtgaatcagaggatttaacgcgcgaagaattttgcggcctgattgatgtgcctatcggcactttgcgtcgttatgaaacggggcggattgaaaacatagggggcgaagtgcttatcaagattgttaatcaccctcgcttttttaagtacatgaattggcttatgacgggaaaaacaaatgaggctgctgggcagatcagtccctctctctcccctgatgggccagaaaacacatcgtcttctcaaaaatcccgcaagactggtacacagcccggctaa

SEQ ID NO: 460234 - DNA, 279 bp, Shigella boydii
atggcaaaagtcctgaacacacacgaacaggcagactttgagcgtttagcagcgttctatccctaccgcgatgagcatgggttaccagtacttgaagaaagcctgaaagattacgcaaagcgtaccaaccaagctgttaacacagtgaaaagacaggctgacagaggttcaattcccatcaaccaagatgaaaagaactcaagacgcacagtaaatctcttcgctcttttcctgaaaacaatcaggagcgcagaaaaatacgtgcagatgacaaaataa

SEQ ID NO: 460235 - DNA, 339 bp, Shigella boydii
atgctgaagcaacgccgtaattttcgtaccggaacagaacgccacgctaaccgtttcactaccagtgcatcacgcagcaacatccgctacagcctgagtgatacacacgcaacgcaggatggctacccagtaaaacaaatcggcgagcacacctggctgattgagaaagctggaatcgtgatccacaaatgcccacgcaatccgtttaccggaaaccgcatttttgcattgagctgtggcgacaatcagtgcgggcaggatttcacattatacgaagcacttcgcacgattgatcgtctgcttcgcgggcaaagttttattaaacagactgatttataa

SEQ ID NO: 460236 - DNA, 288 bp, Shigella boydii
atgaccaaagaccatgcacaaggtgtatttatccgttttattgattttcgcggtgaactgttattacgtgcatccgctattgacggagtgactccggcgggtaaaaacggagccgacgaagccacttacgtttatctgaacggcacgcgactgcttgtggaacttccgtaccagaccgtacgagaaatcattagcgaagctgaaaaggcacgccaggttaatggcgatgaaccctatatcgaaattatttgtatggattcagaagctgaaatacagaaagcagattaa

SEQ ID NO: 460237 - DNA, 237 bp, Shigella boydii
atgggcaaagaatataaaactctcattaacaaagcacttgagcgtttttattttcgcttaagtgcatcaggcgctcatgctgaacgtgcggcccgtgactcattgaccagagcaatccgaagtctgtatgacgtggctttttacgctgatgatctggatgcacttaacgaactttccgagctgatctgtgccgcagtggatttgcccctatatttccagacatctgttatcacttaa

SEQ ID NO: 460238 - DNA, 267 bp, Shigella boydii
gtgtgccacttcaaaccgaagaacacggcggtgcggagtccggagagtaacggaatagcagagagcttcgtgaaaacgataaagcgtgactacatcagtatcatgcccaaaccagacgggttaacggcagcaaagaaccttgcagaggcgttcgagcattataacgaatggcatccgcatagtgcgctgggttatcgctcgccacgggaatatctgcggcagcgggcttgtaatgggttaagtgataacagatgtctggaaatatag

SEQ ID NO: 460239 - DNA, 207 bp, Shigella boydii; identical to SEQ ID NO: 24440

SEQ ID NO: 460240 - DNA, 621 bp, Shigella boydii
ttgttgaccacttcaaaccgcaaaaaagcgaacgtcatgcgcccggtggagtaccagaacggcgaagcattcactatccgtaacgtacgggttatgcctgaatccattccggctggctttaaggcactggctgacatgagtccgtttgaatccctgctgattgtggatttgggcggaaccacgctggatgtggcaaaggttcaggggcaactggcaggtatcagccaggtgttttgcgatccacacgtgggcgtttctctgatggccgatgccgtactgtcggtgatggccactaacggtatgcgcaccagtcaccacatcgccaataccattatcgaacatcgccatgatgaagcctggctgcgccagcacatccacaatgacgcgcattacgccagcctgatggcggtaattcgtgaaaaggaagaaacactgaaacaacgcgtgatccgcgcgctggcgggtttttcgggttacgggcgggtgatggttgtcggtggaggggcggagattgtggcacccgctatccgcgaagcctgcggagttaatgcgactttcatcgcggacggggtgccacagtttgctctggttaatgggctgtacgcaatggacaaggagtaa

SEQ ID NO: 460241 - DNA, 312 bp, Shigella boydii
atgacgactccaaccagacggataagtttctatctgaagcccaccgccgtcaagaacgaaggagaagcatgcgcctggctggacagccttacaccagaagcccgcaaaagcggccaacgcgtggcttttctggccgggctggcacttctgaaaatgaatccggcagaggcttatcgactggctgcatgggctggtgatgaagcgttatcagtgacacaaaccaggacagaacgccccacatcacagccagtatcaaccgcacagataaccagtcagatggccggaaatatccgggcgttatttcctgaataa

SEQ ID NO: 460242 - DNA, 591 bp, Shigella boydii
atgagcgaaatcaactatcaggcattacgtgaacgttattcacctgtgccagtaccgaaatgccctatttgcggcgaggaaatgtcaattcagcgaatatctggagcacaggttgtttatgcctgctccggttatggtgatgatggagatttcaaaattggccgaactcttgctgacgaacattatgaaaaatcacgcgtaacagtgttggatgtcggggatcctgaagtattggcgctacttgattggctggaaaccaaagacaaccgaatcgctgaactggaaaaaatcgccactgactatgcacttaaattccagaaagcacaggacgcattaaagcatgccgctttgctgcatagcaggacggcgcaacaaacaaataattttgcagtatcgcttccggacataagcgaatatttcattaatgacgtatttcagcccttgcgatacgagcgggatgttgaaagagccatcataaaggctggcggaaaagcattgtggcaggagaaacacgaggacagaacgcatcagtcatgcgatgtaaattgtggatggtttagcccactgacgacagataaaaataacacctga

SEQ ID NO: 460243 - DNA, 687 bp, Shigella boydii
atgctcggcgaaccgcttaaattacggcacgccctggcgaaatacatgcgacgcggaagcgatcttgaatcatggtggtatgtgcaggatggcaaggatgcgtttcagtttcgcccaggcaaagtgtgtcacctgatgaatcctgacattaaccaggaaatctacggcatgccggaatatctcggcgcattactctcggccagcctgtctcattcggcggacatgttcagaaaactgtattacgacaacggatcccacgccgggtgcatcatctacatcggtgccgcgcaggtaaaccgcgaaagcatggactccctgaaagaaacgctacagggtgcgcgtggtggtggtgcgtttaaaaacgtgctcattcatgcgcccaacgggggcaaagagggggtgcaaattttgccgttccagcagatcaccgcaaaggatgagttcatgaatgttaaggcggcatcccgtgatgatgtgctggctgcgcaccgcgttccgccgcaactgatgggggcgatgccgggtgaaaaaagtgcgtttggtgatgtggagaaggccgcgcgggtttacgcaattaacgagctgatgcccgtcatggaggccatgaagcacatcaatgactggcttggcgaagaggtgatccgctttaacccttacgcactgttagacatccagcccacatcctga

SEQ ID NO: 460244 - DNA, 294 bp, Shigella boydii
atgagcagaaaaaataaaaaagtgcgcatgagttcacgcattgatctcgctgatgcgctcaggaaagaatcatcgctcagtgcattcacatttgatggtccttatcgcctgaccgggcatgacctgctggacaatatgtactgtgctgataacgggcggtggtatgaacccccggtggactggtacggtctggcaagagctgcccggcaaacgtcttggcatcagtctgcgctttactttaagcgcaatgtattgctcggttgctacatcccgcacccgctgctttcccggtag

SEQ ID NO: 460245 - DNA, 1125 bp, Shigella boydii
gtggagctgaaagggggcgataaaatcatcctctccaacggcgcagagctgcattttctcggcatttctgctgcgtcggcacagtcctatacgggcaatttttattttgatgaatttttctgggtcagtcgctttgctgaactgcgcaaggtggctggcgctatggcaaccctcagcggactgcggcgcacctacttctccacgccatccaccgaaacgcacgaggcatacgcctactggaacggcgaccgctggaacgagaaaaaggcctcgcataaacgccagcgtttttctgtggactggaaaacgctgcataacgggcttatctgccctgaccggacgtggcggcaaattgtcacgctggaagatgtggttaatcacggctggaaacacaccgatatcgacgaaattcgtgatgaaaacaccgaagacgagttcctcaatctctatatgtgcgagtttgtccgcgaaggggaatcggcatttaacctgaatatcctgattggctgcggcgttgacggatacgacgactggaaagactggaaaccttttgctccccgcccgatggggaatcgtccggtatggattgggtatgacgcaaacggcagcagtggcaacggcgacagcggcgctgtgtccgtggtggttcctccgtctgttcctggtggccgttttcgaacggtggagacgcgacgcgttcaggggctggagtttgaagaacaggccagagtcattgaagagttcacgtgtcgctacaacgtggaacacatcggcattgatgtgacgggcgggaacggggaggctgtttatcagatagtgaaacggtttttccctgccgctattccgtacaccttcacgctgtcatcaaaacggtcgctggtactgaaaatgctgcaaataatgcgtgccgggcggtgggaatacgatcgcgccgaacgcgagctggtcgcggcctttaacgccgtgcgtaaggtgaaaacaccgggcggctttatcacttacgaaacggaccgagcgagggggatcagccacggcgaccttgcgtgggtaaccatgcttgctgtcattaacgaaccgattggcggcgaaggagaaaacgagcgtttcacggttatggagttctga

SEQ ID NO: 460246 - DNA, 636 bp, Shigella boydii
atgattcaggacgcttttgtgcgccagcgtgcgcggcaactttactggcagggttatccgcccgcagaaatatcacgtctgatgggaataaacccgaacacgatttatgcgtggaaaaaacgtgaccagtgggatgaaacgccacccgggcagcgtgtcacgcagtccatcgatgcgcgcctcatccagcttactgaaaaacagaataaaacaggcggtgactttaaggaaatagacctgctgacccggcagcttaaaaagctgcatgatggccagccggatgtgatggccgcaggaaagaaaggccgggcgaaaaaactcaaaaatcatttcacgccggaacagattgccgcactgcgggaaaaaatcatcagcaggctggagtggcatcagcggggctggtttgactccctgaccctttgcagggaagccgggatacgtaacaggatgatcctgaaatcccgacagattggggcgacctggtattttgcacaggaagcactgctgatggcgctgcgtgacgatgtggcgcaaccttaccagcgtaaccagatttttttgtctgcgtcgcgtcgtcaggcgttccagtttaaaagcattattcagaaggcgcggctgaagttgatgtggagctga

SEQ ID NO: 460247 - DNA, 885 bp, Shigella boydii
atggctaatgaaaaaaagacatcccgcaaaaagtttcgcgtggctgtctccggatcaactgttgatggccgtgaaatcagtccggtgcatctgcgtgaagccgccgagaacttcaacccggatgtttacgctgcccgcgtgaacgttgagcactatctctcgccatgcccgtcaagcgaattttccgcaatgggcgatgtcaccgcactgagtacggaagacattacggaaggtccgctggccggacgtactgcgctgtatgcagaaatcgaaccgaccgagcgcatgaagcagcttgttgcggacggcaagaaaatctattccagtatcgaactgcacccgcagttctccgttaacgggcgcgcctatctggtcgggctggcgatgaccgacaccccggcaagcctgggcactgagcgcctgaaattcacggcacagcaacgtcaggcggtgatgacgtttaacagtatccagggtgaaggagaaggacgaatgagcaacacatttaaattcagcagccggagcgaaaagaatttgcagggtgtaaatcctgatctggtgaaagtgacccgacgggcactggaaatctcggaagtggattttggtatcaccgaagggttgcgcagccgttaccgccagaagcaactggtggccacgggtaagagccagaccatgaacagccgccaccttacggggcatgccgtggatgttgtggcttatatcggcagccaggtgtcatgggaatggccgctgtacgaaaaaatcgcagcagcattcagacaggccagccgggaactgaatattccggtggaatggggcggcgactggaagaccctgaaagacggaccgcattttcagttaccacacggagcctatccggcatga

SEQ ID NO: 460248 - DNA, 408 bp, Shigella boydii
atgaagctctggcccacgcttggcgtcgctttccttctgactgccggatggggaacatccatgcgtctgtcgtggtcgctgggccgggagaacgccagaaacgaagcgcaggccagcaccctgaaaagtaccgccgacaccctgaatatcatcagcgccggggtacaggatatgcagcaggtgctggcgcaactccgcgtggaaaatcagcaacgcaatcaggacggagaggtaagacgtgaacagctacgcaacgatattgcaaaagatgaatgcgcccacgctttgcctgacgctcgttttactgacaggctgcgcaggcacgcagaacgcgccactgccagcgccgtcagtccggcttataccgcagacgctgaccataccggtaacgcctccccccttccctga

SEQ ID NO: 460249 - DNA, 468 bp, Shigella boydii
atgctgaaaactgattccctgcgtgaagccatgacccgttcatgccgatggtgtcaggctaacccggaaaaattcaccattttcgtggagagcggcaacattgaaacgaccggagaaaccccatcgtttgtttaccgctatcagatggtgatgtttgtcatggattacgccggggagctggacgacctcacgctgccgctgctggcgtggttatccgaaaatcagccacagttgttgctcaaccctgagcgtaatcaggacatcaaattctccgccgttatcaatgacgatgacagcgccgatctcctgtttacgctccccctgcgggaacgcgttcgcatcacgcgcagcagtcagggcacaccgcaggcagaacacctgctggagccaaaaccccgcctgccatcttccgaaggcgactggtcgcatgtattccaggatgtgacgtggggtgaaagcgatggataa

SEQ ID NO: 460250 - DNA, 645 bp, Shigella boydii
gtgaaagcgatggataaggcattcactcgcgtggatgaaacctttgaagccatccgcgacagcctgaatcagcaggccatcaataacatcgccagaaagctggcacaggatttacgccgcgcccagcaggcacgtatccggtcacagaaagcgccggacgggaccgcatggacaccacgcagacgccacgtaacccggatacaggagcgcattcgctttatctggaataacgaagcacgcacgctgaaaaactggcatcacgacacggggaaatacgggcgaaccatcaccgggtgggatgaggataaaaacagcatccgcacgttttaccgggatgacatcgaccgctttctggaaatacgcacccggcgcatcaaccaggacagcacaaagcgcgtccccatgttcgtaaaactgcgcaccgcccgctacctgaaagcccgtgcagatgcttccggtgtgacggtgggttacagcggcgtggccgcacgtattgcacgcgttcatcagttcggtgagcgcgatcaggttgcgccgggcattttcaccgattacccggtacgtgagctgctgggtatcagccaggcagatgagcgcccgatttataacacggtgctgggccggattgcagaggctgtacggtga

SEQ ID NO: 460251 - DNA, 582 bp, Shigella boydii
gtgagcgcagaactcatgcggctactgagcaatatcatccgcaccgggatcatctctgaagttgatgagaagtcctggcgcgtgcgcgttcgcagcggcgaactggaaacaggttggctgcgctggaacaccactcgcgcgggagccttcaatgtgtggctgccgccatcaccaggcgaacaggtggtaattgcctgcattggcggcaacccggaaaccgccatgataattggcagcctgtggagtgatgccattccggcccccggcaaaagcctgaaagaaatcgtggtcagcgcgccggatggcgcggtgttccgctacgacgcggacgcaggcgcactgagcgccagcggcatgaaaacagccaccctgcaggcatccgtcagcgtgacactggatacgcccgtcgtggaatgcacagaccttctgagaacggcgacgcttgacgtcacaaaagggggaaagatgagcggcaatatcacgcacagcggcggcaatttcacctcaaacggcatcacagtgcatacgcataaacacggtggcgttaaaggtggcagcgattcgacaggaggcccgcagtga

SEQ ID NO: 460252 - DNA, 351 bp, Shigella boydii
gtgacaacccgctacacaggaatgaacccggacggaacgggaaacctgaacgatatggagcacctgaaacagtcagtcagggacatcctgaccaccccgctggcaagccgggttatgcgacgggaatatggcagccttgtgcctgatttgattgacgaacccatgaataacaccacgcgtctgcaatgcatgagtgctgccgtgattgcgctgacacgatgggaaccccgcattgccctggacgctatcgacgttgtctggaaggcaggaggccgcgccggggtgacgctgtcgggcactgtcatgcagaccatgcagaatgttgaattaaccatcacgctgagggagtaa

SEQ ID NO: 460253 - DNA, 897 bp, Shigella boydii
atgcctgccgttgacctttcacagttaccggaacccgccatcatcgcggagcctgactttgaggcaattctggctgacacaaaggccatgatgattgcgtcctatcccgccgaacagcgtgaagccgtttccgccgcgctggagctggaatcggaaccccttaacgttatcgctcaaaccatgtcgtttcgtgaaatgctgttacgccagcgggtcaatgagggtgcacgcgcctgcatgctaagccacagcgccgggacagacctggacaacctcgcgggcaatatgaacacaaagcgcctggttatcactccggcaacggataccaccgatgcagtgatggaaagtgacacctcgctgagactacgggcgcaacgggcatatgacggtctgagtgttgctggcccgtcaggtgcatacgagtattttgcacgcagcgccagcggtctggtacgcgatgcgcgggccatcagcccgtctccggccaacgtgacggtttccatcctgtccactgagggcgacggcacagcaacggaggcgttgcttaataccgttcgcgccgttctgaatgcagaggatacccgcccggtggccgaccgcctgaccgtacagagtgccagaatcgtgacatggcggctgaatgcaaaactgtacttttaccccggcccggaatccgaacctattctggccgcggctgaatcgtcgttcaggaagtggctggctgagcaggggcttatcggtcaggacgtggcgttgtccgccattgctgccgcactgcatgtgcacggtgtgcaacgcgtggagataatcgaacccacacagaatatggccatcagcgacatacaggcggcgcgctgtgagtcattcaccatcagcgaaggtggacgcaatgagtaa

SEQ ID NO: 460254 - DNA, 531 bp, Shigella boydii
atgagtaattcgttgttaccaccatcagccagcaatttcatgcgttgtgccgaagccgtcggaacacgcattacagacattccggtagacctcaacacgctgtggtcgccggacacctgcccggtgcatctgctgccttatctcgcctgggcgttttccgttgaccgctgggatcgcaactggccggaagagacaaagcgacaggttattcgtgatgcatggctgatacaccgacacaaagggaccatcagcgcactgcgccgggccattgagccgctgggatacctcattcgcgtgtctgagtggtgggagttcggcggagaaccgggaacatttaccgttgaagtcggcacgctggacagtggcgtgacggaggaaatgtatctggaaatggagcggttgattgctgatgcccgcccggtcagccgccacatgacagggctgaatatcattcaggaaattccgggggatattttcgcagcggcggcaacttatgacggtgaagttattaccatttatccaggcgattaa

SEQ ID NO: 460255 - DNA, 1713 bp, Shigella boydii
atgagtaccacaacacgaaaatttaaaaccattatcaccgatacgggtgcaaaaaaattagctcaggtagccgcgccagatggtaagcctgtccgcctgactcatatggccgtgggcgacggtggcggcacgttgcccacaccagacagtaagcagacccgtctggtgcatgaggtgtggcgacatactgttaatcgcgtcatcctggacgcaacacatcagaaccgcattattgcggagctggttattcctcctgaaacgggcggattctggatccgggaaattggtgtatttgatgagcacggcgatttaatcgcggtgggaaatactgccgaaagttacaagccagccgttgccgaagggtccggtcgtgcacaaacatttcgcaccattctgaccgtatccagcactgccaccgtggcgcttaccgtggacaacaccatggtgatggccacagtggattacgtggatgacaaactgaaagagcatgaacagtcacgacgtcacccggacgcctcgctgaccgcaaaaggctttgttcaactcagtagcgccactaacagcgtgtctgaaacgcaggctgcaacgccgaaagcagtaaaggccgcgtatgatcttgctaacggtaaatatactgcgcaggatgccagcacgacgcgaaaaggccttgtccagctcagtagcgccaccaacagcacgtctgaaacgcaggctgcaacgccgaaagcagtaaaggccgcgtatgaccttgctaacgcaaaatataccgctcaggacgccacgacggcacaaaaagggatagtccagctcagtagtgccaccaacagcacgtctgaaacactggccgcgacatcgaaagcggttaaggcggtaatggatgaaacgaacaagaaagcgcccttaaacagtcctgcgctgaccggaacgccaacaacgccaactgcgcgacagggaacgaataatacccaaatcgcaagcacggctttcgttatggctgcgattgccgcccttgtagattcgtcacctgacgcactgaatacgctgaacgagttagcggcggcgctgggaaacgacccgaattttgcgaccaccatgactaacgcgcttgcgggtaagcaaccgaaagatgccaccctgacggcgctggccgggcttgctactgcggcagacaggtttccgtattttacggggaatgatgtcgccagcctggcaaccctgacaaaagtcgggcgggatattcttgcgaaatcgatcgttgctgccgttatcgaatacctcggtttacgagaactcggcacaagcggggagaaaataccgttactcagtacagcgaatacctggaccaatcgacaaacattcagcggtggcctttctggggaactgtccggcaatgccgctactgcaacaaagctgaaaacagcacgaaaaattgctggagttggttttgatggttctagcgatatttcaattagtgccaaaaatgtcaatgcatttgcactccgacaaacaggtaatactgttaatggtgatacatccattggatggaattgggatagtagtgcatataacgccctgattggtggtgcatctgcattaattcttcactttaatataaatgctggtagctgtcctgccgtacaattccgtgtgaattataaaaatggtggcatttcctacaggtcggctcatgatggttatggggttgaatggtga

SEQ ID NO: 460256 - DNA, 378 bp, Shigella boydii
atggacgaacagtggggatacgtcggggctaaatcgcgccagcgctggctgttttacgcgtatgacaggctccggaagacggttgttgcgcacgtattcggtgaacgcactatggcgacgctggggcgtcttatgagcttgctgtcaccctttgacgtggtgatatggatgacggatggctggccactgtatgaatcccgcctgaagggaaagctgcacgtaatcagcaagcgatatacgcagcgaattgagcggcataacctgaatctgaggcagcacctggcacggctgggacggaagtcgctgtcgttctcaaaatcggtggagctgcatgacaaagtcatcgggcattatctgaacataaaacactatcaataa

SEQ ID NO: 460257 - DNA, 441 bp, Shigella boydii
atgaggaaatatattccactggtattatttatcttttcatggccggtattgtctgcagatattcatggacgggttgttcgtgtactggacggtgataccatcgaggtcatggactcactgaaggcggtgcggatcaggctggtaaatattgatgcaccggaaaagaaacaggattatggccggtggtcaacagacatgatgaaatcactggtcgcaggaaaaacggttaccgtcacatattttcagcgagatcgttatggtcgtattctcgggcaggtttatgcaccagacggaatgaatattaatcagtttatggtccgggccggggctgcctgggtatatgagcagtacaacacagatcccgtgctacctgtccttcagaacgaagccagacaacaaaaacgtgggctctggtcagatgctgatccggttcccccctag

SEQ ID NO: 460258 - DNA, 561 bp, Shigella boydii
atgacagagcagaagcgaccggtactgacactgaagcggaagacagagggaacagcgactgtccgcagccggaaaaccatcatcaatgtcaccacgccaccaaagtggaaggtgaaaaagcagaagctggccgagaaagcggcccgtgaagcagagctggcggcaaaaaaagcgcaggccagacaggcgctgtccatttatctgaacctgcccacgctggatgaggctgtgaataccctgaagccctggtggccgggattatttgacggtgacacgccccggcttctggcctgcggtatccgggacgtgttactggaagacgtggcgcagcggaatatcccgctctcgcataaaaaactgcgcagggcgctgaaggccatcacccgttcagaaagctatctgtgtgccatgaaagccggtgcctgccggtatgacacggaagggtatgtgacggagcatatttctcaggaggaggaagcgtatgcgggagcgcgtctggcgaaaattcgtcgccagaaccggataaaggcagaacttcaggccgtgcttgatgagaaataa

SEQ ID NO: 460259 - DNA, 747 bp, Shigella boydii
atgacaacggataacacgaacacgacacgtaacgattcactggctgcacggaccgatacctggttgcagtcatttctggtctggtcacccggacagcgggatatcatcaaaacggtggcactggtgctgatggtactggaccacatcaatctgatattccagctgaagcaggaatggatgtttctggccgggcgaggagcctttccgctttttgccctggtgtgggggctgaatctgtcccgtcatgcgcatatccggcaaccggccattaaccggctgtggggatggggaattattgcccagttcgcatattatctggcaggctttccctggtatgaggggaatatcctgtttgcctttgcagtggcggcacaggtgctgacgtggtgtgaaacgcgcagtgggtggcgtacagcagcggccatactcctgatggccctgtgggggcctttgtccggcaccagttacggtattgccgggttgctgatgctggcagtcagcaaccggctgtaccgggcggaagacagagcggaacgtctggcgctggtcgcctgcctgctggctgttattccggcgcttaaccttgccaccagtgatgcagcggcggtggccggtcttgtgatgacggtgctgaccgttggtctggtgttgtgtgccggaaaatcattaccccgtttctggcccggagactttttcccgacgttctatgcctgtcatctggctgtgctgggcgttctggcgctgtga

SEQ ID NO: 460260 - DNA, 228 bp, Shigella boydii
atggaaaccaccgtatttctcagcaaccgcagccaggcggtcagactgccaaaagcggttgcattgccggaaaacgtaaaacgcgttgaagtgattgctgtcggacgaaccagaatcattacgccagccggagagacatgggacgaatggttcgacggacacagcgtcagcgccgattttatggataacagggaacagcccggcatgcaggaaagggagtcattctga

SEQ ID NO: 460261 - DNA, 399 bp, Shigella boydii
atgctgaagtttatgctcgataccaacatctgcatttttacgataaagaacaaacccgccagcgtcagggagcgttttaacctgaaccaggggagaatgtgtatcagttcggtcaccctgatggagctgatatatggtgcagaaaaaagccagatgcctgaacgtaatctcgctgtgatcgagggatttgtttcccgcattgatgttctggattacgacgctgctgcagccacacacaccgtccagataagagcagaacttgcccgtcagggacgccctgtcgggccatttgatcaaatgatcgcaggtcatgcccgcagtcgggggctgattattgtgactaataacacccgggaatttgaacgtgtgggcggcctgagaactgaagactggagctga

SEQ ID NO: 460262 - DNA, 2037 bp, Shigella boydii
gtgaatggctgtatttactggtggtgtaccacgctggaaggcatgcgggatttaatcaagtctcagccggtatatgagattcagtattacggcaaaaccttccggatgaacgctgctcaggtactgcatgataaatatatgatctggtgcggtgagcagttatggtctgcattcgttctggccacagttgtggcactggttatttgcctgattaccttctttgttgtctcctggattctggggcgtcagggtaaacaacagagcgaaaatgaagtcacaggtggtcgtcaactgacagacaatccgaaagacgttgcccggatgctgaaaaaagacggcagggactccgatatccggattggcgatctgccgattatccgggattccgaaatccagaacttctgtctgcacggcacggtcggggccggtaagtcggaggttatccgtcgtctggccaactacgcccgtcagcgtggtgatatggtggtgatttatgaccgttcaggggaatttgttaaaagttactatgatccctccatcgataagatcctgaatccgctggatgcacgctgtgccgcctgggatttgtggaaggagtgcctgacacagccggattttgataataccgcaaatactctgatcccgatgggcacaaaagaggacccgttctggcagggttcaggacgtaccatttttgcggaagcggcgtatctgatgcgtaatgaccccaaccgcagctacagcaaactggtggacacactgctttccatcaaaattgaaaaactgcgtacctacctgcgtaattcaccggcggccaacctggtggaagagaaaatcgagaaaacggccatatccatccgtgctgtgctgaccaactatgtgaaagccatccgttacctgcaggggattgagcataacggtgagcccttcaccatccgtgactggatgcgtggtgtccgggaggatcagaaaaacggctggctgtttatctcgtcgaatgccgacactcatgcctccctgaagccggtgatctccatgtggctgtccattgccattcgtggtctgctggcaatgggagaaaaccgtaatcgtcgtgtgtggttcttctgtgatgagttacccacattacacaaactgccggacctggtggagatcctgccggaagcccgtaagttcggtggctgttatgtgtttggtatccagtcctatgcccagctggaagatatctacggtgagaaagcggctgccacgctgtttgacgtcatgaacacccgtgcctttttccgttctcccagccataagattgcggagttcgctgccggtgaaattggtgagaaagagcacctgaaagccagcgaacagtattcctacggtgctgatccggtacgtgacggggtatcgaccggtaaggatatggagcgccagacgctggtcagttattccgacattcagtccctgccggatctgacctgctatgtcaccctgcccggaccgtatccggcagtcaaactctcactgaaatatcaggaacgaccgaaggtcgctccggagtttattccgcgtgacatcaacccggaaatggagaaccgtctgagtgccgtacttgccgcaagggaagcagaaggtcgtcagatggccagcctcttcgaaccggatgtcccggaggttgtttccggagaagacgtgactcaggctgaacagccgcaacagccgcaacagccgcaacagccgcaacagccgcaacagccgcaacagccggtgtctcctgtcatcaacgataagaagtcagattcaggtgtgaatgttccggcaggggggatcgagcaggagctgaaaatgaaaccggaagaagagatggaacagcaactgccacccgggatcagtgaatccggtgaagtggtggatatggccgcttatgaggcatggcagcaggaaaatcatccggacacctggcagcagatgcagcgtcgtgaagaggtgaacatcaatgtgcaccgggaacgcggggaggatgttgagccgggaggtgatttctga

SEQ ID NO: 460263 - DNA, 792 bp, Shigella boydii
atgagcagtaacttcagacatcaactattgagtctgtcgttactggttggtatagcggccccctgggccgcttttgctcaggcaccaatcagtagtgtcggctcaggctcggtcgaagaccgcgtcactcaacttgagcgtatttctaatgctcacagccagcttttaacccaactccagcaacaactttctgataatcaatccgatattgattccctgcgtggtcagattcaggaaaatcagtatcaactgaatcaggtcgtggagcggcaaaagcagatcctgttgcagatcgacagcctcagcagcggtggtgcagcggcgcaatcaaccagcagcgatcaaagcggtgcggcggcatcaacgacgccgacagctgatgctggtactgcgaatgctggcgcgccggtgaaaagcggcgatgcaaacacggattacaatgcagctattgcgctggtgcaggataaatcccgccaggatgacgcaatggtggcatttcagaatttcatcaaaaattaccctgattcaacttacctgccaaacgccaattattggctgggtcagttaaactacaacaagggtaaaaaagatgatgcggcgtactattttgcttcggtagtgaaaaactatccgaagtcaccaaaggctgctgatgcgatgtttaaagtcggcgtcatcatgcaggacaaaggtgacaccgcaaaagcgaaagccgtataccagcaggttatcagtaaataccctggtactgatggcgctaaacaggcacaaaaacgtctgaacgcgatgtaa

SEQ ID NO: 460264 - DNA, 522 bp, Shigella boydii
atgcaactgaacaaagtgctgaaagggctgatgattgctctgcctgttatggcaattgcggcatgttcttccaacaagaacgccagcaatgacggcagcgaaggcatgctgggtgccggcactggtatggatgcgaacggcggcaacggcaacatgtcttccgaagagcaggctcgtctgcaaatgcaacagctgcagcagaacaacatcgtttacttcgatctggacaagtacgatatccgttctgacttcgctcaaatgctggatgcacatgcaaacttcctgcgtagcaacccgtcttacaaagtcaccgtagaaggtcacgcggacgaacgtggtactccggaatacaacatctccctgggtgaacgtcgtgcgaacgccgttaagatgtacctgcagggtaaaggcgtttctgcagaccagatctccatcgtttcttacggtaaagaaaaacctgcagtactgggtcatgacgaagcggcatactccaaaaaccgtcgtgcggtactggtttactaa

SEQ ID NO: 460265 - DNA, 1293 bp, Shigella boydii
atgaagcaggcattacgagtagcatttggttttctcatactgtgggcatcagttctgcatgctgaagtccgcattgtgatcgacagcggtgtagattccggtcgtcctattggtgttgttcctttccagtgggcggggcctggtgcggcacctgaagatattggcggcatcgttgctgctgacttgcgtaacagcggtaaatttaatccgttagatcgcgctcgtctgccacagcagccgggtagtgcgcaggaagtacaaccatctgcatggtccgcactgggcattgacgctgtagttgtcggtcaggtcactccgaatccggatggttcttacaatgttgcttatcaacttgttgacactggcggcgcaccgggtactgtacttgctcagaactcgtacaaagtgaacaagcagtggctgcgttatgctggtcataccgccagtgatgaagtgtttgaaaaactgaccggcattaaaggtgcgttccgtacccgtattgcctacgttgttcagaccaacggcggtcagttcccgtatgaactgcgcgtatctgactatgacggttacaaccagtttgtcgttcaccgttcaccgcagccgctgatgtctccggcgtggtcaccagacggttctaaactggcttatgtgaccttcgaaagcggtcgttccgcgctggttattcagacgctggcaaatggcgctgtacgtcaggtggcttcattcccgcgtcacaacggtgcacctgcattctcgccagacggcagcaaactggcattcgccttgtcgaaaaccggtagtctgaacctgtacgtaatggatttggcttctggtcagatccgccaggtgactgatggtcgcagtaacaataccgaaccgacctggttcccggatagccagaacctggcatttacttctgaccaggccggtcgtccgcaggtttataaagtgaatatcaacggcggtgcgccacaacgtattacctgggaaggttcgcagaaccaggatgcggatgtcagcagcgacggtaaatttatggtaatggtcagctccaatggtgggcagcagcacattgccaaacaagatctggcaacgggaggcgtacaagttctgtcgtccacgttcctggatgaaacgccaagtctggcacctaatggcactatggtaatctacagctcttctcaggggatgggatccgtgctgaatttggtttctacagatgggcgtttcaaagcgcgtcttccggcaactgatggacaggtcaaattccctgcctggtcgccgtatctgtga

SEQ ID NO: 460266 - DNA, 1188 bp, Shigella boydii
gtgtcaaaggcaaccgaacaaaacgacaagctcaagcgggcgataattatttcagcagtgctgcatgtcatcttatttgcggcgctgatctggagttcgttcgatgagaatatagaagcttcagccggaggcggcggtggttcgtccatcgacgctgtcatggttgattcaggtgcggtagttgagcagtacaaacgcatgcaaagccaggaatcaagcgcgaagcgttctgatgaacagcgcaagatgaaggaacagcaggctgctgaagaactgcgtgagaaacaagcggctgaacaggaacgcctgaagcaacttgagaaagagcggttagcggctcaggagcagaaaaagcaggctgaagaagctgcaaaacaggccgagttaaagcagaagcaagctgaagaggcggcagcgaaagcggcggcagatgctaaagcgaaggccgaagcagatgctaaagcgaaggccgaagcagatgctaaagctgcggaagaagcagcgaagaaagcggctgcagacgcaaagaaaaaagcagaagcagaagccgccaaagccgcagcgcagaaaaaagccgaggcagccgctgcggcactgaagaagaaagcggaagcggcagaagcagctgcagctgaagcaagaaagaaagcggcaactgaagctgctgaaaaagccaaagcagaagctgagaagaaagcggcagcagagaaagctgcagccgacaaaaaagcagcagaaaaagcggctgctgaaaaggcagcagctgataagaaagcagcggcagaaaaagccgccgcagaggcagatgatattttcggtgagctaagctctggtaagaatgcaccgaaaacggggggaggggcgaaagggaacaatgcttcgcctgccgggagtggtaatactaaaaacaatggcgcatcaggggccgatatcaataactatgccgggcagattaaatctgctatcgaaagtaagttctatgacgcatcgtcctatgcaggcaaaacctgtacgctgcgcataaaactggcacccgatggtatgttactggatatcaaacctgaaggtggcgatcccgcactttgtcaggctgcgttggcagcagctaaacttgcgaagatcccgaaaccaccaagccaggcagtatatgaagtgttcaaaaacgcgccattggacttcaaaccgtaa

SEQ ID NO: 460267 - DNA, 429 bp, Shigella boydii
atggccagagcgcgtggacgaggtcgtcgcgaacttaagtccgaaatcaacattgtaccgttgctggacgtactgctggtgctgttgctgatcttcatggcgacagcgcccatcatcacccagagcgtggaggtcgatctgccagacgctactgaatcacaggcggtgagcagtaacgataatccgccagtgattgttgaagtgtctggtattggtcagtacaccgtggtggttgagaaagatcgcctggagcgtttaccaccagagcaggtggtggcggaagtgtccagccgtttcaaggccaacccgaaaacggtctttctgatcggtggcgcaaaagatgtgccttacgatgaaataattaaagcactgaacttgttacatagtgcgggtgtgaaatcggttggtttaatgacgcagcctatctaa

SEQ ID NO: 460268 - DNA, 693 bp, Shigella boydii
gtgactgacatgaatatccttgatttgttcctgaaggctagccttctggttaaacttatcatgttgattttgattggtttttcaatcgcatcctgggccattattatccagcggacccgtattcttaacgcagcggcgcgcgaagccgaagcgtttgaagataaattctggtctggaatcgaactctctcgcctctatcaagagagtcaggggaaacgggataatctgactggttcggaacaaatattttacagcgggttcaaagagtttgtgcgcctgcatcgtgccaatagccatgcgccggaagccgtagtggaaggggcgtcgcgtgctatgcgtatctccatgaaccgtgaacttgaaaatctggaaacgcacattccgttcctcggtacggttggctccatcagcccgtatattggtctgtttggtacggtctgggggatcatgcacgcctttatcgccctcggggcggtaaaacaagcaacactgcaaatggttgcgcccggtatcgcagaagcgttgattgcgactgcaattggtctgtttgccgctatcccggcagttatggcctacaaccgcctcaaccagcgcgtaaacaaactggaactgaattacgacaactttatggaagagtttaccgcgattctgcaccgccaggcgtttaccgttagcgagagcaataaggggtaa

SEQ ID NO: 460269 - DNA, 405 bp, Shigella boydii
gtgaatacaacgctgtttcgatggctggttcgcgtctactatgaagataccgatgccggtggtgtggtgtaccacgccagttacgtcgctttttatgaaagagcacgcacagagatgctgcgtcatcatcacttcagtcagcaggcgctgatggctgaacgcgttgcctttgtggtacgtaaaatgacggtggaatattacgcacctgcgcggctcgacgatatgctcgaaatacagactgaaataacatcaatgcgtggcacctctttggttttcacgcaacgtattgtcaacgccgagaatactttgctgaatgaagcagaggttctggttgtttgcgttgacccactcaaaatgaagcctcgtgcgcttcccaagtctattgtcgcggagtttaagcagtga

SEQ ID NO: 460270 - DNA, 294 bp, Shigella boydii
atgagtaagattatcgcgaccttgtatgcggtaatggacaagcgccccctgcgggcgctttccttcgtgatggcgcttctgttagcaggatgtatgttttgggacccatctcgttttgccgcgaagaccagtgaactggaaatctggcatggtttattgctgatgtgggccgtctgtgctggtgtgattcacggcgtgggctttcgtccgcagaaggttctttggcaagggattttttgcccattgcttgccgatattgttctcattatcgggctgattttcttcttcttttaa

SEQ ID NO: 460271 - DNA, 1140 bp, Shigella boydii
atgatcgattatgaagtattgcgttttatctggtggctgctggttggcgttctgctgattggttttgcagtcactgacggtttcgacatgggggtgggcatgctcacccgtttcctcggtcgtaacgacaccgagcgtcgaattatgattaactccattgcaccacactgggacggtaaccaggtttggctgatcaccgcgggcggcgcactctttgctgcctggccgatggtctatgccgctgcgttctccggcttctatgtggcgatgatcctcgtgctggcgtctttgttcttccgtccggtcggttttgactaccgctccaagattgaagaaacccgctggcgtaacatgtgggactggggcatcttcattggtagcttcgttccgccgctggtaattggtgttgcgttcggtaacctgttgcagggcgtaccgttcaacgttgatgaatatctgcgtctgtactacaccggtaacttcttccagttgcttaacccgttcggcctgctggcaggcgtggtgagcgtagggatgatcattactcagggcgcaacctatctgcaaatgcgtaccgtgggtgaactgcacctgcgtacccgtgcaacggctcaggtggctgcgctggtgacactggtctgtttcgcactggctggcgtatgggtgatgtacggtatcgatggttatgtcgtgaaatcgacaatggaccattacgcagcctctaacccactgaataaagaagtggttcgtgaagctggcgcatggctggttaacttcaacaacacgccaattctgtgggctattccggcactgggtgtggttctgccgctgctgaccatcctgactgcacgtatggataaagccgcgtgggcgtttgtgttctcctccctgacgctggcctgcatcatcctgacagccggtatcgcaatgttcccgtttgtgatgccgtccagcaccatgatgaacgcaagtctgacaatgtgggatgcaacttccagccagctgacgcttaacgtcatgacctgggttgctgtggttctggtaccgatcattctgctctacaccgcctggtgttactggaaaatgttcggtcgtatcaccaaagaagatattgaacgtaacacccactctctgtactaa

SEQ ID NO: 460272 - DNA, 1569 bp, Shigella boydii
atgttagatatagtcgaactgtcgcgcttacagtttgccttgaccgcgatgtaccacttcctttttgtgccactgacgctcggtatggcgttcctgctggccattatggaaacggtctacgtcctctccggcaaacagatttataaagatatgaccaagttctggggcaagttgtttggtatcaacttcgctctgggtgtggctaccggtctgaccatggagttccagttcgggactaactggtcttactattcccactatgtaggggatatcttcggtgcgccgctggcaatcgaaggtctgatggccttcttcctcgaatccacctttgtaggtctgttcttcttcggttgggatcgtctgggtaaagttcagcatatgtgtgtcacctggctggtggcgctcggttcaaacctgtccgcactgtggattctggttgcgaacggctggatgcaaaacccaatcgcgtccgatttcaactttgaaactatgcgtatggagatggtgagcttctccgagctggtgcttaacccggttgctcaggtgaaattcgttcacactgtagcgtctggttatgtgactggcgcgatgttcatcctcggtatcagcgcatggtatatgctgaaaggtcgtgacttcgccttcgctaaacgctcctttgctatcgctgccagcttcggtatggctgctgttctgtctgttattgttctgggtgatgaatccggctacgaaatgggcgacgtgcagaaaaccaaactggctgctattgaagccgagtgggaaacgcaacctgcgcctgctgcctttactctgttcggcattcctgatcaggaagaggagacgaacaaatttgcgattcagatcccttacgcactgggcatcattgcaacgcgttccgtggataccccggttatcggcctgaaagagctgatggtgcagcatgaagaacgcattcgtaacgggatgaaggcgtactctctgctcgaacaactgcgttctggttctaccgaccaggcggttcgtgaccagttcaatagcatgaagaaagacctcggttacggtctgctgctgaaacgctatacgccaaacgtggctgatgcgactgaagcgcagattcaacaggcaaccaaagactccattccgcgtgtagcgccgctgtacttcgcgttccgtattatggtggcgtgtggcttcctgctgctggcaatcatcgcgctctctttctggagtgtcatccgcaaccgcattggcgagaaaaaatggctgctgcgcgccgcgctgtacggtattccgctgccgtggattgctgtagaagcgggctggttcgtggctgaatatggccgccaaccgtgggctatcggtgaagtgctgccgacagctgtggcgaattcgtcactgaccgcaggcgatctcatcttctcaatggtgctgatttgcggcctgtataccctgttcctggtggcagaattgttcttaatgttcaaatttgcacgcctcggcccaagcagcctgaaaaccggtcgctatcactttgagcagtcttccacgactactcagccggcacgctaa

SEQ ID NO: 460273 - DNA, 1212 bp, Shigella boydii
atgtccggcagtgcttttgccgttacgcaccacgccttcagtagcggagcaggaaggacatctgatggaaatggaagccacgcaagcaccttaaaatcaccatcatacactaaatcagtaagttggcagcattacctgcaaattgaagaaagctctgatgatggtgatgaatatgactattcacccgcaaaagaagagtgggtaattaccgcagcgaacgcgaaaccgcaatgcgatattattcatgaagtctggcagagcagggctgttatccgctatgacatggcagtgccgctcaatttgtcagaacgcagcgcccggcaatccactggcagagtaggggtggtgttggttgtcactcttagtcataacagcaggcgtattgatgtggatatcaaccttgataaccaggctgacgatcatcgccttcgtgtcctggtccctacaccttttaacaccgacagtgttctggcagatacgcagtttggttcgctaacgcgccccgtgaacgacagtgcaatgaacaactggcagcaagaaggctggaaagaagcgccggttccggtatggaatatgctcaactatgttgccttacaggaagggcgtaacggcatggctgtctttagcgaagggttacgtgaatttgaagtcatcggtgaagagaagaaaacctttgccattacgttgctgcgtggcgtgggcttactgggcaaagaagatctgcttttaaggcctgggcggccttcgggaattaaaatgccagtcccggactcacaactacgtggtctgctttcttgtcgcctaagtttattgagttataccggtacgccaaccgccgctggtgtagctcagcaggcgcgagcatggctgactccagtacagtgttacaacaaaatcccatgggatgcgatgaagctcaacaaagccggattcaacgtgccggaaagttatagtttgttgaaaatgcccccagtgggatgcctgataagcgcacttaagaaagctgaagaccgacaagaagtgattttacggctgtttaatccggctgaatcagcaacctgtgatgcgactgttgctttcagtcgcgaggtgatttcttgctcagaaacgatgatggatgaacacattaccaccgaggaaaatcaaggttcaaatctatcggggccttttttacccggccagtcacggacgttcagttaccggcttgcctga

SEQ ID NO: 460274 - DNA, 1278 bp, Shigella boydii
atgctcgaattgctttacaccgcccttctctaccttattcagccgctgatctggatacggctctgggtgcgcggacgtaaggctccggcctatcgaaaacgctggggtgaacgttacggtttttaccgccatccgctaaaaccaggcggcattatgctgcactccgtctccgtcggtgaaactctggcggtgatcccgttggtgcgcgcgctgcgtcatcgttatcctgatttaccgattaccgttacaaccatgacgccaaccggttcggagcgcgtacaatcggctttcgggaaggatgttcagcacgtttatctgccgtatgacctgcccgatgcacttaatcgtttcctgaataaagtcgaccctaaactggtgttgattatggaaaccgaactatggcctaacctgattgcggcgctacataaacgtaaaattccgctggtgatcgcgaacgcgcgactctctgcccgctcggccgcaggttatgccaaactgggtaaattcgtccgtcgcttgctgcgtcgtattacgctgattgccgcccaaaatgaagaagatggtgcacgttttgtggcgctgggcgcaaaaaataaccaggtaaccgttaccggtagcctgaaattcgatatttctgtaacgccgcagttggctgctaaagccgtgacgctgcgccgccagtgggcaccacaccgcccggtatggattgccaccagcactcacgaaggtgaagagagtgtggtgatcgccgcacatcaggtattgttacagcaattcccgaatttattgctcatcctggtaccccgtcatccagaacgcttcccggatgcgattaaccttgtccgccaggctggactaagctatatcacacgctcttcaggggaagtcccctccaccagcacgcaggttgtggttggcgatacgatgggcgagttgatgttactgtacggcattgccgatctcgcctttgttggcggttcactggttgaacgtggtgggcataatccgctggaagctgccgcacacgctattccggtattgatggggccgcatacttttaattttaaagacatttgcgcgcggctggagcaggcaagcgggctgattaccgttaccgatgccactacgcttgcaaaagaggtttcctctttactcaccgacgccgattaccgtagtttctatggccgtcatgccgttgaagtactgtatcaaaaccagggcgcgctacagcgcctgcttcaactgctggaaccttacctgccaccgaaaacgcattga

SEQ ID NO: 460275 - DNA, 480 bp, Shigella boydii
atgcaaaaacgggcgatttatccgggtactttcgatcccattaccaatggtcatatcgatatcgtgacgcgcgccacgcaaatgttcgatcacgttattctggcgattgccgccagccccagtaaaaaaccgatgtttaccctggaagagcgtgtggcgctggcacagcaggcaaccgcgcatctggggaacgtggaagtagttgggtttagtgatttgatggcgaacttcgcccgtaatcaacacgctacggtgctgattcgtggcctgcgtgcggtggcggattttgaatatgaaatgcagctggcgcatatgaatcgccacttaatgccggaactggaaagtgtgtttctgatgccgtcgaaagagtggtcgtttatctcttcatcgttggtgaaagaggtggcgcgccatcagggcgatgtcacccatttcctgccggagaatgtccatcaggcgctgatggcgaagttagcgtag

SEQ ID NO: 460276 - DNA, 810 bp, Shigella boydii
atgcctgaattacccgaagttgaaaccagccgccgcggcatagaaccgcatctcgttggtgcaaccattcttcatgcagtggtgcgcaacggacgcttgcgctggccggtttcagaagagatctaccgtttaagcgaccaaccagtgcttagcgtgcagcggcgggctaaatatctgctgctggagctgcctgagggctggattatcattcatttagggatgtctggcagcctgcgcatccttccagaagaacttccccctgaaaagcatgaccatgtggatttggtgatgagcaacggcaaagtgctgcgctacaccgatccgcgccgctttggtgcctggctgtggaccaaagagctggaagggcataatgtgctggcccatcttggaccggagccgcttagcgacgatttcaatggtgagtatctgcatcagaagtgcgcgaagaaaaaaacggcgattaaaccgtggctgatggataacaagctggtggtaggggtagggaatatctatgccagcgaatcactgtttgcggcggggatccatccggatcggctggcgtcatcactgtcgctggcagagtgtgaattgttagctcgggtgattaaagcggtgttgctgcgttcgattgagcagggtggtacaacgctgaaagattttctgcaaagtgatggtaaaccgggctatttcgctcaggaattgcaggtttacgggcgaaaaggtgagccgtgtcgggtgtgcggtacgccgattgtggcgactaaacatgcgcagcgggcaacgttttattgtcggcagtgccagaagtaa

SEQ ID NO: 460277 - DNA, 168 bp, Shigella boydii; identical to SEQ ID NO: 1746

SEQ ID NO: 460278 - DNA, 237 bp, Shigella boydii; identical to SEQ ID NO: 1747

SEQ ID NO: 460279 - DNA, 669 bp, Shigella boydii
gtgaaaaacaattcacagctgttgatgccgcgcgaaaaaatgctgaagtttggtattagcgccttaacggatgtcgagctgctggcgctatttctgcgtaccggaacgcgcggtaaagatgtattaaccctggcaaaagagatgctggagaatttcggctctctttatggcttgttaacctctgaatatgaacaatttagtggcgttcatggaattggcgtggcgaaatttgcccagttaaaggggattgctgaactggcgcggcgttactacaacgtgcggatgcgtgaagaaagccctttactcagcccggagatgacgcgggaatttttacaaagccagcttacgggtgaggagcgggagatctttatggtgatctttctcgactcacaacaccgggttataacgcatagccgtcttttttccggcacgctaaaccatgttgaagtccatcctcgggaaattatccgcgaagcgataaaaataaacgcctcggcgctgatccttgcacataatcacccttcgggttgtgctgaacccagtaaagcggataaactcattactgaacggataataaagagttgtcagttcatggatttacgcgtgctcgaccatatcgtgattgggcgtggagagaatgtttcttttgccgaacgcggctggatttaa

SEQ ID NO: 460280 - DNA, 1221 bp, Shigella boydii
atgagcctggccggtaaaaaaatcgttctcggcgttagcggcggtattgctgcctataaaacccctgaactggtgcgtcgtttgcgcgatcgcggggccgacgtccgcgtagccatgaccgaagcggcaaaagcctttatcaccccacttagcttgcaggcggtttctggttatcccgtttccgacagtttgctggacccggcagccgaagccgctatgggccatattgagctgggtaaatgggctgatttagtgattctcgcccctgccacggcagatttgattgcccgtgttgctgccggaatggcgaatgacctggtatcgacgatttgtctggctacacctgcgcctgtagccgtgctccccaccatgaaccagcagatgtaccgtgccgctgccacgcagcataatttagaggggcttgcttcccgtggtttgctcatctgggggccagacagtggcagtcaggcttgtggtgatatcggtcctgggcgaatgctcgatccgttaaccattgtggatatggcggtggcgcatttttcgcccgtcaacgacctgaaacatctgaacattatgattaccgccggtccgacgcgtgaaccgctcgatcccgtgcgttatatctctaatcacagctccggcaagatgggttttgctatcgccgccgccgctgcccgtcgtggcgcgaacgtcacgctggtatcaggtccggtttcactaccgacgccaccgtttgttaaacgtgttgatgtgatgaccgcgctggaaatggaagccgccgtgaatgcttctgtacagcagcaaaatatttttatcggctgcgccgccgtggcggattatcgcgcagctaccgtggccccagaaaaaatcaaaaagcaggccacgcagggtgatgaattaacaataaaaatggttaaaaaccccgatatcgtcgcaggcgttgccgcactaaaagaccatcgaccctacgtcgttggatttgccgccgaaacaaataatgtggaagaatacgcccggcaaaaacgtatctgtaaaaaccttgatctgatctgcgcgaacgatgtttcccagccaactcaaggatttaacagcgacaacaacgcattacaccttttctggcaggacggagataaagtcttaccgcttgagcgcaaagagctccttggccaactattactcgacgagatcgtgacccgttatgatgaaaaaaatcgacgttaa

SEQ ID NO: 460281 - DNA, 459 bp, Shigella boydii
atgatgaaaaaaatcgacgttaagattctggacccgcgcgttgggaaggaatttccgctcccgacttatgccacctctggctctgccggacttgacctgcgtgcctgtctcgacgacgccgtagaactggctccgggtgacactacgctggttccgaccgggctggcgattcatattgccgatccttcactggcggcaatgatgctgccgcgctccggattgggacataagcacggtatcgtgcttggtaacctggtaggattgatcgattccgactatcagggccagttgatgatttccgtgtggaaccgtggtcaggacagcttcaccattcaacctggcgaacgcatcgcccagatgatttttgttccggtagtacaggctgaatttaatctggtggaagatttcgacgccaccgaccgcggtgaaggcggctttggtcactctggtcgtcagtaa

SEQ ID NO: 460282 - DNA, 597 bp, Shigella boydii
atggcagaaaaacaaactgcgaaaaggaaccgtcgcgaggaaatacttcagtctctggcgctgatgctggaatccagcgatggaagccaacgtatcacgacggcaaaactggccgcctctgtcggcgtttccgaagcggcactgtatcgccacttccccagtaagacccgcatgttcgatagcctgattgagtttatcgaagatagcctgattactcgcatcaacctgattctgaaagatgagaaagacaccacagcgcgcctgcgtctgattgtgttgctgcttctcggttttggtgagcgtaatcctggcctgacccgcatcctcactggtcatgcgctaatgtttgaacaggatcgcctgcaagggcgcatcaaccagctgttcgagcgtattgaagcgcagctgcgtcaggtattgcgtgaaaagagaatgcgtgagggtgaaggttacaccaccgatgaaaccctgctggcaagccagatcctggccttctgtgaaggtatgctgtcacgttttgtccgcagcgaatttaaataccgcccgacggatgattttgacgcccgctggccgctaattgcggcacagttgcagtaa

SEQ ID NO: 460283 - DNA, 642 bp, Shigella boydii
atgaaaccatatcagcgccagtttattgaatttgcgcttggcaagcaggtgttaaagtttggcgagtttacgttgaagtccgggcgcaaaagcccctatttcttcaacgccgggctgtttaataccgggcgcgatctggcactgttaggccgtttttacgctgaagcgttggtggattccggccttgagttcgatctgctgtttggccctgcttacaaagggatcccgattgccaccactaccgccgtggcgctggcggagcatcatgaccttgacctgccgtactgctttaaccgcaaagaggcaaaagaccacggtgaaggcggcaatctggttggtagcgcgttacaaggacgcgtaatgctggtagatgatgtgatcaccgccggaacggcgattcgcgaatcgatggagattattcaggctaatggcgcgacgcttgctggcgtgttgatttcgcttgatcgtcaggaacgggggcgcggcgagatttcggcgattcaggaagttgagcgtgattacaactgcaaagtgatctctatcatcaccctgaaagacctgattgcttacctggaagagaagccggaaatggcggaacatctggcggcggttaaggcctatcgcgaagagtttggcgtttaa

SEQ ID NO: 460284 - DNA, 717 bp, Shigella boydii
atgcgtccagcaggccgtagcaataatcaggtgcgtcccgttaccctgactcgtaactatacaaaacatgcagaaggctcggtgctggtcgaatttggcgataccaaagtgttgtgtaccgcctctattgaagaaggcgtgccgcgcttcctgaaaggtcagggccagggctggatcaccgcagagtacggcatgctgccacgttctacccacacccgtaacgctcgtgaagcggcgaaaggtaagcagggtggacgcacaatggaaatccagcgtctgatcgcccgtgctcttcgcgcggcagtagatttgaaagcgctgggtgagttcaccattacgctggactgcgacgtgcttcaggctgatggtggcacgcgtaccgcgtcgattacgggtgcctgcgtggcgctggcagatgcgctacagaagctggtggaaaacggcaagctgaaaaccaacccgatgaaagggatggtagccgcagtttctgtcggaattgtgaacggcgaagcggtttgcgatctggaatacgttgaagactctgccgcagagaccgacatgaacgtagtgatgaccgaagacgggcgcatcattgaagtgcaggggacggcagaaggcgagccgttcacccatgaagagctactcaccttgttggctctggcccgagggggaatcgaatccattgtagcgacgcagaaggcggcgctggcaaactga

SEQ ID NO: 460285 - DNA, 864 bp, Shigella boydii
atgatccgcagtatgaccgcctacgcccggcgtgaaatcaagggtgaatgggggagcgcaacctgggaaatgcgctcggtaaaccagcgttatctggaaacttactttcgtctgccggagcagttccgtagccttgaacctgtcgttcgcgagcgtattcgttctcgcctgacgcgcggtaaagtggaatgtaccctgcgctatgagccagatattagcgcgcaaggtgagctgatcctcaacgaaaaactggctaaacagctggtaactgccgcgaactgggtaaaaatgcagagtgacgaaggggaaatcaacccggttgatattctacgctggccgggcgtgatggcagcccaggagcaggatcttgacgccattgccgctgaaattctcgcggcgctggatggtacgctggacgactttattgtcgcgcgcgaaaccgaaggtcaggcactgaaagcattgatcgagcagcgtctggaaggcgtcaccgccgaagtggtcaaagtccgcgcccatatgccggaaatcctgcaatggcagcgtgagcgtctggtcgcgaagctggaagatgctcaggttcagttggaaaacaaccgtctggagcaggagctggttctgctggcacaacgaattgacgttgccgaagaactggaccgcctggaagcgcatgtcaaagagacctacaacattctgaagaaaaaagaagccgttggtcgtcgtctggactttatgatgcaggaattcaaccgcgagtcgaacactcttgcgtcgaagtctatcaatgccgaagtgacaaactccgcgattgagctgaaagtgttgattgagcagatgcgcgagcagattcagaatatcgagtaa

SEQ ID NO: 460286 - DNA, 1320 bp, Shigella boydii
atgaggtttgggtacattgctttgggtacaccccctattcaaagtttggatattcgcaaaatgccaaaactaacagacatgcagatccgcgcatggattaagagcggagagcgattcgaggggcgggcagacggtaacggtttatacctacgttaccgtgaagccgacaaaacccccacatggagattccgctataaactcgcagggaagtcccgcgccatgctaattggttcgtatagcgagctatcactatcaaaggccagagagacagccaaagagctatcggctcgcgttgcgctgggctatgacgttgcaggagagaagcagaagcacaaaaccgaagcactggcgaagatggaagcagagaagaacgctatgcgcgtttcagagcttgccgctgaatactttgagcgtcagatcctcccgcgctggaagcaccccgatatactccgccgccgtatcgacaaagatataaacccctgcattggcagcatgaaggtagaggacgtgaaaccgcgccatatcgatgacatgctgaaaggtattgttgaccgtggagcgccgaccatagcaacggacgtgctgagatggacgcgccgcatattcgactacggaatcaaacggcacgcgctagagattaacccctgttcagcctttgaggtggcagacgccggagggaaagaagctgcccgtgaccgctggttaacccgcgatgagttaatccagctattcaaagccatgcgcacggctaagggattcagtcgccagaacgaaatcacgttcaaattactgttagcgttatgcgtccgcaaaatggaattatgcgccgcacgatgggaagagtttgatttagatggtgcggtatggcatttgccggaagaacgcagcaaaaacggagaccctattgatatacctctaccttccccagccgttgaatggttgagagagctacacaccttttcatgtaatagcgcatgggtgcttccggccaggaagatgcaaaacagaatgatcccacatattcaggaaagcactttacccgtagcactggctaaggttcgcgccgaaatgccggatgtgcctaatttcacgattcacgactttcgacgcaccgcacgtactcatttagcagcgttgggtgttgatcctgttgtggcggaacgatgcctcaatcatcgcattaagggcgtagaggggatttataaccgccatcagtattttgatgagcgtaaagcagcactggcacagtgggctgatctgctagtggcactggaaagcggaaaagactacaacgtaacgcctctcagaagggcgaactaa

SEQ ID NO: 460287 - DNA, 300 bp, Shigella boydii
atgaaaaaattaccacccgccccttttttcaggcttaacagagcagccgaattattagaaatagatattgatgatcttttgattatggcggcggcagaatctatatatttgagcgcgtacctttgcggctacgacggcacattacatagcatcgcgagtctttaccgcaattgctctttattcccagacgtcaaagaagactgcttattacttgccgacataatcactgaagtagaggacgaaaaaagctttaaggcaggcgttgtaaatcatatagattgccatgtgcttgggcggtaa

SEQ ID NO: 460288 - DNA, 495 bp, Shigella boydii
ttggagtcattacccgttggaggttatccgggaaatgatgataaaggtcgtgagctgcaacagcaggttgatccaaccaaactgatgaatgatttctttgccgcaattgagtttatgcaacgctatccgcaagcgacaggcaaagtgggtattaccggattttgctatggcggtggcgtatcgaacgcggcggctgtcgcgtatccggaactggcctgcgcggtgccgttttatggtcgtcaggcacccactgccgatgtggcgaagattgaagcgcctttactactccacttcgcggaactggacacccgaatcaacgagggctggcccgcttatgaggcggcgttgaaagccaataataaggtctatgaggcgtatatctatccgggggttaatcacggattccataatgattccacgcctcgttatgacaaatctgccgccgatcttgcctggcaaaggacgctgaaatggttcgataaatatctctcctga

SEQ ID NO: 460289 - DNA, 288 bp, Shigella boydii
atgaataaccattttggtaaaggcttaatggcgggattaaaagcaacgcatgccgacagtgcggttaatgtgacaaaattctgtgccgattataaacgcggttttgtattaggctactcacaccggatgtacgaaaagaccggagatcgccagcttagcgcctgggaagcgggtattctgacgcgccgctatggactggataaagagatggtaatggatttctttcgtgagaataattcctgttctacgttgcgcttttttatggccggttatcgcctcgaaaattga

SEQ ID NO: 460290 - DNA, 1119 bp, Shigella boydii
atgactggagataacaccctcatccattctcacggcattaaccgtcgtgatttcatgaagctttgtgcagcattagccgccaccatggggttaagtagcaaagccgctgcagagatggccgaatcggttactaacccgcagcgtccgccagttatctggattggcgcgcaggagtgcaccggttgtacggaatctctgcttcgtgcaacgcatccaacggtagaaaacctcgtgctggagactatctctctggagtatcacgaagtgctttccgccgccttcggtcatcaggtcgaagagaacaaacataacgcacttgagaagtacaaagggcagtatgtgttggttgtggatggttccatcccattaaaagataacggtatttattgcatggttgctggtgagccgattgtggatcacatccgcaaagcggcagaaggcgcagccgcgattatcgctatcggttcctgctctgcgtggggcggtgttgccgcagctggagttaacccaactggcgcagtcagcctgcaagaagttctgccaggcaaaaccgttatcaatattccgggctgcccgccgaacccgcacaacttcctcgcgaccgttgcgcacatcatcacttacggcaaaccgccgaaactggatgacaaaaatcgtccgaccttcgcctatggccgtctgattcacgaacactgcgaacgtcgcccgcacttcgatgctggtcgttttgccaaagagttcggtgatgaaggccaccgtgaaggctggtgcctgtaccacctcggctgtaaagggccagaaacttacggcaactgctcaacgctgcaattctgcgatgttggcggcgtgtggccggtagcgattggtcacccatgctatggctgtaacgaagaaggtatcggcttccataaaggcatccatcagcttgccaacgtcgaaaatcagactccgcgttcacagaaaccggatgttaacgctaaagagggcggcaacgtctctgcaggcgctattggtttgctcggcggtgtggttgggctggttgccggtgtcagcgtgatggcggtgcgtgaactgggtcgtcagcaaaagaaagataacgctgactcacggggagaataa

SEQ ID NO: 460291 - DNA, 987 bp, Shigella boydii
gtgaacagacgtaattttattaaagcagcctcctgcggggcattgctgacgggcgcgctgccgtctgtcagtcatgcggctgctgaaaaccacccgccaattccgggatcgctggggatgttgtacgactcgaccttgtgcgtaggctgccaggcttgcgtcaccaagtgtcaggatatcaacttccctgaacgtaacccgcaaggggaacagacctggtcgaacaacgacaaactgtcgccgtataccaataacatcattcaggtgtggaccagcggcacaggggtcaacaaagaccaggaggagaacggctacgcgtacattaagaaacagtgtatgcactgcgtcgatccgaactgtgtctctgtgtgcccggtctctgcactgaaaaaagatccgaaaaccggcattgtccattacgacaaagacgtgtgcaccggttgccgttactgcatggtcgcctgtccgtacaacgtgccgaagtacgactacaacaacccgtttggtgcgctgcataagtgcgagctgtgcaaccagaaaggtgtggaacgtctcgataaaggcggtctgcctggctgcgtagaagtgtgcccggcgggcgcggtgattttcggtacgcgtgaagagctgatggcggaggcgaaaaaacgtctggcgctgaagcctggcagcgaataccactatccgcgtcagacgctgaaatctggcgacacttacctgcatacggtgccgaaatattatccgcatctgtacggcgagaaagagggcggcggtactcaggttctggtactgacgggtgtgccttatgaaaatctcgacctgccgaaactggacgatctttctaccggtgcgcgttccgaaaatattcaacacaccctgtataaaggcatgatgctaccactggctgtgctggcgggcttaaccgtgctggttcgtcgcaacaccaaaaacgaccatcacgacggaggagacgatcatgagtcatga

SEQ ID NO: 460292 - DNA, 1179 bp, Shigella boydii
atgagtcatgatccacaaccgctgggcggcaaaatcatcagtaaaccggtcatgatttttggaccgttaatcgtcatctgtatgctcctgattgtgaagcgtctggtgttcggtctgggctctgtctctgacctgaacggcggcttcccgtggggcgtgtggatcgcgtttgacctgctgattggtaccggctttgcctgtggcggctgggcgctggcgtgggcggtatacgtctttaaccgtgggcaataccatccgctggtgcgtccggcgctgttggcgagtctgtttggttactcactgggtggcttgtcgatcactatcgacgtgggtcgctactggaacctgccgtacttctacattccgggtcacttcaacgtgaactcggtactgttcgagacggcggtctgtatgaccatctatatcggcgtgatggcactggagtttgctccggcactgtttgaacgtctgggctggaaggtttctctcaagcgtctgaacaaggtgatgttcttcatcattgcacttggcgcgctgttgccgaccatgcaccagtcttcaatggggtcactgatgatctcggcgggctacaaggtgcatccgttgtggcagagctatgaaatgttgccgctgttctcgctgctgacggcgttcatcatgggcttctcgattgtcatctttgaaggttcgctggtgcaggcgggtctgcgtggcaacggtccggatgaaaagagtctgttcgtcaagctgaccaacaccatcagtgtgttgctggcgattttcatcgtgctgcgctttggcgagcttatctatcgcgacaagctgtcgttagcgtttgccggtgacttctactccgtgatgttctggattgaagtcctgctgatgctcttcccgctggtcgttctgcgtgtggcgaagctgcgtaatgattcccgcatgctgttcctgtcagcactgagcgcactgttaggttgtgcaacctggcgtctgacctattcgctggtggcattcaacccgggcggcggttacgcctacttcccgacctgggaagaactgttgatttctattggttttgtggctattgagatttgcgcttacatcgtactcattcgtctactgccgatacttcctcctttaaaacaaaacgatcataatcgtcatgaggcgagcaaagcatga

SEQ ID NO: 460293 - DNA, 1704 bp, Shigella boydii
atgagccagagaattactattgatccggtaacccgtattgaggggcatttacgcatcgattgcgaaatcgaaaatggcgtcgtttcgaaagcatgggcttccggtaccatgtggcgcggcatggaagagatcgtgaaaaaccgcgatccgcgcgatgcatggatgattgtgcaacgtatctgtggcgtatgtactaccactcacgcgctgtcttccgttcgtgcggcagaaagtgcgctgaatatcgacgttccggttaacgcgcaatacatccgtaacatcattctggctgcgcacaccacgcatgaccatatcgttcatttctatcagctttcggcgctggactgggtggacatcacttctgcactgcaagctgacccaaccaaagcctccgaaatgctgaaaggcgtttcgacctggcatctgaacagtccggaagagttcactaaagttcagaacaagatcaaagatctggttgccagcggtcagttgggtattttcgccaatggctactggggtcacccggcgatgaaactgccgccggaagtgaacctgattgcggtagcgcactacctgcaggcgctggagtgccagcgtgacgctaaccgcgtcgtggcgctgctgggcggtaaaacgccgcacattcagaacctggcggtaggtggtgtcgcgaacccgatcaacctcgacggtttgggcgtgctgaaccttgagcgcctgatgtacatcaagtctttcatcgacaagctgagcgactttgttgaacaggtttataaggttgataccgcagttattgccgcgttctacccggaatggctgacgcgcggtaaaggtgcggtgaactacctgagcgtgccggaattcccgaccgacagtaaaaacggcagcttcctgttcccgggcggctacattgagaatgcggatctgtcctcgtatcgtccgatcacttctcattccgatgaatacctgatcaaaggcattcaggaaagcgcgaagcactcctggtataaagacgaagcgccgcaggcaccgtgggaaggtaccaccattccggcttatgatggttggtctgacgacgggaaatattcctgggtgaaatcaccgactttctacggcaaaacggtagaagtgggtccgctggctaatatgctggtgaaactggcggcaggtcgcgaatctacccagaacaaactgaatgaaatcgttgcgatttatcagaaactgactggcaacacgctggaagtggcgcagctgcactccacgctgggccgtattattggtcgtaccgttcactgctgcgaattgcaggatatcctgcaaaatcaatacagtgcactgatcaccaatatcggcaaaggcgatcacaccacctttgtgaaaccgaacattccggcaacgggtgagttcaaaggtgttggcttcctcgaagcgccgcgcggtatgctctctcactggatggttattaaagacggtattatcagtaactaccaggcagttgttccatcaacctggaactctggtccgcgtaacttcaatgatgacgtcggtccttacgagcagtcgctggtgggtacaccggttgctgatccgaataaaccgctggaagtggtgcgtaccattcactccttcgacccgtgcatggcctgtgcggtacacgtagtggatgccgacggcaacgaagtggtttcagtgaaggttctgtaa

SEQ ID NO: 460294 - DNA, 495 bp, Shigella boydii
atgcgtattttagtcttaggggtcggcaatattttgctgaccgatgaagccatcggtgtgcggattgtcgaagcgttagagcaacgatacattctgccggattatgttgagatcctcgatggcggcacggcgggaatggagctgcttggcgacatggcaaatcgcgatcatctgattattgcggatgccattgtgtcgaaaaagaacacgccgggaacgatgatgatcctgcgggatgaagaagttccggcgttgtttaccaacaaaatctctccgcatcagcttggcctggccgacgtattgtcggccctgcgcttcaccggtgagtttccgaaaaagctgaccctggtcggcgtgatcccggaatcgctggagccacacatcggcttaacgccgacggttgaagcaatgattgaacctgcgcttgagcaggttctggctgcgctgcgcgaatcaggcgtggaagccatcccacgggaggcgattcatgactga

SEQ ID NO: 460295 - DNA, 489 bp, Shigella boydii
atgactgaagagatagcaggtttccagacctccccgaaggcgcaagtacaggcagcgtttgaagaaattgcccggcgttcgatgcacgatctctcttttctgcatccttcaatgccggtgtatgtttctgattttacgctgttcgaaggtcagtggacggggtgtgtgatcaccccgtggatgctgagtgcagttatcttccccggcccggatcaactctggccgctgcgcaaagtgagtgaaaaaattggtctgcaactgccgtatggcaccatgacctttaccgttggcgaactggacggtgtttcgcaatacctctcctgttcgctgatgtcaccgctttcgcacagtatgtcgattgaagagggccaacgcctgacggatgactgcgcacgaatgatcctttcgctgccagtcacgaatccggatgtaccacacgcagggcgtcgcgccctgctgtttggtcgcaggagtggcgaaaatgcatga

SEQ ID NO: 460296 - DNA, 342 bp, Shigella boydii
atgcatgagttgtcgctttgccagagcgccgttgaaattatccaacggcaggcggagcagcacgatgttaagcgcgtcaccgccgtgtggctggaaattggcgcgctctcctgcgttgaggagagcgccgtccgttttagttttgaaattgtctgccacggaacggtggcgcaagggtgcgatttacatatcgtctataaacccgcccaggcctggtgctgggattgcagccaggtggtggagattcatcagcacgatgcgcagtgtccgctctgtcacggcgagcggttgcgtgtcgataccggcgattcgctgatcgtcaaaagtattgaagttgaataa

SEQ ID NO: 460297 - DNA, 249 bp, Shigella boydii
atgtgtattggcgttccaggccaggtgctggctgtcggtgaagatattcaccagcttgcgcaggttgaagtatgtggtatcaagcgcgacgtgaatatcgccctgatttgtgaaggtaacccagccgatctactgggccagtgggtgctggtacacgtcggatttgccatgagcatcatcgacgaagatgaagccaaagccacattagacgcactgcgccaaatggattacgacattaccagcgcgtga

SEQ ID NO: 460298 - DNA, 867 bp, Shigella boydii
atgacagacaatacttatcagcccgcgaaagtctggacgtgggataaatccgctggcggcgcgttcgccaatatcaatcgcccggtttctggtccgacgcatgaaaaaacgctgcccgttggcaaacacccattgcaactttattcgctgggaacgccgaacggtcagaaagtaacgattatgcttgaggagctgctggcgctgggcgttactggtgcagagtacgacgcctggctgattcgtattggcgatggcgatcaattctccagcggctttgtcgaagtgaacccaaactcgaagatcccggcgctgcgcgatcatacgcataatccgccgatccgtgtgtttgaatctggttcgatcctgctttatctggcggagaaatttggctacttcctgccgcaggatttggcaaagcgtactgaaacgatgaactggctgttctggttacagggcgcggcaccgttcctcggcggtggttttggtcacttttaccattacgcaccggtaaagattgagtacgccatcaaccgctttaccatggaagccaaacgtctgctcgacgtgctggataagcaactggcgcagcataagtttgttgcgggcgatgagtacaccattgcggatatggcgatttggccgtggtttggcaacgtggtgttaggtggtgtgtatgatgccgctgagtttcttgatgcgggcagttataagcatgtacaacgctgggcgaaagaagtaggggaacgtccggcggtgaaacgtgggcgtattgttaaccgcaccaacggaccgctgaatgagcagttgcatgagcgccatgacgccagtgatttcgagacgaatacggaagataagcgtcaggggtaa

SEQ ID NO: 460299 - DNA, 1860 bp, Shigella boydii
atgagcaaaggaacgaccagccaggatgccccgttcgggacattattgggctacgccccaggtggggtagcaatctactcttcagattacagttctctcgatccgcaggaatacgaagatgacgccgtattccgtagctatatcgacgacgaatatatgggccacaagtggcaatgcgttgaatttgctcgccgttttctctttctgaattacggtgtggtctttactgacgtgggtatggcgtgggagattttctcgctgcgcttcctgcgagaagtggttaatgacaacatcctgccattgcaggcatttcctaacggctcgccgcgtgcgccggtcgcgggtgcgcttcttatctgggataaaggcggtgaatttaaagacactggccatgtcgccatcattacccaattgcatggcaacaaagtccgtattgcggaacagaacgtgattcattccccgttgccgcaagggcaacagtggacgcgtgagctggagatggtggtcgaaaacggctgctataccctgaaagacacttttgatgacaccaccattctgggctggatgatccagacggaagatactgaatacagcttaccgcagccggaaattgcaggcgagctgctgaaaatcagcggagcgcgcctggaaaacaaaggccagtttgacggtaaatggctggatgaaaaagatccgctgcaaaacgcctatgtgcaggccaacggtcaggtgatcaatcaggatccttatcattactacaccattaccgagagtgccgagcaggagctaattaaagccaccaacgagctgcacctgatgtatcttcacgcaaccgacaaggtactgaaagatgacaacctgctggcgctgttcgacatcccgaaaatcctctggccacgtttgcgtctctcctggcagcgtcgccgtcaccatatgatcactggtcgtatggatttctgcatggatgagcgtggcctgaaggtttacgagtacaacgccgactccgcctcctgtcataccgaagcgggcttgatcctcgaacgttgggcggagcagggctataaaggcaacggcttcaatccggcggaagggctgattaacgaattggctggtgcctggaaacacagtcgtgcacgtccgtttgtccatatcatgcaggacaaagatatcgaggaaaactatcacgcgcagtttatggagcaggcgctgcaccaggcgggctttgaaacgcgtatcttgcgtggattggatgaactgggctgggatgctgccgggcaactgattgatggggaagggcgactggttaactgcgtgtggaaaacctgggcgtgggaaaccgcgtttgaccagattcgtgaagttagcgaccgtgagtttgctgcggtgccaatccgtaccggtcatccgcaaaacgaagtgcgtcttatcgacgtattgctgcgcccggaagtgctagtctttgagccgctgtggacggtgatccccggcaacaaagcgattctgccgatcctctggtcgctgttcccgcaccatcgttacctgctggataccgatttcactgttaatgatgaattggtgaaaacaggttacgcagtgaaaccgattgccggtcgctgtggtagcaatatcgacctggtcagccatcatgaagaggtgctggacaaaaccagcggtaaatttgccgagcagaaaaacatctatcagcaactgtggtgtttgccgaaagtggacggtaaatacattcaggtatgtaccttcaccgtgggcggcaactacggtgggacgtgtttgcgcggtgatgaatcactggtcatcaaaaaagagagtgatattgaaccgttaattgtggtgaaaaagtaa

SEQ ID NO: 460300 - DNA, 342 bp, Shigella boydii
atggccactatctcttcaacttcaattccttccatacaaacacagagtagtaacagggcatcacaaggtagcgatgttgcttcacaaatcgcgcggataagtcagcaaatcatcaaactcactcaacaaattaaagagattgtagacactagcggcagtgctgaagacaagcaaaaacaggccgaattgattcaacagcaaatcaccctactggaaacacaactggcgcagttgcagaaacagcaggcagaaaaggcgcaggagaaagagcagcgtttgtctctgaatgtatcccttctaaatcctgttgaaaaaacgactcatatcgatatctatatctga

SEQ ID NO: 460301 - DNA, 927 bp, Shigella boydii
atgaattattctttaaaacaattaaaggttttcgtcacagtagcgcaggagaaaagttttagtcgtgcaggagagcgtatcggcttgagccagtcggcagtaagtcacagtgtgaaggagctggaaaatcatactggtgttcgcctgctggacagaaccacgcgtgaagtggtgcttacagatgcagggcagcagttggctttgcgtcttgagcgactgctggatgaacttaacagcacgttgcgcgataccgggcgtatggggcaacaactgagcggaaaagttcgggtcgctgccagccagaccatttccgcgcatcttattccgcaatgcattgctgaaagccatcgccgctatccagatattcagtttgtcctgcacgatcgtccgcagcagtgggtgatggaaagtattcgccagggagatgtcgactttggcatcgtcatcgatccaggcccagtgggcgatctgcaatgtgaagcgattctttccgagcctttctttctgctttgccatcgcgatagcgctttggccgtggaagattatgtaccctggcaggcattacagggagcgaaattggtgttgcaggattacgcgtcaggcagccgaccgctgattgacgcagcgctggcgcgcaatggtattcaggcgaatattgtgcaggagattggacatccggcgacgctgttcccgatggtagccgcaggcatcggcatcagtattcttcccgcactggcgctaccattgcctgaaggtagcccactggtggtaaagcgcattacgccggttgttgaacgccagttgatgctggtgcgcaggaagaaccgttcactttccaccgccgctgaagcgttatgggacgtggtacgagaccagggcaatgcgctaatggctggtcgggaaggggatccgttgtatcagatatag

SEQ ID NO: 460302 - DNA, 999 bp, Shigella boydii
atgaaactttttcgtatcctcgatcctttcaccttaaccctgatcacggtggtgttgctggcctctttctttccggccagaggcgatttcgtccccttctttgaaaatctgaccaccgcagctattgccctgctgttctttatgcacggcgcgaagttgtcgcgtgaggcgattattgctggcggtggtcactggcgactgcatttgtgggtaatgtgcagcaccttcgtgctgtttccgattctgggtgtactgtttgcctggtggaaaccggtaaatgtcgacccgatgctctactccggttttctctacttgtgcactctcccggctaccgtgcagtctgcaatcgccttcacgtcaatggcgggcggtaacgtcgcggcggcggtttgttctgcgtcagcatccagcctgctggggattttcctttcaccattgctggttggtctggtgatgaatgttcacggtgcagggggcagccttgagcaggtcggtaaaattatgctgcaactgctgctgccgtttgtgttggggcatctttcccggccgtggattggtgactgggtgtcgcgcaataaaaaatggattgcgaaaactgaccagacgtccattctgttggtggtttatacagcgttcagcgaagccgtcgttaatggtatctggcataaagttggctggggatcattgctgtttatcgtggtggtcagctgcgttcttctggctatcgtgattgtagttaacgtctttatggcacgccgactgggcttcaataaggcagatgaaattactatcgtcttttgtggttcgaaaaagagtctggcaaatggcatcccgatggcaaacattctgttccccacatcggtgatcggtatgatggtgctgcccctgatgattttccatcagatccaattgatggtctgtgcggtgctggcgcgtcgatacaaacgccagaccgaacagttacaggcgcagcaggaaagcagcgccgataaagcttaa

SEQ ID NO: 460303 - DNA, 219 bp, Shigella boydii
atggaaaaagagcagctgattgaaatagccaatacgataatgccgtttggcaaatacaaagggcgtcgcttaatcgacctgccggaggagtatctgctgtggtttgcccgcaaagatgagttcccggcagggaagctcggtgagctaatgcaaatcacgctgctgattaaaaccgaggggctgacgcaactggtccagcccctgaagcgtccgctttaa

SEQ ID NO: 460304 - DNA, 2016 bp, Shigella boydii
atggaatcaatcgaacaacaactgacagaactgcgaatgacgcttcgccatcatgaatctctttatcatgtgatggatgcgccggaaattcccgacgctgaatacgacaggctgatgcgcgaactgcgcgagctggaaactaaacatccagaactgattacgcctgattcgcctacccaacgtgtaggtgctgcgccgctggcggctttcagccagatacgccatgaagtaccaatgctgtcactggataacgtttttgatgaagaaagctttcttgctttcaacaaacgtgtgcaggaccgtctgaaaaacaacgagaaagtcacctggtgctgtgagctgaagctggatggccttgccgtcagtattctgtatgaaaatggcgttttagtcagtgccgcgacccgtggcgatggcaccaccggggaagatatcacgtctaatgtgcgtactattcgcgccattccgctgaagctgcatggagagaatatcccggcgcgtctggaagtgcgtggtgaagtgttcctgccgcaggcggggttcgaaaagattaacgaagatgcgcgacgcacgggcgggaaagtttttgctaacccacgtaatgcggcagctggttcactgcgtcagcttgatccgcgtattacagcgaagcgaccgctcacttttttctgctatggcgttggtgttctggaaggtggcgagctgccggatactcatcttggccgtttactgcaatttaaaaagtgggggttgccggtcagcgatcgggtaacgctttgtgaatcggcggaagaagtgctggcgttctatcacaaagtggaagaagaccgcccgacgctgggctttgatatcgacggcgtggtgattaaggtcaactcactggaacagcaggagcagcttggctttgttgcgcgtgccccgcgctgggcggtagcgtttaaattcccggcgcaggagcagatgacctttgtgcgtgacgtcgagtttcaggttgggcgtactggcgcgattacgcctgttgcgcgtctggaacctgtccatgttgctggcgtgctggtgagtaacgcaaccttacacaatgcggatgaaatcgaacgtcttggtttacgcattggcgataaagtggtgattcgccgcgctggcgacgtgatcccgcaggtggttaacgtcgtgctttctgaacgcccggaagatacccgtgaggttgtattcccgacgcattgtccggtatgtggttctgacgttgagcgtgtggaaggtgaagcggttgcccgctgtaccggtggcctgatttgcggtgcgcagcgtaaagagtcgctgaaacactttgtttcccgccgtgcgatggatgttgacggaatgggcgacaaaatcatcgatcagctggttgaaaaagaatatgtccacactccggcagatctgttcaaactcaccgcaggcaaactgaccggactggagcgtatggggccaaaatcggcacaaaacgtggttaacgcgctggaaaaagcgaaagaaaccacctttgctcgcttcctctatgcacttggcatccgtgaagtcggcgaggccaccgcagcaggtctggcggcatatttcggcacgctggaagcgctggaagccgcttcgattgaagagctgcaaaaggtgcctgatgttggcattgtcgttgcatcccacgttcacaacttctttgccgaagaaagcaaccgcaatgtcatcagcgagctgttggcggaaggtgttcactggcctgcgccgatcgttatcaacgcggaagagattgacagcccgtttgctggtaaaaccgtggtgcttacgggcagcttaagccagatgtcgcgtgatgacgctaaagctcgactggtcgaactgggcgcgaaagtcgcgggcagcgtgtcgaagaaaaccgatctggtgattgcgggtgaagctgcaggatctaaactggcgaaggcgcaggaactgggcattgaagtcatcgacgaagcggaaatgctgcgtttgctgggtagctga

SEQ ID NO: 460305 - DNA, 987 bp, Shigella boydii
atgatgcaggatttgcgtctgatattaatcattgttggcgcgatcgccataatcgctttactggtacatggtttctggaccagccgtaaagaacgatcttctatgttccgcgatcggccattaaaacgaatgaagtcaaaacgtgacgacgattattatgacgaggatgtcgaagatgatgagggcgttggtgaggttcgtgttcaccgcgtgaatcatgccccggctaacgctcaggagcatgaggctgctcgtccgtcgccgcaacaccagtaccaaccgccttatgcgtctgcgcagccgcgtcaaccggtccagcagccgcctgaagcgcaggtaccgccgcaacatgctccgcgtccagcgcagccggtgcagcagcctgcctatcagccgcagcctgaacagccgttgcagcagccagtttcgccacaggtcgcgccagcgccgcagcctgtgcattcagcaccgcaaccggcacaacaggctttccagcctgcagaacccgtagcggcaccacagcctgagcctgtagcggaaccggctccagttatggataaaccgaagcgcaaagaagcggtgattatcatgaacgtcgcggcgcatcacggtagcgagctaaacggtgaactgcttcttaacagcattcaacaagcgggcttcatttttggcgatatgaatatttaccatcgtcatcttagcccggatggcagcggcccggcgttattcagcctggcgaatatggtgaaaccgggaacctttgatcctgaaatgaaggatttcactactccgggtgtcactatctttatgcaggtaccgtcttacggtgacgagctgcagaacttcaagctgatgctgcaatctgcgcagcatattgccgatgaagtgggcggtgtcgtgcttgacgatcagcgccgtatgatgactccgcagaaattgcgcgagtaccaggacatcatccgcgaagtcaaagacgccaacgcctga

SEQ ID NO: 460306 - DNA, 762 bp, Shigella boydii
atggtttcatcattcacatctgccccacgcagcggtttttactattttgcgcaaggctggaagctcgtctcgcaacctgggattcggcgtttcgttattttaccgctgctggtcaatattttgttgatggggggcgcattctggtggctctttacacagctcgatgtctggatcccgactctcatgagttacgttccggactggctacaatggctgagttatctgttgtggcctctggctgtcatctctgtgctgttagtgtttggctatttcttctccacgattgctaactggattgccgctccgtttaacggtttattggctgaacaactggaagcacgattgactggcgctacaccgccagataccgggattttcggtatcatgaaagatgtgccgcgaatcatgaaacgcgaatggcaaaaatttgcctggtatctgccgcgcgcaattgtattactaattctttacttcatccctggtattgggcaaaccgtcgcgccggtactgtggttcctgtttagcgcctggatgttagccatccagtattgcgattaccccttcgataaccacaaagtgccgtttaaagagatgcgcaccgccctgcgcacacgcaaaatcaccaatatgcagtttggtgctttaaccagcctgtttacgatgatcccgctgcttaatctgttcatcatgcccgttgccgtttgtggcgcgacggcgatgtgggtcgattgctatcgcgataaacacgcgatgtggcggtaa

SEQ ID NO: 460307 - DNA, 972 bp, Shigella boydii
atgagtaagatttttgaagataactcgctgactatcggtcacacgccgctggttcgcctgaatcgcatcggtaacggacgcattctggcgaaggtggaatctcgtaaccccagcttcagcgttaagtgccgtatcggtgccaacatgatttgggatgccgaaaagcgcggcgtgctgaaaccaggcgttgaactggttgaaccgaccagcggtaataccgggattgcactggcctatgtagctgccgctcgcggttacaaactcaccctgaccatgccagaaaccatgagtattgaacgccgcaagctgctgaaagcgttaggtgcaaacctggtgctgacggaaggtgctaaaggcatgaaaggcgcaatccaaaaagcagaagaaattgtcgccagcaatccagagaaatacctgctgctgcaacaattcagcaatccggcaaaccctgaaattcacgaaaaaaccaccggtccggagatctgggaagataccgacggtcaggttgatgtatttattgctggcgttgggactggcggtacgctgactggcgtcagccgctacattaaaggcaccaaaggcaagaccgatcttatctctgtcgccgttgagccaaccgattctccagttatcgcccaggcgctggcaggtgaagagattaaacctggcccgcataaaattcagggtattggcgctggttttatcccggctaacctcgatctcaagctggtcgataaagtcattggcatcaccaatgaagaagccatttctaccgcccgtcgtctaatggaagaagaaggtattcttgcaggtatctcttctggagcagctgttgccgcggcgttgaaactacaagaagatgaaagctttaccaacaagaatattgtggttattctaccatcatcgggtgagcgttatttaagcaccgcattgtttgccgatctcttcactgagaaagaattgcaacagtaa

SEQ ID NO: 460308 - DNA, 258 bp, Shigella boydii
atgttccagcaagaagttaccattacagctccgaacggtctgcacacccgccctgctgcccagtttgtaaaagaagctaagggcttcacttctgaaattactgtgacttccaacggcaaaagcgccagcgcgaaaagcctgtttaaactgcagactctgggcctgactcaaggtaccgttgtgactatctccgcagaaggcgaagacgagcaaaaagcggttgaacatctggttaaactgatggcggaactcgagtaa

SEQ ID NO: 460309 - DNA, 1728 bp, Shigella boydii
atgatttcaggcattttagcatccccgggtatcgctttcggtaaagctctgcttctgaaagaagacgaaattgtcattgaccggaaaaaaatttctgccgaccaggttgatcaggaagttgtacgttttctgagcggtcgtgccaaggcatcagcccagctggaaacgatcaaaacgaaagctggtgaaacgttcggtgaagaaaaagaagccatctttgaagggcatattatgctgctcgaagatgaggagctggagcaggaaatcatagccctgattaaagataaacacatgacagctgacgcagctgctcatgaagttatcgaaggtcaggcttctgccctggaagagctggatgatgaatacctgaaagaacgtgcggctgacgtacgtgatatcggtaagcgcctgctgcgcaacatcctgggcctgaagattatcgacctgagcgccattcaggatgaagtcattctggttgccgctgacctgacgccgtccgaaaccgcacagctgaacctgaagaaggtgctgggtttcatcaccgacgcgggtggccgtacttcccacacctctatcatggcgcgttctctggaactgcctgctatcgtgggtaccggtagcgtcacctctcaggtgaaaaatgacgactatctgattctggatgccgtaaataatcaggtttacgtcaatccaaccaacgaagttattgataaaatgcgcgctgttcaggagcaagtggcttctgaaaaagcagagcttgctaaactgaaagatctgccagctattacgctggacggtcaccaggtagaagtatgcgctaacattggtacggttcgtgacgttgaaggtgcagagcgtaacggcgctgaaggcgttggtctgtatcgtactgagttcctattcatggaccgcgacgcgctgcccactgaagaagaacagtttgctgcttacaaagcagtggctgaagcgtgtggctcgcaggcggttatcgttcgtaccatggacatcggcggcgacaaagagctgccatacatgaacttcccgaaagaagagaacccgttcctcggctggcgcgctatccgtatcgcgatggatcgtaaagagatcctgcgcgatcagctccgcgctatcctgcgtgcctcggctttcggtaaattgcgcattatgttcccgatgatcatctctgttgaagaagtgcgtgcactgcgcaaagagatcgaaatctacaaacaggaactgcgcgacgaaggtaaagcgtttgacgagtcaattgaaatcggcgtaatggtggaaacaccggctgccgcaacaattgcacgtcatttagccaaagaagttgatttctttagtatcggcaccaatgatttaacgcagtacactctggcagttgaccgtggtaatgatatgatttcacacctttaccagccaatgtcaccgtccgtgctgaacttgatcaagcaagttattgatgcttctcatgctgaaggcaaatggactggcatgtgtggtgagcttgctggcgatgaacgtgctacacttctgttgctggggatgggtctggacgaattctctatgagcgccatttctatcccgcgcattaagaagattatccgtaacacgaacttcgaagatgcgaaggtgttagcagagcaggctcttgctcaaccgacaacggacgagttaatgacgctggttaacaagttcattgaagaaaaaacaatctgctaa

SEQ ID NO: 460310 - DNA, 510 bp, Shigella boydii
atgggtttgttcgataaactgaaatctctggtttccgacgacaagaaggataccggaactattgagatcattgctccgctctctggcgagatcgtcaatatcgaagacgtgccggatgtcgtttttgcggaaaaaatcgttggtgatggtattgctatcaaaccaacgggtaacaaaatggtcgcgcctgtagacggtaccattggtaaaatctttgaaaccaatcacgcgttctctatcgaatctgatagcggcgttgaactgttcgtccacttcggtatcgacaccgttgaactgaaaggcgaaggcttcaagcgtattgcagaagaaggtcagcgcgtgaaagttggcgatactgtcattgaatttgatctgccgctgctggaagagaaagccaagtctaccctgactccggttgttatctccaacatggacgaaatcaaagaactgatcaaactgcccggtagcgtaaccgtgggtgaaaccccggttatccgcatcaagaagtaa

SEQ ID NO: 460311 - DNA, 624 bp, Shigella boydii
ttgatcgcaccttatcgattctatcataagcaatggtctgaaacgctggagttctggccgcgaaagcctgaacctggcaaagataccttccaatatcatgtgcttccttttgactcgatcgatatcataagtaaaagacgcgagtctttagagaatcaatggggtatcgaagatagcgaaagttattgtgccttaatggagcattttctttctggcgaccatggagccaatacctttaaagcaaacatggaggaagccccagagcaggttatcgccttgttgaataaatttgctgtttttccctcagactatatctctgattgcgctaataatcgctccggtaaatcctcggcgaagctaatatgggcggcggaattatcatggatgatctcgatatcaagcacagcttttcaaaacgggacaattgaagaagaactggcctggcattatataatgcttgcttctcgaaaggcgcacgagttgttcgaaagcgaagaagattatcaaaaaaatagtctaatgggatttctttactggcatatcggtaatgactccaacttactgatagtgttttatgttcagataatgcccgatgaccttgtcatgcagctccaccgattttga

SEQ ID NO: 460312 - DNA, 357 bp, Shigella boydii
atgaaaaaagttttattacaaaaccatcctgggagcgagaagtattcttttaatggctgggaaatatttaatagtaattttgaacggatgattaaagaaaataaggccatgctgctttgtaagtgggggttttatttaacatgtgttgtcgctgtaatgtttgtgttcgcagcgataacatccaacggtttgaatgaaagaggcctgattaccgcgggatgctcttttctttatctattaattatgatggggcttattgttcgggccggttttaaagcaaaaaagaacaactgcattattatcaggctaaaggtattgagccgctcagtatcgagaagttacaggcgctacaattga

SEQ ID NO: 460313 - DNA, 1962 bp, Shigella boydii
atgcggttgtttattgccgaaaaaccgagtctggcgcgcgccattgctgatgtcctgcccaaaccgcaccggaaaggcgatggctttatcgagtgcggtaatggtcaggtggtgacctggtgtatcggtcacctgcttgagcaggcgcagccagacgcctacgacagccgctatgcgcgctggaatcttgcggatttgccgattgtcccggaaaagtggcaattacagccccgaccctccgtgaccaaacaacttaacgtcatcaaacgcttcctgcatgaagccagcgaaatcgttcacgccggggacccggatcgtgaagggcaactgctggtggatgaagtgctggactatctgcaactggcaccggaaaagcgccagcaggtgcagcgttgcttgataaacgacctgaacccgcaggcggttgagcgggcgatcgaccgtcttcggtccaacagtgagtttgtgccattgtgcgtttctgcgctggcgcgagcgcgtgccgactggctgtacggcatcaatatgacccgtgcgtataccattctcggtcgcaatgccggttatcagggcgtactttccgtgggacgcgtgcagacacccgtgctcgggctggtggtgcgccgcgatgaagagattgaaaacttcgtggcgaaagacttctttgaagtcaaagcacatatcgtgacacctgccgatgagcggtttaccgctatctggcaaccgagcgaagcgtgtgaaccgtaccaggatgaagaagggcgcttgttacatcgtccactggcggagcatgtggttaaccgcattagtggtcaaccagcaattgtcaccagctataacgataaacgggaatcagaatccgcgccgctgcctttttcgctttcggcgttgcagattgaagcggcaaaacgctttggtctgagcgcgcagaacgtgcttgatatctgccagaagctgtacgaaacgcacaagctaatcacttatccgcgttccgattgtcgctatttgccagaagaacattttgccggacgccacgcggtgatgaatgccatcagcgttcatgcaccagatctgttgccgcaaccagtggtagatccagatatacgcaaccgctgttgggatgacaaaaaggtcgatgcacaccacgccatcatcccgaccgcacggagttctgagatcaacctgacggagaacgaagcgaaggtctataacctgattgcccgtcagtacttgatgcagttctgcccggatgcggtgttccgcaagtgtgttatcgaactggacattgccaaaggcaaatttgtcgctaaagcgcgttttcttgctgaagcaggctggcgcacgctgttaggcagcaaagagcgcgatgaagaaaacgacggtacgccattgcctgtggtggcgaaaggcgatgagttgctgtgtgaaaaaggtgaagtggtagagcggcaaacccagccgccgcgccattttaccgatgcaacactgctttcggcgatgaccgggatcgcgcgctttgtgcaggacaaagatctgaaaaagatccttcgtgcgaccgatggtctggggacagaagcaacccgtgccgggattattgaactgctgttcaagcgtggttttctgaccaaaaaagggcgctatatccactctaccgacgccggaaaagcgttattccattcgctgccagaaatggcgacgcgaccggacatgaccgcgcactgggaatcggtgctgacgcaaatcagcgaaaagcagtgtcgctatcaggactttatgcagccgctggtggggacgctatatcagcttattgatcaagccaaacgtacgccggtgcggcagtttcgcggcattgtggctccgggcagtggtggcagtgctgataagaaaaaggctgcaccgcgtaaacgtagtgcgaaaaaaagtccgccagcagatgaagtcggaagcggggcgatagcgtaa

SEQ ID NO: 460314 - DNA, 1044 bp, Shigella boydii
atgagcgagaactcgattcgtttgacccaatacagccacggagctggttgcggctgtaaaatttccccaaaagtgttggaaaccatcctgcacagtgagcaggcgaagtttgttgatccgaatttgcttgtgggtaatgagacccgcgacgatgcggcggtgtacgatctgggcaatggcaccagcgttatcagtaccaccgacttctttatgccgatcgttgataatcctttcgattttggccgcattgcggcgactaacgccatcagcgatatcttcgcgatggggggcaaaccgattatggcgattgcgatcctcggctggccgattaacaaactttccccggaaattgcccgcgaagtaaccgaaggtggacgctatgcatgccgtcaggcgggtattgcgctggctggcggtcactccatcgatgcgccggagccgatttttggtctggcggtaacggggatcgtaccgaccgagcgggtgaagaaaaacagtaccgcacaagccggatgcaaactgttcctgacgaaaccgctggggatcggcgttcttaccacggctgagaaaaaatcactgctgaaaccagaacatcagggactagcgacggaagtgatgtgccggatgaacatcgcaggcgcgtcctttgccaacatcaaaggcgtaaaagcgatgaccgacgttacgggctttggtctgctgggccatttgagcgaaatgtgtcagggcgcaggtgtgcaggcgcgcgttgactatgacgcgatcccaaaattgccgggggttgaagagtacattaagttgggcgcagtgcctggcggcaccgaacgtaactttgccagctacggtcatctgatgggtgaaatgccgcgtgaagtgcgcgatttgctgtgcgatccgcaaacttctggcggtttgctgctggcggtcatgccggaagcagaaaatgaggtcaaagctacagccgccgagtttggcattgaactgacggcaattggcgaactggtgccagcgcgcggcggtcgtgccatggttgagattcgttaa

SEQ ID NO: 460315 - DNA, 552 bp, Shigella boydii
atggatgcactcgaactattgatcaatcgccgtagcgcctcccgcctggctgaacccgcgccaacgggtgaacaactgcaaaacatcctgcgtgcgggtatgcgtgcgccggaccataagtccatgcaaccgtggcatttttttgtgattgaaggggaagggcgcgagcgtttcagcgccgtactggaacagggggcgattgctgccggtagtgatgacaaagctatcgacaaagcccgtaatgcgccgttccgcgcaccgctcatcatcacggtggtggcgaaatgcgaagaaaatcataaagtcccgcgatgggaacaggaaatgtctgccggatgcgcggtcatggcgatgcaaatggcagccgttgcccagggatttggcggcatctggcgcagtggcgcattaactgaaagtccggtagtgcgtgaagcattcggttgccgtgagcaggataaaattgtcggttttctctacctcggcacgccgcagttgaaagcatctacgtcgattaacgtcccggacccgacgctgtttgtaacttatttctga

SEQ ID NO: 460316 - DNA, 1857 bp, Shigella boydii
atgcgaaccctttggcgatttattgccggattttttaaatggacgtggcgtctgctgaatttcgtccgtgaaatggtacttaacctgttctttattttcctcgtactggttggtgtggggatctggatgcaggtcagtggtggtgattcgaaagaaacggccagtcgtggcgcactgctgctggacatttccggtgtgatcgtcgataaacccgacagttctcagcggtttagtaaattaagccgccagctgcttggtgccagttccgatcgtctgcaggaaaactcactgtttgatatcgtcaacaccattcgccaggcgaaggacgaccgcaatatcaccggtatcgtgatggatctgaaaaacttcgcaggcggcgaccagccgtctatgcagtacatcggcaaagccctgaaagagtttcgtgacagcgggaaaccggtttatgccgttggcgagaactacagccaggggcaatattatctcgccagtttcgccaataaaatttggctgtcaccgcaaggcgtggttgatctgcacggttttgctaccaacggtctgtactacaaatcgttgctggataagctgaaagtttccacccatgtgttccgcgtgggtacgtataaatctgccgttgaaccgtttattcgtgatgatatgtcaccggcagcccgcgaagctgacagccgctggattggtgagctgtggcaaaactatctgaatactgttgccgctaaccggcagatccctgctcagcaggtattccctggcgcgcaagggttgcttgagggtttaaccaaaaccggtggcgataccgcgaaatatgcactggaaaacaagctggtcgatgcactggcatcgagtgccgaaatcgaaaaagctctgaccaaagagttcggctggagtaagactgataaaaattatcgcgccatcagttattacgattacgcattgaaaacgccggcagataccggtgacagcatcggtgtcgtcttcgctaatggcgcaattatggatggcgaggaaactcaggggaatgttggcggtgataccactgcggcacaaatccgcgacgctcgccttgacccgaaagtgaaagcgattgtcctgcgtgttaatagcccaggcggcagcgttaccgcgtctgaagtgattcgcgctgaactggcagcagcccgggcagcgggtaagcctgtggttgtatcgatgggcggcatggcggcatctggtggttactggatttccacgccagctaattacattgtggctaaccccagcaccctgaccggttctatcggtatcttcggcgtgatcaccaccgtagaaaatagtctggattcgattggtgttcatactgatggtgtctcaacttcaccgctggcggatgtttctatcaccagggcactgccgccggaagcgcagcagatgatgcaattaagcattgagaatggctataaacgctttatcacgctggttgctgatgcgcgtcattcgacgccggagcaaattgataaaatcgcccagggccacgtctggaccggtcaggatgcaaaagctaacgggctggtcgatagtctcggggatttcgatgatgcggttgccaaagcagcagagctcgcaaaagtgaaacagtggcatctggaatactacgttgatgaaccgaccttcttcgacaaagtgatggacaacatgtctggttctgtccgggcaatgttgccagatgcgttccaggccatgttacctgcaccgcttgcctcggtagcctctaccgttaaaagtgaaagcgacaagctggccgcgtttaacgacccacaaaaccgttatgcgttttgcctgacctgcgccaacgtgcgttaa

SEQ ID NO: 460317 - DNA, 1017 bp, Shigella boydii
atgcaaaagaaatcaatttacgtcgcctacacgggcgggaccatcgggatgcagcgttccgagcagggttatattccggtgtcaggtcatctacaacgccaactggcgctgatgccggaattccatcgcccggagatgccagatttcaccattcatgaatatacgccgttgatggattcttctgatatgacgccggatgactggcagcatattgctgaagatattaaagcgcactatgacgactatgatggttttgtcattctacacggtaccgacacgatggcgtataccgcctctgcgctgtcgttcatgctcgagaatctcggtaaaccggtcattgtgacagggtcacaaatcccgctggctgagttacgctctgacggacaaattaatctgctgaatgcgttgtacgttgcggcgaattatccgatcaacgaagtaacgctctttttcaataaccgattgtatcgcggcaaccgcactaccaaagcccatgccgatggttttgatgcgtttgcctctccaaaccttcctccgttactggaagctggtatccatattcgtcgtttgaatacgccacccgccccgcacggtgaaggggaattaatcgttcatccaatcacgccacaaccaattggcgtagtgacgatttatccggggatttctgctgatgtcgtgcgcaattttctgcgccaaccggtgaaagcattgattctgcgctcctatggcgtgggtaatgcgccacaaaacaaagccttcctgcaggaattacaagaagccagcgatcgcggtattgtggtggtcaacctgacacaatgtatgtccggtaaagtgaatatgggtggttatgccaccggtaacgccctcgcccatgccggcgttattggcggtgcagatatgactgtagaagccacgctaaccaaactgcattacctgctgagccaggaactggatactgaaaccattcgcaaggccatgagccaaaacctgcgcggcgaactgacgccggatgattaa

SEQ ID NO: 460318 - DNA, 642 bp, Shigella boydii
atgccccatcgcgccctgttactggtcgatttacaaaatgatttctgtgctggtggcgcgctcgccgtaccggaaggtgacagtacggtggaggttgctaaccgccttattgactggtgccagtcgcgcggagaagcggttatcgccagccaggactggcatccggcgaatcacggcagttttgccagtcagcacggtgtagagccttatacgccaggccaactcgacggtttgccacaaaccttctggccagatcactgtgtgcagaacagtgaaggcgcacaattacatccgttactgaaccaaaaagcgatcgcagcggtgttccataaaggcgaaaatcctttagttgacagttacagtgccttttttgataacggccgtcggcagaaaacctctctcgatgactggttacgcgatcatgaaatcgatgaattgatcgttatgggcctggctactgactattgcgtgaagtttaccgtgctggacgcgttacagttaggttataaggtgaacgtgattaccgatggttgtcgtggcgtgaatatccagccccaggacagtgcacacgcgtttatggagatgtcagcagctggggcaacgctatatacgctggcagactgggaagagacacaggggtaa

SEQ ID NO: 460319 - DNA, 273 bp, Shigella boydii
atgaatcttgatgacattatcaacagcatgacgcctgaggtataccagcgtttgtcgaccgccgttgaactggggaaatggcctgatggcgttgcgttgaccgaggaacaaaaagagaattgcctgcaactggtgatgctgtggcaagcccgccataataccgaagcacagcatatgacaattgacacaaatggtcagatggtcatgaagagcaaacagcagttaaaagaagattttggtatctcagcaaagcctattgctatgtttaagtga

SEQ ID NO: 460320 - DNA, 414 bp, Shigella boydii
atggctaataaaccttcggcagaagaactgaaaaaaaatttgtccgagatgcagttttacgtgacgcagaatcatgggacagagccgccatttacggggcgtttactgcataacaagcgtgacggcgtatatcactgtttgatctgcgatgccccgctgtttcattccgaaaccaagtatgattccggctgtggctggcccagtttctacgaaccggtgagtgaagaatccattcgttatatcaaagacttgtcacatggaatgcagcgcatagaaattcgttgcggtaactgtgatgcccatctggggcatgtctttcccgacgggccgcaaccaacaggcgaacgttattgtgttaactctgcttctttacgcttcactgatggcgaaaacggcgaagaaatcaacggttga

SEQ ID NO: 460321 - DNA, 996 bp, Shigella boydii
atgactatcaaagtaggtatcaacggttttggccgtatcggtcgcattgttttccgtgctgctcagaaacgttctgacatcgagatcgttgcaatcaacgacctgttagacgctgattacatggcatacatgctgaaatatgactccactcacggccgtttcgacggtaccgttgaagtgaaagacggtcatctgatcgttaacggtaaaaaaatccgtgttaccgctgaacgtgatccggctaacctgaaatgggacgaagttggtgttgacgttgtcgctgaagcaactggtctgttcctgactgacgaaactgctcgtaaacacatcaccgctggtgcgaagaaagtggttatgactggtccgtctaaagacaacactccgatgttcgttaaaggcgctaacttcgacaaatatgctggccaggacatcgtttccaacgcttcctgcaccaccaactgcctggctccgctggctaaagttatcaacgataacttcggcatcatcgaaggtctgatgaccaccgttcacgctactaccgctactcagaaaaccgttgatggcccgtctcacaaagactggcgcggcggccgcggcgcttcccagaacatcatcccgtcctctaccggtgctgctaaagctgtaggtaaagtactgccagaactgaatggcaaactgactggtatggcgttccgcgttccgaccccgaacgtatccgtagttgacctgaccgttcgtctggaaaaagctgcaacttacgagcagatcaaagctgccgttaaagccgctgctgaaggcgaaatgaaaggcgttctgggctacaccgaagatgacgtagtatctaccgatttcaacggcgaagtttgcacttccgtgttcgatgctaaagctggtatcgctctgaacgacaacttcgtgaaactggtatcctggtacgacaacgaaaccggttactccaacaaagttctggacctgatcgctcacatctccaaataa

SEQ ID NO: 460322 - DNA, 1311 bp, Shigella boydii
gtgccacttcacgaatggctggagctggaaggcgcgaaagatcttgatgacgcactctctctgctgaccattctttaccaccacgtaccgtcggtcacatcgatgccggtctacctggggcaactggatgcgttgttgcaaccgtgtgttagaattctaacacaagacgagatcgatgttcgaataaaacgtttctggcgttacctcgacagaaccctgccaggcgcctttatgcacgccaatatcggcccgcctgattcgcccattacccgcgcgatcttacgtgcagacgcagagttgaagcaggtttcaccgaacctgacctttatctacgatcctgaaatcacccctgatgacctgctgctggaagtggcgaagaacatctgtgaatgtagcaaaccgcacatcgccaacggtccggtgcatgataaaattttcacaaaagggggctacgggattgtgagctgttacaactcactgccgctggcgggtggtggcagcacgctggtacgccttaacctgaaagccattgccgagcgcagcgaatcgctggatgacttctttacgcgcactctaccgcactactgccagcagcagatcgccatcatcgatgcgcggtgtgaattcctctatcaacaatcacacttctttgagaatagcttcctggtgaaagaagggctgattaaccctgaacgttttgtgccaatgtttggcatgtatgggctggcggaagcggttaacttgctgtgtgagaaagaagggattgccgcgcgctacggtaaagaagccgccgtaaatgaagtgggttatcgcatcagcgcgcaactggcggagtttgtcgccaatacccccgtgaaatatggctggcaaaaacgcgccatgttacacgcacagtcggggatcagttccgatatcggcaccacgccgggcgcgcgtttgccgtatggcgatgagccagatccgatcatccatctgcaaactgtcgccccgcatcatgcttattattattccggcatcagcgacattctgacgctcgacgaaaccatcaaacgtaatccgcaggcgctggtacagctttgcctcggtgcctttaaagccggaatgcgtgaatttaccgccaatgtcagcggtaacgatctggttcgcgttaccggttatatggtgcgtttgtcggatttagaaaaatatcgcgccgaaggttcacgcaccaacaccacctggctgggcgaagaagccacacgcaacactcgtattctggaacgccagccgcgcgtgataagccatgaacagcagatgcgctttagtcagtaa

SEQ ID NO: 460323 - DNA, 705 bp, Shigella boydii
gtgccacagtgtccgcatcaggcgttgcagattgttgacggcaaagtgctgtggaacgctgtggtctgcgagcagtgtgatacctgcctgaagatgtgtccgcaacatgccacgccaatggcgcaatccatgagcgtggacgaagtgcttagccatgtccgcaaagcggtgctgtttattgaagggataacggtaagcggcggcgaagccacgacccaactgccgtttgtagtggcgctgtttactgctatcaaaaacgatccgcaactgcgccacctcacctgcctggtggacagtaacggcatgttgagcgaaaccggctgggaaaaattactcccggtgtgtgacggcgcaatgctcgatctcaaagcgtgggggagcgaatgtcatcaacacttaaccggacgcgataatcagcagattaagcgcagcatctgtttgcttgcagagcgcggcaagctggcggaactgcgtttgctggtaattccagaccaggtggattatttgcatcacatcgatgagctggcgacgtttatcaagagacttggcgatgttccggttcgcctgaatgcgtttcatacccacggcgtgtatggcgaggcgcaaagctgggcgagcgccacgccggaagacgttgagccgttggctgatgcgttaaaggtgcgcggggtgagccggttgatatttccggcgctctatttgtga

SEQ ID NO: 460324 - DNA, 783 bp, Shigella boydii
ttgatttgccgttttatcgacacccactgccattttgatttcccgccgtttagtggcgatgaagaggccagcctgcaacgcgcggcacaagcgggcgtaggcaagatcattgttccggcgacagaggcggaaaattttgcccgtgtgcaggcgttagcggaaaaatatcaaccgctgtatgccgcattgggcttgcatccaggtatgttggaaaaacatagcgatgtgtctcttgagcagctacagcaggcgctggaaaggcgtccggcgaaggtggtggcagtgggggaggtcggtctggatctcttcggcgacgatccgcaacttgagaggcagcagtggttactcgacgaacagctgaaactggcgaaacgctacgatctgccggtgatcctgcattcacggcgcacacacgacaaactggcgatgcatcttaaacgccacgatttatcgcgcactggcgtggttcacggtttttccggcagcctgcaacaggccgagcggtttgtacagctgggctacaaaatcggcgtaggcggtactatcacctatccacgcgccagtaaaacccgcgatgtcatcgcaaaattaccgctggcatcgttgttgctggaaaccgacgcgccggatatgccgctcaacggctttcaggggcagcctaaccgaccggaacaggctgtgcgggtgtttgacgtgctttgcgagttgcgcccggaaccagaagatgagattgccgaagtgttgcttaataatacgtatgcgttgtttagcgttagtgggtag

SEQ ID NO: 460325 - DNA, 1074 bp, Shigella boydii
gtggggcagcgaatacctgtaacgcttggtaatattgcgccgttgtcgctaaggccgttccagcctggacgaatagctctggtgtgcgaaggcggcggacagcgtggaattttcacggctggcgtgctggatgagtttatgcgcgcgcagtttaatcctttcgatctttatctcggcacatctgccggggcgcagaacctctcggcgtttatctgcaatcagcccggttacgcgcgcaaagtcatcatgcgctataccacaaaacgcgaatttttcgatccattgcgctttgtccgtggaggaaatcttatcgatctcgactggctggtggaggccaccgcaagccagatgccgttgcaaatggataccgccgcgcggttgtttgacagcggcaaatcgttttatatgtgcgcctgtcgtcaggatgactacgcgcctaattactttttaccaaccaaacaaaactggctggatgtgattcgcgcctccagtgcgatacctggcttttatcgtagcggagtgtcgctggaaggcattaactacctggatggcgggatcagtgatgcgattccggttaaagaggcggcaaggcagggcgctaaaacgttggtcgtcattcgcactgtgccgtcacaaatgtactacacgccgcagtggttcaaacgcatggaacgctggctgggtgacagtagcctgcagccgctggtcaatctggtgcagcatcatgaaaccagctatcgtgacattcagcaatttattgagaaaccaccgggcaagctgcggatattcgaaatttatccgccgaagccattacatagtatcgcgcttggcagtcggattccggcgctgcgtgaagactataaacttgggcgtttatgcggtcgttatttcctcgccacggttggcaagctattaactgaaaaagcgccgcttacccgccatctggtgccagtggtgacgccggaatcgatcgttattccgcctgcgccagtcgccaacgatacgctggttgccgaagtgattgacgctccgcaggcgaacgacccgacatttaacaatgaggatctggcttga

SEQ ID NO: 460326 - DNA, 162 bp, Shigella boydii
atgtttcgttggggcatcatatttctggttatcgcgttaatcgccgccgcacttgggtttggtggtttggccggtaccgctgcaggcgcagctaaaattgtctttgtcgtcgggattattctgttcctggtgagtttgttcatgggccgaaaacgaccctag

SEQ ID NO: 460327 - DNA, 606 bp, Shigella boydii
atgactatgacaagactgaagatttcgaaaactctgcgggctgtaatgttgacctctgccgtcgcgaccggctctgcctacgcggaaaacaacgcacagactaccaatgaaagcgcagggcaaaaagtcgatagctctatgaataaagtcggtaatttcatggatgacagcgccatcaccgcgaaagtgaaggcggcgctggtggatcatgacaacatcaagagcaccgatatctctgtcaaaaccgagcaaaaagtcgtgaccctgagcggtttcgttgaaagccaggctcaggccgaagaggcagtgaaagtggcgaaaggcgttgaaggggtgacctctgtcagcgacaaactgcacgttcgcgacgctaaagaaggctcggtgaagggctacgcgggtgacaccgccaccaccagtgaaatcaaagccaaactgctggcggacgatatcgtcccttcccgtcatgtgaaagttgaaaccaccgacggcgtggttcagctctccggtaccgtagattctcaggcacaaagtgaccgtgctgaaagtatcgccaaagcggtagatggtgtgaaaagcgttaaaaatgatctgaaaactaagtaa

SEQ ID NO: 460328 - DNA, 1590 bp, Shigella boydii
atgacgttgtctccttatttgcaagaggtggcgaagcgccgcacttttgccattatttctcacccggacgccggtaaaactaccatcaccgagaaggtgctgctgttcggacaggccattcagaccgctggtacagtaaaaggccgtggttccaaccagcacgctaagtcggactggatggagatggaaaagcagcgtgggatctccattactacgtctgtgatgcagtttccgtatcacgattgcctggttaacctgctagacaccccggggcacgaagacttctcggaagatacctatcgtaccctgacagcggtggactgctgcctgatggttatcgacgctgcaaaaggtgttgaagatcgtacccgtaagctgatggaagttacccgtctgcgcgacacgccgatcctcacctttatgaacaaacttgaccgtgatatccgcgacccgatggaactgctcgatgaagttgagaacgagctgaaaatcggctgcgcaccgatcacctggccgattggctgcggcaagctgtttaaaggcgtttaccacctttataaagacgaaacctatctttatcagagcggtaaaggccacacgattcaggaagtccgtattgttaaagggctgaataacccggatctcgacgctgcggttggtgaagatctggcacagcagctacgtgacgaactggaactggtgaaaggcgcgtctaacgagttcgacaaagaactgttccttgcgggcgaaatcactccggtattcttcggtactgcgctgggtaacttcggcgttgatcatatgctggatggcctggtggagtgggcccctgcgccgatgccgcgtcagactgatacccgtaccgtagaggcgagcgaagacaaatttaccggcttcgtatttaaaattcaggccaatatggacccgaaacatcgcgaccgcgtggcgtttatgcgcgtagtatccggtaaatatgaaaaaggcatgaagctgcgccaggtgcgtactgcgaaagatgtggttatctccgacgcgctgacctttatggcgggcgaccgttcgcacgttgaagaagcgtatccgggtgatatcctcggcctgcacaaccacggcactattcagatcggcgacacctttacccagggggagatgatgaagttcaccggtattccgaacttcgcaccagaactgttccgtcgtatccgcctgaaagatccgctgaagcaaaaacagctgctcaaagggctggtacagctttccgaagagggcgcggtgcaggtgttccgtccgatctccaacaacgatttgatcgttggtgctgttggtgtgctgcagtttgatgtggtggtatcgcgcctgaagagcgaatacaacgttgaagcagtatatgaatcagtcaacgttgccactgcccgctgggtagaatgtgcggacgcgaagaaattcgaagagttcaagcgtaagaacgaaagccaactggcgcttgatggcggcgataacctcgcttacatcgctaccagcatggtcaacctgcgcctggcgcaggaacgttatcccgacgttcagttccaccagacccgcgagcattaa

SEQ ID NO: 460329 - DNA, 678 bp, Shigella boydii
atgaagtgggattggattttctttgatgccgatgaaacgctgtttacctttgactcattcaccggcctgcagcggatgtttcttgattacagcgtcacctttaccgctgaagattttcaggactatcaggccgttaacaagccactgtgggtggattatcaaaacggcgcgatcacttcattacagcttcagcacgggcgtttcgagagctgggccgaacggctgaaagttgaagcaggcttgcttaacgatgcctttattaatgcgatggcggaaatctgcacgccgctgccgggcgcggtttctctgcttaacgccattcgtggcaacgctaaaatcggcatcatcaccaacggttttagcgccttgcagcaagtgcgtctggaacggacgggcctgcgtgattactttgatttgctggtgatttccgaagaagttggcattgccaaaccgaataagaaaattttcgattatgcgctggaactggcgggcaatcctgaccgttcacgcgtgctgatggttggcgacactgccgagtccgatattctcggtggcatcaacgccgggcttgcgacttgctggctgaatgcgcaccatcgcgagcaaccagaaggcatcgcgcccacctggaccgtttcatcgttgcacgaactggagcagctcctgtgtaaacactga

SEQ ID NO: 460330 - DNA, 447 bp, Shigella boydii
atgaacacgatttcttccctcgaaacgactgatttaccagcagcttaccacattgaacaacgcgcccacgcctttccgtggagtgaaaaaacctttgccagcaaccagggcgagcgttatctcaactttcagttaacgcaaaacggcaaaatggcggcgtttgcgattacgcaagtggtgctggatgaagctacattgttcaatattgtggtcgatcctgactatcagcgtcagggattgggaagggtgctgctgaaacatctgatcgacgaactggaaaaacgcggcgtggcgacactatggctggaagtccgtgcttcaaacgctgccgccattgccctgtacgaaagtttaggctttaacgaggcgacgattcgccgcaattactaccccaccacggacggtcgcgaagacgccatcatcatggcgttgccaatcagtatgtaa

SEQ ID NO: 460331 - DNA, 414 bp, Shigella boydii
atgacatcccgacgagactggcagttacagcaactgggcattacccagtggtcgctgcgtcgccctggcgcgttgcagggggagattgccattgcgatcccggcacacgtccgtctggtgatggtggcaaacgatcttcccgccctgaccgatcctttagtgagcgatgttctgcgcgcattaaccgtcagccccgatcaagtgctgcaactgacgccagaaaaaatcgcgatgctgccgcaaggcagtcgctgcaacagctggcggttgggtactgacgaaccgctatcactggaaggcgctcaggtggcatcaccggcgctcaccgaattacgggcaaacccaacggcacgcgccgcgttatggcaacagatttgcacatatgaacacgatttcttccctcgaaacgactga

SEQ ID NO: 460332 - DNA, 1032 bp, Shigella boydii
atgtctgcatttaccccggcaagtgaagtcttgctgcgtcacagtgatgatttcgaacaaagccgtattctgtttgccggagacttacaggatgacctgcccgcgcgtttagataccgcggccagccgtgctcatacccagcaattccaccacgggcaggtattaagccgccagatgggggataacgcccgtttcagtctggtcgccacggtggatgacgtcgcagattgcgatacgctgatttactactggccgaagaacaaaccggaagcccagttccagttgatgaatttactttctctgctgccagtggggacagatatttttgtcgttggcgagaaccgcagcggcgtgcgcagcgccgagcagatgctggcagattatgcgccgttgaataaagtcgacagcgctcgtcgctgtggcctctattttggtcgtctggaaaaacagccggtatttgatgccgataaattctggggcgaatacagcgtcgatggcctgacggtcaaaacgctgcctggcgtgtttagccgcgacggtctggatgtcggtagccagttgctgctctcgacgttaactccgcacacgaaaggtaaagtgctggatgtcggctgtggcgcgggggtgctttcagttgcctttgcgcgccattcgccgaaaattcgtctcaccttgtgcgatgtctctgcgccagcggtagaagccagccgcgcaacacttgcggccaactatgttgaaggtgaagtctttgccagcaacgtcttttccgaggtgaaaggtcgttttgatatgatcatctccaacccgccgttccacgatgggatgcaaaccagcctggatgcggcgcaaacgctgattcgcggcgcggtgcgtcatcttaatagtggcggcgagctgcgaattgtagcgaacgccttcctgccttatccggacgtgctggatgagacatttggcttccatgaagtgattgcgcaaaccgggcgtttcaaggtatatcgcgccattatgacccgccaggcgaaaaaaggttaa

SEQ ID NO: 460333 - DNA, 657 bp, Shigella boydii; identical to SEQ ID NO: 458837

SEQ ID NO: 460334 - DNA, 2379 bp, Shigella boydii
atgtccaacaatggctcgtcaccgctggtgctttggtacaaccaactcggcatgaatgatgtagacagggttgggggcaaaaatgcctccctgggtgaaatgattactaacctttccggaatgggcgtttccgttccgaatggtttcgccacaaccgccgacgcgtttaaccagtttctggaccaaagcggcgtaaaccagcgcatttatgaactgctggataaaacggatattgacgatgttactcagcttgcgaaagcgggcgcgcaaatccgccagtggattatcgacactcccttccaggctgagctggaaaacgccatccgcgaagcctatgctcagctttccgccgatgacgaaaacgcctcttttgcggtgcgctcctccgccaccgcagaagatatgccggacgcttcctttgccggtcagcaggaaaccttcctcaacgttcaggggtttgacgccgttctcgtggcagtgaaacatgtatttgcttctctgtttaacgatcgcgccatctcttatcgtgtgcaccagggttacgatcaccgtggcgtggcgctctccgccggtgttcagcggatggtgcgctccgacctcgcatcttctggcgtgatgttctccattgataccgaatccggctttgaccaggtggtgtttatcacttccgcatggggccttggtgagatggtcgtgcagggggcggttaacccggatgagttttacgtgcataaaccgacactggcggcgaatcgcccggctatcgtgcgccgcaccatggggtcgaaaaaaatccgcatggtttacgcgccgacccaggagcacggcaagcaggttaaaatcgaagacgtaccgcaggaacagcgtgacatcttctcgctgaccaacgaagaagtgcaggaactggcaaaacaggccgtacaaattgagaaacactacggtcgcccgatggatattgagtgggcgaaagatggccacaccggcaaactgttcattgtgcaggcgcgtccggaaaccgtgcgctcacgcggtcaggtcatggagcgttatacgctgcattcacagggtaagattatcgccgaaggccgtgctatcggtcatcgcatcggtgcgggtccggtgaaagtcatccatgacatcagcgaaatgaaccgcatcgaacctggtgacgtgctggtcactgacatgaccgacccggactgggaaccgatcatgaagaaagcatctgccatcgtcaccaaccgtggcggtcgtacctgtcacgcggcgatcatcgctcgtgaactgggtattccggcggtagtgggctgtggtgatgcaacagaacggatgaaagacggtgagaacgtcactgtttcttgtgccgaaggtgataccggttacgtctatgcggagttgctggaatttagcgtgaaaagctccagcgtagaaaccatgccggatctgccgttgaaagtgatgatgaacgtcggtaacccggatcgagctttcgacttcgcctgtctgccgaacaaaggcgtgggacttgcgcgtctggaatttatcatcaaccgtatgattggcgtccacccacgcgcactgcttgagtttgacgatcaggaaccgcagttgcaaaacgaaatccgcgagatgatgaaaggttttgattctccgcgtgaattttacgttggtcgtctgactgaagggatcgcgacgctgggtgccgcgttttatccgaagcgcgtcattgtccgtctctctgattttaaatcgaacgaatatgccaacctggtcggtggtgagcgttacgagccagatgaagagaacccgatgctcggcttccgtggcgcgggccgctatgtttccgacagcttccgcgactgcttcgcgctggagtgtgaagcagtgaaacgtgtgcgcaacgacatggggctgaccaacgttgagatcatgatcccgttcgtgcgtaccgtagaccaggcgaaagcggtggttgaagaactggcgcgtcaggggctgaagcgtggtgagaacgggctgaaaatcatcatgatgtgtgaaatcccgtccaacgccttgctggccgagcagttcctcgaatatttcgacggcttctcaattggctcaaacgacatgacgcagttggcgctcggtctggatcgtgactccggcgtggtgtctgaactgttcgatgagcgcaacgatgcggtgaaagcattgctgtcgatggctatccgtgccgcgaagaaacagggcaaatatgtcgggatttgcggtcagggtccgtccgaccacgaagattttgccgcatggttgatggaagaggggatcgatagcctgtctctgaatccggacaccgtggtgcaaacctggttaagcctggctgaactgaagaaataa

SEQ ID NO: 460335 - DNA, 1647 bp, Shigella boydii
atgaaagtgacattaacgttcaacgaacaacgtcgtgcggcgtatcgtcagcaagggttatggggcgatgcttcactggccgattactggcagcagaccgctcgtgcgatgccagacaaaattgccgtggtcgacaatcatggtgcaacgtacacctatagcgcgctcgatcacgccttgagctgtctggcaaactggatgttagcgaagggtattgaatcaggcgatcgcatcgcatttcaactgcctggctggtgtgaatttaccgttatctatcttgcctgcctgaaaatcggtgcggtttccgtgccgctgttgccttcctggcgggaagcagaactggtgtcggtgctcaataagtgtcaggcaaaaatgttctttgcaccgacgttgtttaaacaaacacgtccggtagatttaatcctgccgctgcaaaatcagcttccacaactacaacaaattgtcggcgtggacaaactggctcccgccacctcttccctctcattaagtccgattatcgccgacaatacctcactgaccacggcgataacgacccacggcgatgaattagctgcggtgctgtttacctccggaaccgagggtctgccaaagggcgtgatgctaacgcataacaatattctcgccagtgagcgggcttattgcgcgcgactgaatctgacctggcaggatgtctttatgatgcctgcgccacttggtcacgcaacgggctttctgcatggcgtaacggcaccattcttaattggcgctcgcagcgtgttgttagatattttcactcctgatgcgtgtctcgcgctgcttgagcagcagcgttgcacctgtatgctaggcgcaacgccgtttgtctatgatcttttgaatgtactagagaaacaacccgcggacctttcagcgctgcgtttctttctttgcggcggtaccacaatccccaaaaaagtggcacgtgaatgccagcagcgcggcattaaattattaagtgtttatggttccacagaaagttcgccgcatgcggtggtgaatctcgatgatcctttgtcgcgctttatgcacaccgatggttacgctgccgcaggtgtagagattaaagtggtcgatgacgcacgcaagaccttaccgccaggttgcgaaggtgaagaagcctcgcgtggccccaatgtgtttatggggtattttgatgaacctgaattaaccgcccgtgcgctggacgaagaaggctggtattgcagcggcgatctctgccgtatggatgaggctggctatataaaaattaccggacgcaaaaaagatattattgtccgcggcggcgaaaatattagcagccgtgaagtggaagatattttattgcagcatcctaaaattcacgatgcctgtgtggttgcaatgcccgatgaacgtttaggtgaacgatcatgcgcttatgtcgtgctgaaagcgccgcatcattcattatcgctggaagaggtggtggctttttttagccgtaaacgggtcgcaaaatataaatatcctgaacatatcgtggtaatcgaaaaactaccgcgcactgcctcaggtaaaatacaaaagtttttgttaagaaaagatattatgcggcgattaacgcaggatgtctgtgaagagattgaataa

SEQ ID NO: 460336 - DNA, 294 bp, Shigella boydii
atgagccagaacgctacggttaacgtcgacatcaaattaggcgtcaataaattccatgttgatgagggccacccgcatatcattctggcggcaaatcccgatatcaatgaattccgtaaattaatgaaagcttgccctgccggactttataagcaggatgacgccggcaacattcatttcgattccgccggttgtctggagtgcggcacctgtcgggtgctgtgcggcaacactattctcgaacagtggcaatatcccgcaggcaccttcggtattgattttcgctacggctaa

SEQ ID NO: 460337 - DNA, 798 bp, Shigella boydii
atgcttggccgctcgctgggaatggttcccgcttccgatccgcatcattacgctgttggtgttaaagaggttattggcctcacaccagaacagatcaacgatcgctttaatattacgggcgaggaaggtgccgcctggctgtttgccggttccccttctgacggcctgatgggcgggggatttctctataccaacaaggattccatatccttggggctggtttgtggattgggtgatatcgcccatgcgcaaaaaagcgtgccgcaaatgctggaagattttaaacaacaccccgccattcgcccactaattagcggcggcaaactgcttgaatattccgcgcatatggtgccagaaggcggtctggcaatggtgccgcagatggttaacgatggcgtgatgatcgttggtgacgccgcaggcttctgcctgaatttgggttttacagttcgtggcatggatttagccattgcatcggctcaggctgccgccacaacggtgatcgccgccaaagaacgcgaggatttctccgccagcagtctggcgcaatacaaacgtgagctggaacaaagctgcgtcatgcgcgatatgcagcatttccgcaagatcccggcgctgatggaaaacccgcgcctgtttagccaatacccacgaatggtcgccgacatcatgaacgagatgttcaccattgacggcaaaccaaaccagccggtacgcaaaatgatcatgggacacgcgaagaaaattgggctgatcaacttgctgaaagatggcattaagggagcaaccgcgctatga

SEQ ID NO: 460338 - DNA, 435 bp, Shigella boydii
atgtcggataacaaatttgatgccattgtggtcggtgcggacgttgctggtagcgttgccgcactggtcatggcgcgagccggactggatgtcctggtgatagaacgcggcgacagtgccggatgtaaaaacatgaccggcgggcgtctttatgcccacacacttgaagcaatcattccaggctttgcagtatcagcgccggtagaacgcaaggtcacacgcgagaaaatctccttcttaaccgaagaaagcgccgttaccctcgattttcaccgcgagcaaccagatgttccgcaacacgcatcttataccgtattgcgtaatcgtctggacccgtggttgatggaacaagccgagcaggcgggcgcacagtttatcccgggcgttcgcgtcgatgcgttggttcgtgaaggaaacaaggtcactggcgtgtag

SEQ ID NO: 460339 - DNA, 939 bp, Shigella boydii
atgagtcaattaaacagcgtctgggtctttagcgataatcctgaacgttatgctgaactgtttggcggcgctcagcaatggggccaacaggtgtatgccattgtacaaaataccgaccaggcgcaggcagttatgccttatggtccaaaatgtatttatgttcttgagcaaaacgacgcgctgcaacgcactgaaaattacgccgaaagcattgctgccccgctgaaagataaacaccccgctatgttgctgttggccgcgacgaaacgtggtaaagctctggcagcacggttaagtgtgcaactgaatgcggcgctggtgaacgatgccacggcggtggatattgtcgatggtcacatttgcgccgaacaccggatgtatggcgggttagcgttcgctcaggaaaagatcaacagcccgctggcgatcattacccttgcacccggtgttcaggaaccgtgcaccagtgatacctctcataagtgcccgacagaaacggtaccttatgttgctccgcgtcatgaaattctctgtcgcgaacgccgtgcgaaagccgcaagcagcgtggacctgagcaaagcaaaacgtgtggttggcgtcggtcatggtctggcggcgcaggatgacctgaaaatggtccacgaactggcggcggtgctgaatgctgaagtcggctgttcacgtccaattgccgaaggcgagaactggatggagcgtgaacgttatatcggtgtctccggcgtgttgctgaaatccgatctctacctgacgctggggatctccgggcagatccagcatatggttggcggcaacggcgcaaaagtgattgtcgccatcaataaagataaaaatgcgccaatcttcaattatgccgactacggcctggtgggcgatatctacaaagtcgtccctgccctgattagccagttgagccgctaa

SEQ ID NO: 460340 - DNA, 765 bp, Shigella boydii
atgaaaataataacctgctttaagctggtgcctgaagaacaggacattgttgtcactccagaatacaccctgaatttcgacaatgccgacgccaaaatcagccagttcgatctcaatgccattgaagctgcaagccagctcgcaacagatgacgatgagatagccgcgctgaccgttggcggcttattgttgcagaactcgaaagtgcgcaaagatgtgctatcccgcgggccgcacagcctgtatttggtgcaggatgcgcaacttgaacatgcactgcctctcgataccgcaaaagcgctggcggcagcaattgaaaagatcggcttcgatttactgatctttggtgaaggttccggcgacctttatgcccagcaggttggcttgctggtcggagaaattctgcaacttccggtgattaatgcagtgagtgctattcagcgtcagggcaatacactggtgattgaacgcacgcttgaagatgatgttgaagttattgaactctctgttccagccgtgctctgcgtcacctccgatattaacgtgccacgcattccttcgatgaaagccattctcggcgcgggtaaaaaaccggtaaatcagtggcaggcaagtgatattgactggagccagagcgcgccacttgctgaactggtcggcattcgcgtaccgccgcaaacagaacgtaagcacatcattatcgataacgattcgccggaggccattaccgagctggcggaacatctgaagaaagccctgaactga

SEQ ID NO: 460341 - DNA, 177 bp, Shigella boydii
atggaaggtaaaaatggcctgaaaatagtgtgcgatagcggtgcggggttttcgacggagcaagctgttttccttgccaacaatcttgcaaaaaaaatgcgatcgctaaaacaaaagtgcaatttgcggcaatatagttattccatgaccgtacaatcttgcattcagtgtaaataa

SEQ ID NO: 460342 - DNA, 912 bp, Shigella boydii
atgtatcaacgctgttttgataacgccagtgaaacgctgtttgtcgccggtaaaacgccacggctttcacgttttgcatttagcgatgatccaaaatgggagtccggacatcacgttcatgacaatgaaaccgagttgatttacgtcaagaaaggggttgcaaggtttaccatcgattcttcgttatatgtcgcacatgcggatgacattgtggtgatagaacgcggcaggctgcatgcggtggcctctgacgttaacgatccggcaacgacgtgtacctgtgcgctgtacggctttcagtttcagggggctgaggaaaatcagctactgcaaccgcattcttgtccggtaattgccgcggggcagggaaaagaagtcataaaaaccttatttaatgagctaagtgtgattttgccgcaaagtaaaaatagccaaacatcttcgttatgggatgcatttgcctatacgttagccattctttactacgaaaattttaaaaatgcttatcgttcggagcaggggtatattaaaaaagatgttctgataaaagatattcttttctatctgaataataattatcgcgaaaaaatcactttagaacagttatcgaaaaaatttcgtgccagcgtcagttatatttgccatgaatttaccaaagagtatcgtatttcccctattaactatgttattcaacggcgtatgacggaagcaaaatggtcactcactaatactgaattatcacaggcagagatctcctggcgtgtgggttatgaaaatgtcgatcactttgccaaactgtttttgcgccatgtcggttgttcgcccagcgattaccgtagacaatttaaaaactgttttgcggaacaagaaatcctatctgaatttcctcaaccggtaagtcttgttggataa

SEQ ID NO: 460343 - DNA, 1152 bp, Shigella boydii
atggatttttctttaactgaagaacaagaactgctgctggccagtattcgcgaactgattacgactaactttgcggaagagtatttccgcacctgcgatcaaaacgggacatatccgcgtgagtttatgcgggcgctggcggataacggcatttctatgcttggcgtgccggaagagttcggtggcatccctgcggattacgtcacccagatgctggcgctgatggaagtgtcaaaatgcggtgctccggcatttttgattaccaacggtcaatgtattcacagtatgcgccgtttcggttctgcagagcagctacgtaaaacggcagagagcaccctggaaacgggtgatcccgcctatgccctggcgttgacggagccaggcgcaggctcagacaacaacagtgccactaccacttacacgcgtaaaaacggcaaggtttacatcaacggacagaaaacctttattaccggtgcgaaagagtacccgtatatgctggtgttggcgcgcgatccgcaaccgaaagatcccaaaaaagccttcaccctgtggtgggtcgactccagtaagcccggcattaagattaacccgctgcataaaatcggctggcatatgctcagcacctgcgaagtctatctcgacaacgtggaggttgaagagagcgacatggtgggcgaagaaggaatgggtttcctcaatgtgatgtacaactttgagatggagcgcctgatcaacgccgcgcgcagcaccggctttgccgaatgcgcctttgaagatgccgcccgctatgccaaccaacgtatcgcttttggtaagcccattggtcataaccagatgatccaggaaaaactggcgctgatggcgattaagatcgacaacatgcgcaacatggtgctgaaagtggcatggcaagccgatcagcatcagtcactgcgcaccagcgcggcgctggcaaaactgtattgcgcacgtaccgcaatggaagtcattgatgatgcgattcaaatcatgggcggtctgggctataccgatgaagcgcgcgtctcccgcttctggcgtgatgtccgttgtgaacgtatcggcggcggtacagacgaaattatgatttacgtagcaggtcggcagatcctgaaagactatcagaacaaataa

SEQ ID NO: 460344 - DNA, 2199 bp, Shigella boydii
atgatgcgcaaaaagtatatgccccgggctcttggtccgctgcttcttgtcgtgctgtcaccagctgtcgcccagcaaaacgatgataatgagatcatagtgtctgccagccgcagcaatcgaactgtagcggagatggcgcaaaccacctgggttatcgaaaatgccgaactggagcagcagattcagggcggtaaagagctgaaagacgcactggctcagttaatccccggccttgatgtcagcagccagagtcgaaccaactacggtatgaacatgcgtggccgcccgctggttgtcctgattgacggtgtgcgcctcaactcttcacgttccgacagccgacaactggactctgtcgatccttttaatatcgaccatattgaagtgatctccggcgcgacggccctgtacggtggcgggagtaccggagggttgatcaacatcgtgaccaaaaaaggtcagccggaaaccatgatggagtttgaggctggcacaaaaagtggctttaacagcagtaaagatcacgatgagcgcattgccggtgctgtctccggcggaaatgaccatatctccggacgtctttccgtggcatatcagaaatttggcggctggtttgacggtaacggcgatgccaccctgcttgataacacccagaccggcctgcagcactccaatcggctggacatcatgggaaccggtacgctgaacatcgatgaatcccggcagcttcaactgataacgcagtactataaaagtcagggagacgacaattacgggcttaatctcgggaaaggcttttccgccatcagcgggagcagcacaccatacgtcagtaaggggctgaattctgaccgcattcccggcactgagcggcatttgatcagcctgcagtactctgacagtgatttcctgggacaggaactggtcggtcaggtttactaccgcgatgagtcgttgcggtactacccgttcccgacggtaaatgcgaataaacaggcgacggctttctcctcgtcacagcaggataccgaccagtacggcatgaaactgactctgaacagccaactgatggacggctggcaaatcacctgggggctggatgctgagcatgagcgctttacctccaaccagatgttcttcgatctggctcaggcaagtgcttccggagggctgaacaaccataagatttacaccaccgggcgctatccgtcatatgacatcaccaatctggcggccttcctgcaatccagctatgacattaatgatatttttaccgttagcggtggcgtacgctatcagtatactgagaacagggtagatgatttcatcgactacacgcagcaacagaagattgctgccgggaaggcgatatctgccgacgccattcctggtggttcggtagattacgataactttctgttcaatgctggtctgctgatgcacatcaccgaacgtcagcaggcatggttcaatttttcccagggggtggcattgccggatccggggaaatattatggtcgcggcatctatggtgcagcagtgaacggccatctttccctgacaaagagcgtgaacgtcagcgacagtaagctggaaggcgtgaaagtcgattcttatgaactgggctggcgctttaccggtgacaacctgcggactcaaatcgcggcatattactcgctttccaataagagcgtggaaaggaataaagatctgaccatcagtgtgaaggacgacaggcgccgtatttacggcgtggaaggtgcagtggactacctgatcccggatactgactggagtaccggtgtgaacttcaatgtgctgaaaaccgagtcgaaagtgaacggtcaatggcaaaaatatgacgtgaaggaatcaagtccatcgaaagcgacagcttacattaactgggcgccggaaccgtggagtctgcgtgtacagagcaccacttctttcgacgtaagcgatgcagagggtaacgatattaatggttacactaccgtcgattttatcagtagttggcagcttccggtgggaacactcagcttcagcgttgagaacctcttcgaccgtgactataccactgtctggggacagcgtgcacctctgtactacagcccgggttacggccctgcttcactgtacgactacaaaggccggggccgaacctttggtctgaactactcagtgctgttctga

SEQ ID NO: 460345 - DNA, 1338 bp, Shigella boydii
atgaaaaaaagtgtcgattttattggtgtcgggacagggccatttaatctcagcattgctgcattgtcacatcagatcgaagaactgaactgtctcttctttgacgaacatcctcatttttcctggcatccgggtatgctggtaccggattgtcatatgcagaccgtctttctgaaagatctggtcagtgcagttgcacctacaaatccctacagctttgttaactatctggtgaagcacaaaaagttctatcgcttccttacaagcaggctacgtacagtatcccgtgaagagttttctgactatctccgctgggctgctgaagatatgaataacctgtatttcagtcataccgttgaaaatattgatttcgacaaaaaaagtcgattgtttctggttcagaccagtcggggagaatattttgcccgcaatatctgccttggtacaggaaaacaaccttatttaccaccctgtgtgaagcatgtgacacaatcctgtttccatgccagtgaaatgaatcttcgtcggccggacctgagtggaaaacggataaccgtggttggtggaggacagagtggtgcagacctgttccttaatgcattacgcggggaatggggagaagcggcggaaataaactgggtctcacggcgtaataattttaacgcactggatgaggctgcttttgctgatgagtattttacacctgaatatatttcaggcttctccggactgaaggaagatattcgccatcagttactggatgagcagaaaatgacatcggatggcatcactgccgattctttactgaccatttatcgtgagttgtaccaccgttttgaagttctgagaaaaccaagaaatatccgtctgctacccagtcgctcggtaacaactctggaaagtagtggtccgggctggaggttattgatggaacatcatctggatcagggcagagagagcctggaaagtgatgtggtgattttcgccacaggttaccgttctgcattgccacaaatacttccctcactgatgcccttgatcaccatgcacgataagaacacctttaaagtgcgtgatgacttcactctggaatggagtggcccgaaagaaaataacatctttgcggtcaacgccagcatgcaaactcatggcatcgccgaaccccagctcagcctgatggcctggcgatctgcacgtattcttaatcgcgtactggggcgtgatttattcgatctcagtatgccgcccgcactgattcagtggcgcagcggcagccggaaaaaaccgcagccggaggctgcttctttaactcactatacagcaaatattcaggaataa

SEQ ID NO: 460346 - DNA, 1743 bp, Shigella boydii
atgaatcacaaggactgggattttgttaaccgtcggctggtggcaaaaatgttgtctgagatggagtatgagcaggttttccacgcggaatctcagggcgatgaccactactgcattaacctgccgggagcacaatggcgcttcatcgctgaacgtggtatctggggctggctgtggattgatgcccaaacgttgcgctgcacggacgaaccagtactggcgcagacgctgctgatgcagctaaagccggtgctgtcaatgagtgatgccactgttgcagagcatatgcaggatttgtatgccacgctactgggcgacctgcaactgctgaaggcccgtcgcggactgagtgccagtgacctgattaatcttgatgccgatcgtctgcaatgcctgctgagcggtcatcctaaattcgtttttaataaaggtcgccgtggctggggcaaagaggcgctggaacgatatgcgccagagtataccaacaccttcagactgcactggctggcggtaaaacgtgaacatatgatctggcgctgcgataacgatctggatattcagcagttgttgactgccgcaatggatccgcaggagtttacacgcttcagtcaggtctggcaggaaaacgggctggatcacaactggctaccgctgccggtacatccgtggcagtggcagcaaaaaatcgccacagacttcatcgctgattttgtcgaaggcaggatggtgtctctcggcgagtttggcgaccagtggctcgcccagcagtcgctgcgtaccctgaccaacgccagccgccggggagggctggatatcaagctgccgctgaccatctacaacacctcatgctaccgggggatccctggcagatatatcgctgccggaccactggcttcacgctggctgcaacaggtttttgcgaccgacgccaccctggtgcaaagcggcgcagtgatccttggtgaaccggcggcaggctatgtgtcccatgaaggctatgccgcgcttgcccgggctccctatcgctaccaggaaatgcttggtgttatctggcgggagaatccgtgccgctggctgaaaccggatgaaagtcctgttctgatggcaacactgatggagtgcgacgaaaacaatcagccgctggcaggcgcatatatcgaccgctccggactggacgctgaaacctggcttacgcaattgttccgggtggttgtggttccgctgtatcacctgctttgccgctacggtgtcgcgcttattgcacacggacaaaatataacgctcgccatgaaagagggggtaccacagcgtgttctgctgaaagacttccagggcgatatgcggctggtgaaagaagcgtttcccgaaatggactctttgcctcaggaggtgcgtgatgccacatcccgtctgagtgcggactacttaatccatgatttgcagacgggtcacttcgtgacagtactgcgttttatttcgccactgatggttcgtcttggcgtacctgaaaggcgattttatcaactgctggcagcagtgttgagtgattacatgaacaaacatccacaaatggcagagcgttttgcgattttctcactcttcaggccacaaatcattcgcgtggtgctgaacccggtaaaactgacctggccggacctggatggcggcagtcgcatgctgccgaattaccttgagaatctgcaaaatccgctgtggctggtaactcaggaatatgaatcatga

SEQ ID NO: 460347 - DNA, 948 bp, Shigella boydii; identical to SEQ ID NO: 19334

SEQ ID NO: 460348 - DNA, 1725 bp, Shigella boydii
atgaccctgccctctgaaaaaccagccacagatgtggctgcgcagtgcttcctgaatgcactgattcgtgaaaccacagactggaaactgacagaatacccgccagacgaattgctcatcccgctggatgagcagaaatcgctccatttcagagtgacttatttctccccaacccagcatcaccgctttgcatttcctgcacgtctggtcacggcatcaggcagttatcctgtcgactttaccactctctcccggcttattattgataagctacgccatcaactgtttctgcccgttcccctctgcgaaactttccaccagcgcgtgctggaaagccatgtccatacgcaacaggcaattgatgcccgtcatgactgggccgctctgcgtgaaaaagcgttgaattttggcgaggctgagcaggcgctgctgacaggacacgctttccaccctgcgcctaagtctcatgaaccgtttaaccggcgggaggctgaacgctacctgcctgatatggcaccccacttcccactgcggtggttttcggtggataaaacacaaatcgccggtgaaagtttgcatctcaaccttcaacagcggctgacgcgatttgccgcagagaatgcgcctcagttactcaacgaattaagtgacaaccaatggctgttcccgttgcacccgtggcagggggaatatcttttgcagcaggggtggtgccaggcacttgttgctaaagggctgattaaagacttaggtgaggccggcacgtcgtggctgccgaccacctcttcccgttccctctactgtgccaccagccgcgatatgatcaagttctccctgagcgtacggctgaccaactccatccgtactctgtccgtgaaagaagtgaagcgtgggatgcgcctggcacgcctggctcaaaccgacggctggcagatgctacaggtccgcttcccgactttccgggtaatgcaggaggatggctgggccgggctgctcgatcttaacggcaacatcatgcaggaaagtctgtttgccctgcgtgaaaatctgctggtggatcagccgaaaagccagactaacgtactggtctccctgactcaggccgcacctgatggcggtgattcgctgctggtttcggcggtaaaacgcctgagcgatcgcctcggtatcactgtgcaacaggccgcccatgcatgggtcgatgcatactgtcagcaagtgctaaagccgctgtttacggctgaagcggattacggcctggtgctgctggcgcatcagcaaaatattcttgtccagatgcttggggatctgccggtcggatttatttaccgtgactgtcagggcagcgcttttatgcctcacgcgacagactggctcgattctattggcgaggcgcaggcggaaaatattttcacccatgagcagttgctgcgctatttcccttattacctgctggttaactccacttttgctgtgaccgctgcgctgggggctgccgggctggacagcgaatcgaatctgatggctcgtgtacgagcatcgctggctgaagtgcgtgatcaggtgactcataaaacctgtctcaactacgtgctggaaagtccgtactggaacgtaaaaggtaactttttctgttatctgaacgatcataacgagaacaccattgttgatccttcggtgatctatttcgatttcgctaacccgctgcaggctcaggaggtctga

SEQ ID NO: 460349 - DNA, 1194 bp, Shigella boydii
atgtcaccagggatcgaagatacgccccaaaaaacactgtcctgctggccacttgcgttcagtgccgggcttctcggtatcggacagaacggtctgctggttgtgctccctgttctggtcatacagacaaatctgagtctgtctgtatgggctgccctgctgatgcttggctcaatgctgtttctgccatcgtccccgtggtggggaaagcaaatttcccgtactggcagtaaacctgtggtgttgtgggctctgggaggatatggcataagctttaccctgctagggctgggaagcgtgctgatggctaccagcgccataacaacagcggtgggactgggaatattaatcatcgcccggatcgcctacgggctgaccgtgtcggcaatggtgccagcctgtcaggtctgggcattgcagagagctggagaagggaatcgcatggccgctctggcaaccatcagctccggcctgagttgcggcaggctattcgggccgctgtgcgcggcagcaatgctggccattcatcctctggcgccactggggctactgatggcagcaccagtgctggcgctgctgatgctgctgcggttgcccggcacaccaccacagcccacaccggagtgcaagagcgtcagtctgaagcgggattgtctgccttatctgctttgcgcaatattactggctgcggcggtgagcatgatgcagcttggactttcgcctgcccttactcgccagttcgtcacggataccaccgccattagccaacaggtggcctggctgttgggtctgtccgcagtagctgcgcttatcgcgcagttcggggtagtccgtccgcagcgcctgactccggtggccctgctcctgagtgccggagtgttgatgagtggtggtctggctatcatgctctccgaacagctatggttgttttacccgggctgtgcagtgctgtcatttggagcagctctggcaacacccgcttatcaacttctactgaatgataagctggctgatggcgcaggcgcgggctggctcgctaccagtcacacacttggctatggactgtgcgctttgctggtgccgctggtatcgaaaacaggtgtcgcaatcgcgctgattatggcagcattatttgcaactatattatttaccattgtgtctgtatttatctggcattaccgtactatcaaataa

SEQ ID NO: 460350 - DNA, 474 bp, Shigella boydii
atggctcctcacaaagaaaatatcactgaaagagctcagcagtttaaaagagttttagttttacaggatacaacagaacttaattattctggtcagaaagaaaaacaaggagttggtcacaaaaaacataaagatgaaagaaacttatttcttcatcctcaactcgtcatcagtgagtcaggtgtttgcctcggtgtttatgatgactatcagtggttcagggatgaattaaaaaccagtaaaaatacccgacaagaaatctgcaatgatttacttcataaaaaacatgtcagtgaaaaagaaacctggcgttgggttgaaggatataataaagcaacagaactggctcgccaatgccctgatacccatgtattgtcaatttctgatcgtgaaggcgatttttatgacctgtttgaacgcgcagagcagactcccggaataaaagctgactggcttgatcagaatgaaatttaa

SEQ ID NO: 460351 - DNA, 525 bp, Shigella boydii
atgaagcgaacaatacttgcgttatgcctgctgcctctttccttttcgtcattcgcggcaaccacggatttagggccgaaaggaacattgaaattcacccttaaaatcagccagggtgcttgcgaactggtgaaagacagcgttgaggttgacatgggcaccgcggttctcaaaaagccggtaagaatcggaacggaaattaatcccactcctttttccatcggcctgaaaaactgtagcgaagtggtcagagcctacgtgactatggacggtacacccaatgcagacgactcaaatctttttgcgctggatgcgggtggcgctacaggcgttgggctgaaaatcaaaaccgctgctggagtacaacagttcccggaaaatacaacgccgacaccggttgagtttgcaattaacggtgatggcgcacatcaactgaactatatcgccagctacgtgcctattcgcgccgatgcaactattggtcgcgcagatgcaacggtcgactttactgtacagtacgaataa

SEQ ID NO: 460352 - DNA, 1692 bp, Shigella boydii
atgagatacatcaaatcgattacacagcagaagctgagctttttgcttgcaatctatattggcctttttatgaatggcgcggttttttatcgccgcttcggcagctatgcgcacgattttaccgtctggaaaggcgtttctgctgttgttgaactggccgccaccgtactggtgaccttcttcttactacgtcttctatcgctgtttggccgccgcagctggcgtattctggcatcgctggtggtgctcttttccgcaggtgccagctattacatgaccttccttaatgtggtcattggttatggcatcatcgcttccgtcatgaccaccgatatcgacctgtcaaaagaagttgttggtctgaactttattctctggttaatcgccgttagtgcattgcctcttatccttatctggaataaccgttgtcgctacaccttgctccgacaactgcgaaccccagggcagcgtattcgcagcctggcggtcgtcgtactggcgggtattatggtttgggcaccgattcgtttgctggatatccagcagaagaaagtggagagggcgaccggcgttgatttgccgagttatggcggtgtcgtagcgaactcttatctgccatcaaactggctttctgcgttggggctgtatgcctgggcgcgggtcgatgaatcttccgataataattcattgcttaatccggcgaagaagtttacataccaggctccacaaaacgttgatgatacttatgtcgtgtttatcatcggtgaaaccacgcgttgggaccatatgggtattttcggctatgagcgtaataccacgccgaaactggcccaggagaaaaatctggcggcgttccgtggttactcctgtgataccgcaaccaaactctcactgcgttgcatgtttgtacgtcaggggggcgcggaagataatccgcagcgcacattaaaagaacagaacattttcgcggttctgaagcagttaggattcagttctgacctctacgctatgcagagcgaaatgtggttctacagcaacacgatggcggacaacattgcttatcgtgagcagattggtgcggagccacgtaatcgtggcaagccggtagatgatatgttgctggtagacgaaatgcagcaatcgctagggcgcaacccggatggtaagcatctgatcattctgcataccaaaggttcgcattttaactacacccagcgttatccgcgtagcttcgcgcagtggaagccggaatgtattggtgttgatagcggctgtaccaaagcgcagatgatcaactcctatgacaactcggtgacctatgtggatcactttatctccagcgtgattgatcaggttcgcgataagaaagcgattgtgttctacgcagctgaccacggtgagtcaattaatgaacgcgagcacctgcacggcacgccgcgtgaattggcaccgccggagcagttccgcgtaccgatgatggtctggatgtcagataaatatctggaaaatccggccaatgcgcaggcatttgcgcagctgaaaaaagaagccgacatgaaagtgccacgccgtcacgtagagctgtacgataccatcatgggttgtcttggctatacttcaccggatggtggaattaacgaaaacaacaactggtgtcacatcccgcaggcaaaagaggcagcggctaactaa

SEQ ID NO: 460353 - DNA, 258 bp, Shigella boydii
atgcgtatttccttgaaaaagtcagggatgctgaagcttggtctcagcctggtggctatgaccgtcgcagcaagtgttcaggctaaaactctggtttattgctcagaaggatctccggaagggtttaacccgcagctgtttacctccggcaccacctatgacgcctcttccgtaccgctttataaccgcctggttgaatttaaaatcggcaccactgaagtgataccgggcctcgctgaaaagtgggaagtcagctaa

SEQ ID NO: 460354 - DNA, 1314 bp, Shigella boydii
gtgaagtggcacgacaataaagaattcaaaccgacgcgtgaactgaacgccgatgacgtggtgttctcgttcgaccgtcagaaaaacgcgcaaaacccgtaccataaagtctctggcggcagctacgaatacttcgaaggcatgggcttgccggagctgatcagtgaagtgaaaaaggtggacgacaacacagttcagttcgtactgactcgcccggaagcgccgttcctcgctgatctggcaatggacttcgcctctattctgtcaaaagaatatgctgatgcgatgatgaaagccggtacaccggaaaaactggacctcaacccaatcggaaccggtccgttccagttacagcagtaccaaaaagattcccgtatccgctacaaagcgtttgatggctactggggcaccaaaccgcagatcgatacgctggtcttctctattacccctgatgcttccgtgcgttacgcgaaattgcagaagaatgaatgccaggtgatgccgtacccgaacccggcagatatcgctcgcatgaagcaggataaatccatcaacctgatggaaatgccggggctgaacgtcggctacctctcgtataacgtgcagaaaaaaccgctggatgacgtgaaagttcgccaggcactgacctacgcggtgaacaaagacgcgatcatcaaagcggtttatcagggcgcgggtgtatcagcgaaaaacctgatcccgccaaccatgtggggctataacgacgacgttcaggattacacctacgatcctgaaaaagcgaaagccttgctgaaagaagcgggtctggaaaaaggtttctccatcgacctgtgggcgatgccggaacaacgtccgtataacccgaacgctcgccgcatggcggagatgattcaggcagactgggcgaaagtgggcgtgcaggccaaaatcgtcacctacgaatggggtgagtacctcaagcgtgcgaaagatggcgaacatcagacggtaatgatgggctggactggcgataacggggacccggataacttcttcgccaccctgttcagctgcgccgcctctgaacaaggttctaactactcaaaatggtgctacaaaccgtttgaagatctgattcaaccggcgcgtgctaccgacgaccataacaaacgcgttgaactgtacaagcaagcgcaggtggtgatgcacgatcaggctccggcactgatcatcgctcactccaccgtgtttgaaccggtacgcaaagaagtcaaaggctatgtggttgatccattaggcaaacatcacttcgaaaatgtctctatcgaataa

SEQ ID NO: 460355 - DNA, 1020 bp, Shigella boydii
atgttgcagtttattctccgacgtttgggactcgtcatccccacgtttatcggtattacccttctcacatttgcctttgtccacatgatcccgggcgatccggtgatgatcatggcaggcgaacgtgggatctcccctgagcgtcacgcgcagctgctggctgaactcggcttagataaaccgatgtggcagcagtatctccattacatttggggcgtaatgcacggcgatctaggcatttcaatgaaaagccgaattccagtatgggaagagttcgtgccgcgctttcaggccacgctggaacttggcgtctgcgcgatgatttttgctacggcagtcggtattccggttggtgtgctggctgcggttaaacgcggttccattttcgatcacactgcagttggcctggcgctgaccggctactcgatgccgatcttctggtggggcatgatgctgatcatgctggtttcggtgcactggaacctgacgcccgtctccggtcgcgtgagcgatatggtgttcctcgatgactccaatccgttaaccggttttatgctaatcgacaccgccatctggggtgaagacggcaactttatcgatgccgtcgcccatatgatcttacctgccattgtgctgggtactattccgctggcggtcattgtgcgtatgacacgctcctcgatgctggaagtgctgggcgaggattacatccgcaccgcgcgcgccaaagggctaacccgcatgcgggtgattatcgtccatgcgctgcgtaacgcgatgctgccggtggtgaccgttatcggcctgcaggtgggaacattgctggcgggggcgattctgaccgaaaccatcttctcgtggcccggtctgggacgctggttgattgacgcactgcaacgccgcgactatccggtagtgcagggcggcgtattgctggtggcgacgatgattatcctcgtcaacttgctggtcgatctgctgtacggcgtggtgaacccgcgtattcgtcataagaagtaa

SEQ ID NO: 460356 - DNA, 897 bp, Shigella boydii
atgtcacaggttactgaaaataaagtgattagcgcaccggtgccgatgaccccgttacaggagttctggcactattttaaacgcaacaaaggcgcggtcgtcgggctggtttacgtcgtcatcgtgctgttcatcgcgatctttgccaactggattgcaccctataacccggcggaacagttccgcgatgcactgctcgccccgccagcctggcaggaaggcggcagcatggcgcacttgctgggcaccgatgacgtaggccgtgatatgctgtcgcgcctgatgtacggtgcgcgcctgtcgctgctggttggctgtctggtagttgtgttatcgctgattatgggcgttattctcggcctgatcgccggttactttggcggcctggtcgataacatcattatgcgcgtggtcgatatcatgctggcgctgccaagtctgctgctggcgctggtggcaattttcggcccgtcgattggtaacgccgcgctggcactgaccttcgttgccttgccgcactatgtgcgcttaacccgcgccgccgtgctggtggaagttaaccgcgattacgtcaccgcgtctcgcgtggcgggtgccggggcgatgcgtcagatgtttattaacatcttcccgaactgccttgcgccgctgattgttcaggcgtcgctcggtttctctaacgccattctcgatatggctgctcttggtttcctcggcatgggggcacagccgccaacgccggagtggggcaccatgctctccgacgtgttgcagttcgcgcaaagcgcctggtgggtcgtgaccttcccgggtctggcgatcctgctgacggtgctggcatttaacctgatgggtgacggtctgcgtgacgcgctcgatcccaaactgaagcagtaa

SEQ ID NO: 460357 - DNA, 984 bp, Shigella boydii
atggtgttattaaatgtagataaattatcggtgcatttcggcgacgaaagcgcaccgttccgcgccgtagaccgcatcagctacagcgtaaaacagggcgaagtggttgggattgtgggtgagtccggctccggtaagtcggtcagttccctggcgattatggggctgattgattatccgggccgcgtaatggcggaaaaactggtgtttaacggtcaggatttgcagcgtatatcagaaaaagagcgccgcaacctggtgggtgccgaagtggcgatgatcttccaggacccgatgaccagccttaacccgtgctacaccgtgggtttccagatcatggaagcgattaaggtgcatcagggcggcaacaaaagtacccgccgtcagcgggcgattgacctgctgaatcaggtcggtattcccgatccggcttcgcgtctggatgtttacccgcatcagctttccggcggcatgagccagcgcgtgatgatcgccatggcgattgcctgtcgaccaaaactgctgattgccgatgagccgaccaccgcgctggacgtgaccattcaggcgcaaatcatcgaactactgctggagctacagcagaaagagaacatggcgctggtgttgattacccatgacctggcgctggtggcggaagctgcgcataaaatcattgtgatgtatgcaggccaggtggtggaaacgggcgatgcgcacgccatcttccatgcgccgcgtcacccgtatactcaggcattgctgcgtgcgctgccagaatttgctcaggacaaagaacgtctggcgtcgttgccaggtgtcgttcccggcaagtacgaccgcccgaacggctgcctgcttaacccgcgctgcccctatgccactgacagatgtcgcgctgaagaaccggcgctgaatatgctcgctgacgggcgtcagtccaaatgccattacccacttgatgatgccgggaggccgacactatga

SEQ ID NO: 460358 - DNA, 1005 bp, Shigella boydii
atgagtacgcaagaggccaccctgcaacaaccgctgttgcaggctatcgacctgaaaaaacattatccggtgaagaaaggcatgttcgcgccggaacgtctggttaaagcgctggatggcgtttcgtttaaccttgaacgtggcaaaacgctggcagtagtgggcgaatctggctgcggtaaatcgaccctcggtcggttgctgacgatgattgaaacgcccaccggtggcgagctgtattaccaggggcaggatctgcttaagcacgatccgcaggcgcagaagctgcgtcggcagaaaatccagatcgtcttccagaacccttacggttcgctgaatccgcgtaaaaaagtcgggcaaattcttgaagagccgctgctgatcaacaccagcttaagcaaagaacagcgtcgggaaaaagccctgtcgatgatggcgaaagtcggcctgaaaaccgagcactatgaccgctatccgcatatgttctccggcggtcagcgtcagcgtatcgccatcgcccgtggtctgatgctcgacccggatgtggtgattgccgatgaaccggtttccgcgctggatgtttcagtgcgcgcgcaggtgctgaatctgatgatggatttgcagcaggagttggggctgtcttatgtctttatctcccacgacctgtcggtggtggagcacattgccgatgaagtgatggtgatgtacctgggccgctgcgtggagaagggaacgaaagaccaaatcttcaataacccgcgccatccgtacactcaggcgctactttccgcgacgccgcgcctgaacccggacgatcgccgcgagcgcatcaagctcagcggtgaactaccaagcccactgaatccaccgccgggttgcgccttcaacgcccgctgtcgtcggcgcttcggcccctgcacccagttgcagccgcagctaaaagactacggcggtcaactggtagcttgttttgctgttgatcaggatgaaaatccgcagcgttaa

SEQ ID NO: 460359 - DNA, 1272 bp, Shigella boydii
atgcagcacaacacactatcgaaacacaatcagaaattgccgtttacacgctacgacttcggctgggttttattatgcataggcatggcgattggtgccggaaccgtgctgatgccagtacaaattggcttgaagggaatttgggtatttattaccgcagcgatcattgcttatcctgccacctgggtagtgcaggacatttatttaaaaaccctttctgaaagcgattcctgtaatgactacaccgatattatcagtcattacctggggaagaactggggaattttcctcggggttatctactttttgatgattatccacgggatttttatctactctctctccgtggttttcgacagcgcctcgtacctgaaaaccttcggtttaaccgatgccgatctttcacaatctctactttataaagtcgctattttcgccgtactggtagcgattgcgtctggtggtgaacgattactgtttaagatttccgggccaatggtggtggtcaaagtagggattattgtcgtgttcggttttgcgatgatcccgcactggaatttcgccaatataaccgccttcccgcaagcctccgtctttttccgcgatgtcctgcttacaattccattttgcttcttttctgcggtatttattcaggtacttaacccaatgaatattgcctatcgtaaacgggaagcagataaagtactggcaacccggctcgcgctgcgtacccaccgaattagttatatcacgctcatcgcggtgatcctgttttttgccttttcgtttaccttctcaattagccacgaagaagccgtttctgcctttgaacaaaatatctcggcactggcactggccgcgcaggtgatccctggacatatcattcatatcacctctacggtgctgaatatctttgccgtactgaccgcattctttggcatttatctcggtttccacgaggctattaaaggcattattctcaatctgttaagccgaattattgataccaagaaaattaactcacgcatgctgactctggcgatctgcgcttttatcgtcattacgttgacgatttgggtttcgtttcgtgtatcggtgctggtgttctttcagttgggaagcccgttatatggcattgtgtcgtgcctcattccgtttttcctgatctataaagtcgcacaactggaaaaacttcgcggatttaaagcctggctaattctgctttacggcattttgctatgcttgtcgccactgttgaagctgattgagtaa

SEQ ID NO: 460360 - DNA, 432 bp, Shigella boydii
atgaaaacacgtgatggtgaactagggttgtttgctgcaatggaaaataatcaccctttgtgtgtcacacggttcctctctaaaattaatggcatcgcctttaaatacaagttgagcaaagctaacatcatggatttattaaaaggcgctacagcacatggaacccctgtattatacatcgccatgagcaagggtaatgaagacgtcgtgttatcttatatatcgacgctgaatatttttgcaaaaaaatattcttttagtcaacgtcagttattcacactgttggccgctaaaaatcatgacaacatgtcagctgttcatatagccattcatcataatcattataaaactgtaaaaacatattatgctgctataaatgtaatcagccaaagcctgagttttagtgctgatgaactaaagacgtatttataa

SEQ ID NO: 460361 - DNA, 1482 bp, Shigella boydii
atgagtcaaaacgatatcattatcagaactcattataagtctcctcatagattgcacatcgatagcgacataccaacgccttcatcagagcttattaatcaatttgcgcgccaactcatcaccctacttgatacctctgacttaagttcgatgctgtcatactgtattactcaggaatttaccgcaaactgtcgaaaaatatcacaaaattgttactccactgccctttttatcattaactttgccacttcacccatccatgcagaaaatatacttattacattacactataaaaaagaaatcattcccttatttctggaaaccacgcctattaaggctaaccatttgcgaagcatactggattatattgagcaggaacagttaactgccgaagatcgtaaccattgtatgaaactgtctaaaaaaagccatagagaaaaaactatacaaccaacagtaaatctcaatggtagtgcatgttttttgcaatctccttctgacgctattttttgtcgccatctgtcattgcaatacgcccttgattcattgagaaatggaaaaggcaaagtcaacctgattaaacattactcctccgttgaatccatacagcagcatgtccccttagtccgggatgcggagttcagagcattacttcgccatcctcctgcagggagtcgcgttatcgcgagtaaggattttggcttcgctttagatattttcttttgtcgaatgatggcaaacaatgtcagtcatatgtccgcgattttatatatagacaatcatactttgtcagtaaggctacgaataaagcagttagtgtatggacaattaaactatgtagtgtccgtctacgacccgaacgataccaacgttgccgtcagaggcacccacaggacagcacggggctttctttcgcttgataagttcatcagttcaggtcccgatgctcagagctgggctgacaggtatgttcgcaactgtgcaattgctattctgcccctattacctgtgggagttccaggggctattttcgcgggtattgcatcacgaatgccatttgcccctatacatccatcggcaatgttgttaataatggccacaggccagactcaacagcttattacattattcaaacagttgcccatactccctgaaaaagaaatcattgaaataataactgcgcagaatagcgttggtacacctgctttatttctggctatgatgaacggacatactgacaacgtaaaaatatttatgcaagaaattcagtcactgatatacaatcatatcattcatgaagataatctggttaaattactgcaaactaaaagtgctaacgaaacacctgggctctatatctccatgttgtatgggttcgatgaaacaatcgatatctttctgaatgcattaaccactccaatagcacaagagcttttaaacaaaaaaaatagtgatggatattttagcaatgaaaacacgtga

SEQ ID NO: 460362 - DNA, 1929 bp, Shigella boydii
atgcctgttataactcttcctgatggcagccaacgccattacgaccacgctgtaagccccatggatgttgcgctggacattggtccaggtctggcgaaagcctgtatcgcagggcgcgttaatggcgaactggttgatgcttgcgatctgattgaaaacgacgcacaactgtcgatcattaccgccaaagacgaagaaggtctggagatcattcgtcactcctgtgcgcacctgttagggcatgcgattaaacaactttggccgcataccaaaatggcaatcggcccggttattgacaacggtttttattacgacgttgatcttgaccgcacgttaacccaggaagatgtcgaagcactcgagaagcggatgcatgagcttgctgagaaaaactacgacgtcattaagaagaaagtcagctggcacgcagcgcgtgaaactttcgccaaccgtggggagagctacaaagtctccattcttgacgaaaacatcgcccatgatgacaagccaggtctgtacttccatgaagaatatgtcgatatgtgccgcggtccgcacgtaccgaacatgcgtttctgccatcatttcaaactaatgaaaacggcaggggcttactggcgtggcgacagcaacaacaaaatgttgcaacgtatttacggtacggcgtgggcagacaaaaaagcacttaacgcttacctgcagcgcctggaagaagccgcgaaacgcgaccaccgtaaaatcggtaaacagctcgacctgtaccatatgcaggaagaagcgccgggtatggtattctggcacaacgacggctggaccatcttccgtgaactggaagtgtttgttcgttctaaactgaaagagtaccagtatcaggaagttaaaggtccgttcatgatggaccgtgtcctgtgggaaaaaaccggtcactgggacaactacaaagatgcaatgttcaccacatcttctgagaaccgtgaatactgcattaagccgatgaactgcccgggtcacgtacaaattttcaaccaggggctgaagtcttatcgcgatctgccgctgcgtatggccgagtttggtagctgccaccgtaacgagccgtcaggttcgctgcatggcctgatgcgcgtgcgtggatttacccaagatgacgcgcatatcttctgtactgaagaacaaattcgcgatgaagttaacggatgtatccgtttagtctatgatatgtacagcacttttggcttcgagaagatcgtcgtcaaactctccactcgtcctgaaaaacgtattggcagcgacgaaatgtgggatcgtgctgaggcggacctggcggttgcgctggaagaaaacaacatcccgtttgaatatcaactgggtgaaggcgctttctacggtccgaaaattgaatttaccctgtatgactgcctcgatcgtgcatggcagtgcggtacagtacagctggacttctccttgccgtctcgtctgagcgcctcctatgtgggcgaagacaacgagcgtaaggtaccggtaatgattcaccgcgcaattctggggtcgatggaacgtttcatcggtatcctgaccgaagaattcgctggtttcttcccgacctggcttgcgccagttcaggttgttatcatgaatattaccgattcacagtctgaatacgttaacgaattgacgcaaaaactatcaaatgcgggcattcgtgttaaagcagacttgagaaatgagaagattggctttaaaatccgcgagcacactttgcgtcgcgtcccatatatgctggtctgtggtgataaagaggtggaatcaggcaaagttgccgttcgcacccgccgtggtaaagacctgggaagcatggacgtaaatgaagtgatcgagaagttgcaacaagagattcgcagccgcagtcttaaacaattggaggaataa

SEQ ID NO: 460363 - DNA, 435 bp, Shigella boydii; identical to SEQ ID NO: 1390

SEQ ID NO: 460364 - DNA, 198 bp, Shigella boydii; identical to SEQ ID NO: 1389

SEQ ID NO: 460365 - DNA, 357 bp, Shigella boydii
atggctcgcgtaaaacgtggtgttattgcacgcgcacgtcacaagaaaattttgaaacaagctaaaggctactacggtgcgcgttctcgcgtataccgcgttgccttccaggctgttatcaaagctggtcagtatgcttaccgtgaccgtcgtcaacgtaagcgtcagttccgtcaactgtggattgcacgtatcaacgcagcagcacgtcagaacggtatttcttacagcaaattcatcaatggcctgaaaaaagcctctgttgaaatcgaccgtaagatcctggctgatatcgcagtattcgacaaagtagcgttcaccgctctggttgaaaaagcgaaagcagctctggcataa

SEQ ID NO: 460366 - DNA, 984 bp, Shigella boydii
atgtcacatctcgcagaactggttgccagtgcgaaggcggccattagccaggcgtcagatgttgccgcgttagataatgtgcgcgtcgaatatttgggtaaaaaagggcacttaacccttcagatgacgaccctgcgtgagctgccgccagaagagcgtccggcagctggtgcggttatcaacgaagcgaaagagcaggttcagcaggcgctgaatgcgcgtaaagcggaactggaaagcgcagcgctgaatgcgcgtctggcggcggaaacgattgatgtctccctgccaggtcgtcgcattgaaaacggcggtctgcatccggttacccgtaccatcgaccgtatcgaaagtttcttcggtgagcttggctttaccgtggcaaccgggccggaaatcgaagacgattatcataacttcgatgctctgaacattcctggtcaccacccggcgcgcgctgaccacgacactttctggtttgacactacccgcctgctgcgtacccagacctctggcgtacagatccgcaccatgaaagcccagcagccaccgattcgtatcatcgcgcctggccgcgtttatcgtaacgactacgaccagactcacacgccgatgttccatcagatggaaggtctgattgttgataccaacatcagctttaccaacctgaaaggcactctgcacgatttcctgcgtaacttctttgaggaagatttgcagattcgcttccgtccttcctacttcccgttcaccgagccttctgcagaagttgacgtcatgggtaaaaacggtaaatggctggaagtgctgggttgcgggatggtgcatccgaacgtgctgcgtaacgttggcatcgacccggaagtttactctggtttcgccttcgggatggggatggagcgtctgactatgttgcgttacggcgtcaccgacctgcgtttattcttcgaaaacgatctgcgtttcctcaaacagtttaaataa

SEQ ID NO: 460367 - DNA, 2388 bp, Shigella boydii
atgaaattcagtgaactgtggttacgcgaatgggtgaacccggcgattgatagcgatgcgctggcgaatcaaatcactatggcgggcctggaagttgacggtgtagaaccggttgccggtagcttccacggcgtggtcgttggtgaagtggttgagtgtgcgcagcatccgaacgctgacaaactgcgtgtgacaaaagtgaatgtcggcggcgatcgcctgctggacatcgtctgtggtgcgccaaactgccgtcagggcctgcgtgtggcggtagctaccattggtgctgttctgccgggtgatttcaaaattaaagcggcgaaactgcgtggcgaaccgtctgaagggatgctgtgctccttctctgaactgggaatttctgacgatcacagcggcattatcgaactgcctgcagatgcgccgattggcactgacatccgcgaatacctgaaactcgatgacaacaccatcgaaatcagcgtaacgccaaaccgtgccgactgcttaggtatcattggtgttgcgcgtgacgttgccgtgctgaatcagctgccgctggttgaaccggaaatcgttccggttggtgcgaccatcgacgacacgttgccgattacagtcgaagcgcctgaagcctgcccgcgctatcttggccgtgtggtaaaaggcattaacgttaaagcgccaactccgctgtggatgaaagaaaaactgcgtcgttgcgggatccgttctatcgatgcagttgttgacgtcaccaactatgtactgctcgaactgggccagccgatgcacgctttcgataaagatcgcattgaaggcggcattgtggtgcggatggcaaaagagggcgaaacgctggtgctgcttgatggcactgaagcgaagctgaatgctgacactctggtcatcgccgaccacaacaaggcgctggcgatgggcggcatctttggtggcgaacactctggcgtgaatgacgaaacgcaaaacgtcttgctggaatgcgctttcttcagcccgctgtctatcaccggtcgtgctcgtcgtcatggcctgcatactgatgcgtctcaccgttatgagcgtggcgttgatccggcactgcagcacaaagcgatggaacgtgcgacccgtctgctgatcgacatctgcggtggtgaggctggtccggtaattgatatcaccaacgaagcaacgctgccgaagcgtgcaaccatcactttacgtcgtagcaaactggattgcctgatcggccatcatattgctgatgaacaggtaactgacattctgcgtcgtctcggctgcgaagtgaccgaaggcaaagacgagtggcaggcagttgcgccgagctggcgtttcgatatggagattgaagaagatctggtcgaagaagtcgcgcgtgtttacggctacaacaacatcccggatgagccggtacaggcaagcctgattatgggtactcaccgtgaagctgacctgtcgctcaaacgcgtgaaaacgctgctcaacgacaaaggctatcaggaagtgatcacctacagcttcgttgatccgaaagtgcagcagatgatccatccaggcgttgaagccttactgctgccaagcccgatctctgttgaaatgtcagcaatgcgtctttctctgtggaccggcctgctggcaaccgtggtgtacaaccagaaccgtcagcagaaccgtgtgcgcattttcgaaagcggtctgcgtttcgtaccagatactcaggcaccgttgggcattcgtcaggatctgatgttagccggtgtgatttgcggtaaccgttacgaagagcactggaacctggcaaaagagaccgttgatttctatgatttgaaaggcgatcttgaatccgttctcgacctgaccggtaaactgaatgaggttgagttccgtgcagaagcgaatccggcactgcatccggggcaatccgcagcgatttatctgaaaggggaacgtattggttttgttggagttgttcatcctgaactggaacgtaaactggatcttaacggtcgcactctggtgttcgaactggagtggaacaagctcgcagaccgcgtggtgcctcaggcgcgcgagatttctcgcttcccggcgaaccgtcgtgacatcgcggtggtggtcgcagaaaacgttcccgcagcggatattttatccgaatgtaagaaagttggcgtaaatcaggtagttggcgtaaacttatttgacgtgtaccgcggtaagggtgttgcggaggggtataagagcctcgccataagcctgatcctgcaagataccagccgtacactcgaagaagaggagattgccgctaccgtcgccaaatgtgtagaggcattaaaagagcgattccaggcatcattgagggattga

SEQ ID NO: 460368 - DNA, 300 bp, Shigella boydii; identical to SEQ ID NO: 1385

SEQ ID NO: 460369 - DNA, 141 bp, Shigella boydii; identical to SEQ ID NO: 5443

SEQ ID NO: 460370 - DNA, 1314 bp, Shigella boydii
atgaaaaatataaaattcagcctggcctggcagattctgtttgctatggtgctgggcattctcctgggaagctacctgcactaccatagcgacagccgcgactggctggtcgtcaatttgctctctccggcgggtgatatcttcatccatctgattaaaatgattgttgtgccgattgtgatctccacgctggtggtgggtatcgcgggtgtgggtgatgccaaacagctcgggcgtattggcgcgaaaaccattatttacttcgaggtgatcaccaccgtcgccatcattttggggatcactctggcgaacgtcttccagcccggtgccggggtggatatgtcgcagctggcgaccgtcgatatctcgaaatatcagagcactacggaagcggtacaaagcagttcccacggcattatgggcacgattttgtcgctggtgccgacgaacattgtggcgtcgatggcgaaaggcgaaatgctgccgatcatcttcttctcggtgctgtttggtctggggctttcctccctgcccgcgacgcatcgtgaaccgctggtgaccgtgttccgctccatctctgaaaccatgtttaaagtgactcacatggtgatgcgttatgcaccggtgggtgtgtttgcgctgattgcggtgacggtggctaactttggtttctcttctctgtggccactggcgaaactggtgctgctggtgcatttcgccattctgttcttcgcgctggtagtgctgggaattgtggcgcgcctgtgcgggttaagcgtctggatcctgattcgtattctgaaagatgagctgattctggcgtactccactgccagctctgaaagcgtactgccgcgaattattgagaagatggaagcctacggagcaccggcgtcgatcaccagcttcgtggtgccgaccggttactcttttaaccttgatggttcgacgctgtatcaaagtattgccgctattttcatcgctcagctgtatggcattgacctgtccatctggcaggaaatcattctggtgctgacgctgatggtgacctcgaaagggattgctggcgtgccgggcgtgtcgtttgtggtgttgctggcaacgctgggtagcgtaggtattccgctggaaggtctggcgtttattgctggtgttgaccgtatcctcgacatggcgcgtactgcgctgaacgtggtgggtaatgcgctggcggtgctggtgattgccaagtgggaacacaaatttgaccgcaaaaaggcgctggcttatgagcgtgaagtgctgggcaaatttgataaaactgcggatcaataa

SEQ ID NO: 460371 - DNA, 597 bp, Shigella boydii
atgaaagagcccaaaataccggtgaaaatgctgacaacactcacgattttgatggtatttctctgtgtcggcagttatctgttaagtccaaaatggcaggcggtacatgcggaatatcagcgtcagcgcgatccgctacatcagtttgccagccagcaaaccccggaagcgcagcttcaggcattgcaggataaaatccgcgctaatccacaaaacagcgaacaatgggcgttactgggcgagtactatctgtggcaaaacgattacagcaattcgctgctggcgtaccgtcaggcgttgcaactacgtggtgagaacgctgaactgtatgcggcgctggcgacggtgctttattaccaggccagccagcatatgaccgcccagactcgcgcaatgatcgacaaagccctcgcgctggactctaacgaaatcaccgctctgatgctgctggcttccgatgcgtttatgcaggcgaattacgcgcaagccatcgaactatggcaaaaagtgatggatctcaactcaccccggatcaaccggacacagctggtcgagtcgattaatatggcgaaattgttgcagcggagatcggattaa

SEQ ID NO: 460372 - DNA, 384 bp, Shigella boydii
atgaataaaggacttctcacgctactgctgttatttacctgttttgcgcgcgctcaggtcgtagacacctggcaattcgccaatccgcaacaacagcaacaggcgttaaatattgccagccagttacgttgtccgcagtgccagaatcaaaacttactggaatccaacgcgccggtggcagtcagtatgcgccatcaggtttacagcatggtggcggaggggaagaacgaagtcgaaatcattggctggatgaccgaacgctacggagattttgttcgctataacccaccgttaacgggtcagacgctggtgttgtgggcgctgccagtggtgttgttactgctgatggcactgatcctctggcgagtgagggcgaagcgatga

SEQ ID NO: 460373 - DNA, 1623 bp, Shigella boydii
ttgcgctggcctgccatgatgcgactcacttgcatcggcattctggcgcagttcgcgctcctgctgctcgcctttggcgtactgacgtattgttttctcatcagcgatttctcggtcatttatgtcgcccaacatagctacagcctgctgtcgtgggaactcaaactggcggcggtgtggggcggtcatgaaggttcgctgctgctttgggtgctgctgctttccgcctggagcgcgctgtttgcctggcattatcggcagcaaaccgatccgctatttccgctgacgctagccgttttatctctcatgctcgccgcactgctactgtttgtggtgctgtggtccgatcccttcgtgcggatatttccaccagcaatcgaaggccgcgatctcaatccgatgctgcaacatcccggtcttatctttcatccaccgctgctttaccttggctatggcggtttgatggtagcggcgagcgtggcgctggcgagtctactgcgcggcgagtttgatgcggccagcgcccgaatttgctggcgctgggcgttacctggctggagtgcattaacggcggggatcatcctcggttcctggtgggcctactgcgaactcggctggggcggctggtggttctgggatccggtggaaaatgcctctttattaccctggctttctgccactgcgctgctgcacagtttatccctgacacgccagcgggggatttttcgccactggtcgctgttactggcgatagttactctgatgctgtcgctgctgggcaccttaattgtccgttctggcattctggtttcggttcatgcgttcgcgctggataacgtccgcgccgtgccgttgttcagcctgtttgcactgattagccttgcgtctctggctctgtatggctggcgagcgcgggacggtggcccggcggtgcgtttttcggggttatcgcgggaaatgttaatcctcgctacgctgttgctgttttgcgcagtgctactgatcgtgctggtgggaacgctttatccgatgatttacggtctgctgggctggggacgcctctccgttggcgcgccgtattttaaccgcgcgacgttaccgtttggtctgttgatgctggtggtgattgtgctggcgacgtttgtctctggcaaacgcgtgcagcttccggcgctggtagctcatgcgggcgtgctgttatttgccgctgggatcgtggtttccagcgtcagccgtcaggagatcagcctgaatttacagccgggtcagcaggtgacgctggcaggatacaccttccgttttgagcgcctcgatctgcaagccaaaggcaattacaccagcgaaaaagcgatagtggcactgtttgaccatcagcaacgcattggtgaactgatgccggagcggcgtttttacgaagcacgtcgtcagcaaatgatggaaccgtcaattcgctggaacggcatccatgactggtatgcggtcatgggtgaaaaaaccggagcggatcgttacgcttttcgcttgtatgtacaaagcggtgtgcgctggatctgggggggaggattgttgatgattgcgggcgcattgttaagcggatggcgggggaggaagcgcgatgaataa

SEQ ID NO: 460374 - DNA, 957 bp, Shigella boydii
atgacgcagacttccgcatttcattttgaatcgctggtgtgggactggccgattgccatctacctgtttttgattggtatttctgccggtctggtgacgctggccgtgctgttacgtcgcttctacccgcaggcgggcggtgcagacagtacgttgctgcgcaccacgctgattgtcgggccgggcgcggtgatcctcggtctgttgatcctcgtcttccacctgacaagaccgtggaccttctggaagctgatgttccactacagttttacctcggtgatgtcgatgggggtgatgctgtttgagctttacatggtggtgctggtgctgtggctggcgaaaatctttgaacatgatttgcttgccctgcaacaacgctggttgccgaagctggggatcgtgcaaaaggttctgagcctgctgacgcccgttcatcgcggactggaaacgctgatgctggtgttggcggtgctgctgggggcttataccggctttctgctgtcggcgctgaaatcgtatccgttcctcaataacccgatcctgccggtgctgttcctcttctccggcatctcgtccggtgcggcggtggcgctgatcgccatggcgatacgccaacgcagtaacccgcattccacggaagcgcactttgttcaccggatggaaatccccgtggtatggggtgaaatcttcctgctggtggcgttttttgtcggtctggcgctgggcgatgacggtaaagttcgtgcgctggtggcggcattaggtggcggtttctggacgtggtggttctggcttggtgtcgccgggctggggctgattgtgccaatgttgctcaaatcgtgggtcaatcgcagttccggcattcctgccgtgctggcggcgtgtggggccagtctggtcggcgtgttgatgctgcgctttttcattctctacgccggacagttgacggtggcgtaa

SEQ ID NO: 460375 - DNA, 672 bp, Shigella boydii
atgacctggtctcgtcgccagtttctcaccggcgtcggcgtgctggcagccgtcagcggcaccgcagggcgcgtggtggcgaaaacgttgaatatcaatggggtgcgttacggcatggtgcatgacgagtcgttatgcatcggctgtaccgcctgtatggatgcttgtcgagaagtgaacaaggtgccggaaggcgtctcgcgcctgacgattattcgtagcgagccgcagggcgaatttcctgatgtgaaatatcgcttcttccgtaagtcttgccagcactgcgatcatgcgccgtgcgttgacgtctgcccgaccggtgcgtcttttcgtgatgccgctagcgggattgtcgatgttaatcctgatctctgcgtcggttgtcagtactgcatcgccgcctgtccgtaccgcgtgcgctttatccatccggtcacgaagacggcggacaaatgcgatttctgccgtaaaaccaatttgcaggccggtaagctgcccgcgtgcgttgaggcttgcccgacgaaggcgctgacgtttggcaatctggacgatcctaacagtgagatttcgcaactgctgcgccagaagcctacttaccgctacaagctggcgctgggaaccaaaccgaagctgtaccgcgtaccgtttaaatacggggaggtgagccaatga

SEQ ID NO: 460376 - DNA, 567 bp, Shigella boydii
atgagcgtattacgttcgttattaactgctggggtgctggcgtcgggcctgttgtggagcctgaacggaattaccgctacccctgcggcgcaggcatctggtgatcgctacgaagttacccagcagcgtaacccggatgccgcctgtctggactgtcataaaccagataccgaaggtatgcatggcaaacatgcttccgttatcaacccgaataacaaattgccggtcacctgcaccaactgtcacggccagccatcaccgcaacaccgcgaaggggtgaaagatgtgatgcgctttaacgagccgatgtacaaggtcggagagcagaacagcgtctgtatgtcctgtcatctgccggaacagttgcaaaaagcgttctggccgcacgatgtccacgtaaccaaagtggcgtgcgccagctgccattccctgcatccacagcaagatacgatgcagacgttaagtgacaaaggacggattaagatttgcgtcgattgccacagcgatcagcgcaccaatccgaactttaacccggcgtctgttccgttgcttaaggagcagccatga

SEQ ID NO: 460377 - DNA, 1437 bp, Shigella boydii
atgacaaggataaaaataaacgcacgccgtatcttcagcttattgattccttttttctttttcacttctgttcacgctgaacaaacggcagctcccgcaaaacctgtaactgtggaagcgaagaatgaaacctttgccccgcagcatcccgatcaatatctctcctggaaagccacctcggaacagtcagagcgtgttgacgccctggcggaagatccacggctggtgatcctgtgggcggggtatcccttctcgcgcgattacaacaagccgcgtggacatgcctttgctgtgaccgatgtgcgtgaaaccctgcgtaccggtgcgccgaaaaacgctgaagatggtccgctaccgatggcgtgctggagttgtaaaagcccggatgtggcgcgtctgatccagaaagacggcgaagatggctacttccacggtaagtgggcgcgcggcggcccggaaatcgtcaacaacttaggttgtgccgactgccataacaccgcctcaccagagttcgccaaaggcaaaccggagttaaccctttcccgtccgtatgcggctcgcgcgatggaagccattggtaaaccttttgagaaagccggacgtttcgaccagcaatcgatggtttgcggtcagtgccatgtggagtattacttcgacggcaaaaacaaagcggttaaattcccgtgggatgacggcatgaaagtcgaaaatatggagcagtattacgacaaaattgccttctctgactggactaactccctgtcgaaaacgccaatgctgaaagcgcagcacccggaatatgaaacctggacagcgggcattcacggtaaaaacaacgtgacctgtatcgactgccatatgccaaaagtgcagaacgccgaaggcaaactctacaccgaccataaaattggtaatccgtttgataacttcgcccagacttgtgcgaactgccatacccaggacaaagctgccttgcaaaaagtggtcgcggaacgtaagcagtcgattaacgacctgaaaatcaaggttgaagatcaactggttcacgctcacttcgaagcgaaagcagcgctggatgcaggcgcgacggaagctgaaatgaagccaattcaggacgatatccgtcatgcccagtggcgctgggatctggcgatcgcttcccacggcattcatatgcacgcaccggaagaaggtttacggatgctcggtacggcgatggataaagcggcggatgcacgcaccaaactggcgcgcctgctggcgaccaaaggcatcacccatgaaatccagatcccggatatctcaaccaaagagaaagcccagcaggccattggcctgaacatggaacaaatcaaggccgagaagcaggacttcatcaaaacggtgatcccgcagtgggaagaacaggcacgtaaaaacggtctgttaagccaataa

SEQ ID NO: 460378 - DNA, 225 bp, Shigella boydii
atgagccaaattcacaaacacaccattcctgccaacatcgcagaccgttgcctgataaaccctcagcagtacgaggcaatgtatcaacaatctattaacgtacctgataccttctggggcgaacagggaaaaattcttgactggatcaaaccttaccagaaggtgaaaaacacctcctttgcccccggtaatgtgtccattaaatggtacgaggacggccgctga

SEQ ID NO: 460379 - DNA, 1356 bp, Shigella boydii
atggtacgaggacggccgctgaatctggcggcaaactgccttgaccgccatctgcaagaaaacggcgatcgtaccgccatcatctgggaaggcgacgacggcagccagagcaaacatatcagctataaagagctgcaccgcgacgtctgccgcttcgccaataccctgctcgagctgggcattaaaaaaggtgatgtggtggcgatttatatgccgatggtgccggaagccgcggttgcgatgctggcctgcgcccgcattggcgcggtgcattcggtgattttcggcggcttctcgccggaagccgttgccgggcgcattattgattccaactcacgactggtgatcacttccgacgaaggtgtgcgtgccgggcgcagtattccgctgaagaaaaacgttgatgacgcgctgaaaaacccgaacgtcaccagcgtagagcatgtggtggtactgaagcgtactggcgggaaaattgactggcaggaagggcgcgacctgtggtggcacgacctggttgagcaagcgagcgatcagcaccaggcggaagagatgaacgccgaagatccgctgtttattctctacacctccggttctaccggtaagccaaaaggtgtgctgcatactaccggcggttatctggtgtacgcggcgctgacctttaaatatgtctttgattatcatccgggtgatatctactggtgcaccgccgatgtgggctgggtgaccggacacagttacttgctgtacggcccgctggcctgcggtgcgaccacgctgatgtttgaaggcgtacccaactggccgacgcctgcccgtatggcgcaggtggtggacaagcatcaggtcaatattctctataccgcacccacggcgatccgcgcgctgatggcggaaggcgataaagcgatcgagggtaccgaccgttcgtcgctgcgcattctcggttccgtgggcgagccaattaacccggaagcgtgggagtggtactggaaaaaaatcggcaacgagaaatgtccggtggtcgatacctggtggcagaccgaaactggcggtttcatgatcacgccactgcctggcgctaccgaaggcagcctggtgatcaccgactcctggccgggtcaggcgcgtacgctgtttggcgatcacgaacgttttgaacagacctacttctccattggatttgcccctatatttccagacatctgttatcacttaacccattacaagcccgctgccgcagatattcccgtggcgagcgataacccagcgcactatgcggatgccattcgttataatgctcgaacgcctctgcaaggttctttgctgccgttaacccgtctggtttgggcatga

SEQ ID NO: 460380 - DNA, 1338 bp, Shigella boydii
atgtttatttgtgccggtttaggttcttctacgctttattggggggttgctgaatgggcctattattatcaaacacctggattaaatatcgcaccgcgttcacaacaggcactcgaatttagcgttccctactctttcttccactggggcatcagcgcctgggcaacttatacgctggcctcattaatcatggcttatcactttcatgtgcggaaaaacaaaggtctgagcctttccggcattattgctgctattaccggcgttcgcccgcaaggcccatggggaaaactggttgatttgatgttcctgatcgccactgtcggcgcactgactatttcccttgttgtcaccgcagcaacctttactcgtggactttccgcactgacaggtttacccgacaacttcaccgtgcaggcatttgtgatcctgctttctggcggcattttttgcctaagctcgtggattggtatcaacaacggtttgcaacgtctgagcaaaatggttggctggggcgcgttcctgctgccattactggtgctgattgtcggcccaaccgaatttattaccaacagcatcatcaatgccatcggcctgaccacgcaaaacttcctgcaaatgagcttattcaccgatccgcttggcgatggttcatttacccgcaactggaccgttttctactggctgtggtggatctcatacacccctggcgtagcaatgtttgtcacccgcgtttcccgcggtcgtaagattaaagaagttatctggggactgatcctcggcagcaccgtcggttgctggttcttcttcggcgtaatggaaagctatgccattcatcagtttatcaatggcgtaatcaacgtcccacaggtgctggaaacactgggcggcgaaacagctgtacagcaagttctgatgtcgttgccagccggtaaattgttcctcgccgcatacctgggcgtgatgattattttccttgcctcgcatatggatgcagtggcctacaccatggcggcgaccagtacgcgtaatctccaggaaggtgacgatcctgaccgtgggctgcgtcttttctggtgcgtggtgatcactctgatcccgctttccatcttgtttaccggtgcttcgctggaaacgatgaaaaccaccgtcgtgctcacagcccttcccttcctcgtcattttactggtgaaagtcggcggatttattcgctggctgaaacaggattacgccgacattccggctcatcaagttgaacattatctcccgcagacaccggttgaagccctggaaaaaacaccagtgatccctgcgggaaccgtattcaaaggcgacaactga

SEQ ID NO: 460381 - DNA, 1125 bp, Shigella boydii
atgagcaatctgagccctgactttgtactacccgaaaatttttgcgctaacccgcaagaggcgtggaccattcctgcccgtttttataccgatcagaacgcgtttgaacacgaaaaagagaacgtcttcgccaaaagctggatttgcgtcgctcacagcagcgaactggcgaatgccaatgattatgtgacgcgtgagatcattggcgaaagcatcgtgctggtacgcggtcgtgataaggttttgcgcgcgttctataacgtgtgtccgcaccgtggtcatcagttgttgagcggtgaaggaaaagcaaaaaatgtgattacctgcccgtatcacgcatgggcattcaaactcgatggcaatctggcccatgcacgtaactgcgaaaacgtcgccaatttcgatagcgacaaagcgcaactggttccggtgcgtctggaagaatatgccggattcgtcttcatcaacatggaccccaacgccaccagcgtagaagatcagttacccggtctgggcgcgaaagtgctggaagcctgcccggaagtccacgatctgaaactggcggcccgctttaccacccgcacgtctgccaactggaagaacattgtcgataactatctcgagtgctatcactgtggtccggcgcatccaggtttctccgactccgtacaggttgatcgttactggcacaccatgcacggtaactggacgctgcaatacggtttcgccaaaccgtccgaacagtcgtttaaatttgaagagggtacggatgcggcattccacggtttctggctgtggccgtgcacgatgctgaacgtcaccccgatcaaagggatgatgacggtcatttatgaattcccggtggattctgaaactaccctgcaaaactacgatatttacttcaccaatgaagagttaaccgacgagcaaaaatcgctgattgagtggtatcgcgatgtgttccgtccggaagatttacgtctggttgaaagcgtacagaaagggctgaaatcgcgtggctatcgtggtcaggggcgcatcatggccgacagtagcggtagtggcatttccgaacatggtatcgcccatttccataatctgctggcgcaggtgtttaaggactaa

SEQ ID NO: 460382 - DNA, 966 bp, Shigella boydii
atgtcagactatcaaatgtttgaagtacaggtgagccaggttgaaccccttaccgaacaggtgaaacgcttcacgctggtggcaaccgatggcaaaccgctgcctgcgttcaccggaggaagtcacgtcattgtgcagatgagcgatggtgataaccagtacagcaatgcgtattcactactgagttcgccgcatgacacctcttgttatcagattgccgttcggctggaggaaaactcgcgcggcggttcccgctttttgcatcagcaggtaaaagtgggcaatcggttaacgatttcaacgcctaataacctgtttgcgctaattccctcagccagaaagcatctgtttatcgcgggcggtattggtatcacccctttcctgtcgcacatggcagagctgcaacacagcgacgtcgactggcagctacattactgctcgcgaaatccagaaagttgcgcatttcgtgatgagctagtccagcatccgcaggctgagaaagttcacttgcatcactcatcaaccggaacacgactggaattagcgcgattattggcggatatcgaacctggcacacacgtttatacctgtggtcccgaggcgctaaatgaagcggtaagaagtgaagctgcgcgtctggacatcgccgccgatacgctgcactttgagcaatttgctatcgaagacaaaaccggcgatgcctttaccctggtgcttgcctgttccggaaaagagtttgtggtgccggaagagatgactattttgcaggttattgaaaataataaagccgcgaaagtggaatgtttatgtcgtgaaggggtatgcggaacctgcgaaacagcaatactggaaggtgaagctgaccatcgggatcagtattttagcgatgaagagcgtgccagccagcaaagtatgttgatctgttgttcgcgtgcgaagggtaaacgcctggtgttggatttgtag

SEQ ID NO: 460383 - DNA, 180 bp, Shigella boydii
gtgagcgaaacgcataagatcagcgccgaattgctggcatcgcgtcggcaaatcaaccaactgctgaactggcactggagactgaaaccgcagaacaatttgccggagctgatttccggctggcgtggtgagctgatggcggaagcattacacaatttattgcaggaatatccgcagtaa

SEQ ID NO: 460384 - DNA, 939 bp, Shigella boydii
atgattaccacggacgatgcgctggcttctttgtgtgaagccgtccgtgcctttccggcgatagccctggatactgaatttgttcgtacgcgcacttattacccgcagctggggttgattcaacttttcgatggcgagcatctggcgctaattgatcctctcgggatcaccgactggtcaccgctgaaagcgatcctgcgcgatccgtccatcacaaaatttctccatgcaggcagtgaagatctggaagtgttcctcaatgtctttggcgaattaccacaacccttgattgacacgcaaatcctttctgccttctgcggacgcccgatgtcatggggtttcgcttccatggtggaagagtattccggcgttacgctggacaagagtgaatcgcgcaccgactggctggccagaccgctgaccgaacgtcagtgtgaatacgcagcggcggatgtctggtatctgttaccgatcaccgccaagcttatggtagaaacggaggcctccggctggctacctgcggcgctggatgaatgccgcctgatgcaaatgcgtcgtcaggaagtcgttgcgccggaagatgcctggcgtgatatcaccaatgcctggcagttacgcacacgccaactggcctgtctgcaactgttagccgactggcgactgcgcaaggcgcgagagcgtgatctggcggtgaactttgtcgtgcgtgaagagcatttgtggtcggtcgcgcgttatatgccgggaagtttaggcgaactggacagcttgggtttatccggtagcgaaatccgctttcacggtaaaacgctgctgacgctggtggaaaaagtgcagacattgccggaagaggccttaccgcagccgatgcttaacctgatggacatgcctggttatcgtaaagcgtttaaagcgattaagtcgctgattactacgtga

SEQ ID NO: 460385 - DNA, 1752 bp, Shigella boydii
atgttaacggcatgtatatcatttggggttgcgatgacgacgaacacgcattttagaggtgaagaattgaagaaggtttggcttaaccgttatcccgcggacgttccgacggagatcaaccctgaccgttatcaatctctggtagatatgtttgagcagtcggtcgcgcgctacgccgatcagcctgcgtttgtgaatatgggggaggtgatgaccttccgcaagctggaagaacgcagtcgcgcgtttgccgcttatttgcaacaagggttggggctgaagaaaggcgatcgcgttgcgttgatgatgcctaatttattgcaatatccggtggcgctgtttggcattttgcgtgccgggatgatcgtcgtaaacgttaacccgttgtataccccgcgtgagcttgagcatcagcttaacgatagcggcgcatcggcgattgttatcgtgtctaactttgctcacacactggaaaaagtggttgataaaaccgccgttcagcacgtaattctgacccgtatgggcgatcagctatctacggcaaaaggcacggtagtcaatttcgttgttaaatacatcaagcgtttggtgccgaaataccatctgccagatgccatttcatttcgtagcgcactgcataacggctaccggatgcagtacgtcaaacccgaactggtgccggaagatttagccttcctgcaatacaccggcggcaccacaggtgtggcgaaaggcgcgatgctgactcaccgcaatatgctggcgaacctggaacaggtcaacgccacctatgggccgttgctgcatccaggtaaagaactggtagtaacggcactgccgctgtatcacatttttgccctgaccattaactgcctgctgtttatcgaactgggtgggcagaacctgcttatcactaacccgcgtgatattccagggttggtaaaagagttagcgaaatatccgtttaccgctatcactggcgttaacaccttgttcaatgcgttgctgaacaataaagagttccagcagctggatttctccagtctgcatctttccgcaggcggtgggatgccagtgcagcaagtggtggcagagcgttgggtgaaactgaccggacagtatctgctggaaggctatggccttaccgagtgtgcgccgctggtcagcgttaacccatatgatattgattatcatagtggtagcatcggtttgccggtgccgtcgacggaagccaaactggtggatgatgatgataatgaagtaccaccaggtcaaccgggtgagctttgtgtcaaaggaccgcaggtgatgctgggttactggcagcgtcccgatgctaccgatgaaatcatcaaaaatggctggttacacaccggcgacatcgcggtaatggatgaagaaggattcctgcgcattgtcgatcgtaaaaaagacatgattctggtttccggttttaacgtctatcccaacgagattgaagatgtcgtcatgcagcatcctggcgtacaggaagtcgcggctgttggcgtaccttccggctccagtggtgaagcggtgaaaatcttcgtagtgaaaaaagatccatcgcttaccgaagagtcactggtgactttttgccgccgtcagctcacgggatacaaagtaccgaagctggtggagtttcgtgatgagttaccgaaatctaacgtcggaaaaattttgcgacgagaattacgtgacgaagcgcgcggcaaagtggacaataaagcctga

SEQ ID NO: 460386 - DNA, 582 bp, Shigella boydii
atggcggttcaaaagaatgttatcaaaggcatactggcaggtacgtttgcgctaatgctgagcggttgtgtcactgtgccggacgccattaaaggcagcagtcccacgccgcaacaagatttagttcgggtgatgagtgcgccgcagctgtacgttggtcaggaggcacgctttggtggcaaagtggttgcggtacaaaaccagcaagggaaaacccgcctggaaattgctaccgtaccgctggacagcggagccagaccgacgctgggagaaccttctcgcggtcgcatttatgccgatgtgaacggttttctggacccggtggatttccgtggacaactggttacggtagtcgggccaatcactggtgcggttgacggcaaaatcggcaatacgccctataaatttatggtgatgcaagtaacgggttacaaacgttggcatttaacccagcaggtgattatgccgcctcagccgattgatccatggttttatggcggtcgtggctggccctatgactacggcggatggggctggtataatcccggtcccgcgagagtacaaacagttgtaactgaataa

SEQ ID NO: 460387 - DNA, 696 bp, Shigella boydii
atgcgaattctggctatcgataccgcgacagaggcctgctctgtcgccctgtggaacgacggtactgtcaacgctcattttgagctttgccctcgtgaacatactcaacgaatcttaccgatggtgcaggatatcctgaccaccagcggaacttccctgactgatattaacgctctggcttacgggcgcggccccggtagctttaccggcgtgcgcattggtattggcattgcgcaagggctggcacttggcgcagagctgccgatgattggcgtctccacgctaatgacaatggcgcaaggggcgtggcgcaaaaacggcgcaacccgcgtgctggctgccattgatgcgcggatgggcgaagtttactgggccgaatatcagcgtgatgaaaacggtatctggcgcggtgaagaaaccgaagccgtactcaaacccgaactcgttcatgaacgaatgcaacagctttccggcgaatgggtaacggtagggacgggctggcaagcctggccggatctcggtaaagagagcgggctggttttgcgcgacggagaagttttactgccagcgacggaagatatgctgccgattgcgtgtcagatatttgccgagggtaaaacggtggcggtggaacatgccgaaccggtttatttacgtaacaacgtcgcatggaagaaacttccgggcaaagaatga

SEQ ID NO: 460388 - DNA, 1911 bp, Shigella boydii
gtgacggacgattttgcaccagacggtcagctggcgaaagcgataccaggctttaagccgcgagaaccacagcgacagatggcggtagccgtcacccaggcgatagaaaaaggccagccgctggtggtggaagcaggaaccggtacgggcaaaacctacgcttacctggctcctgcgctgcgggcgaaaaagaaagtcattatctcgaccggctcaaaagcgttgcaggatcagctctacagccgcgatttgccaacagtctcaaaggcattgaaatatacgggcaacgtggcgctgctgaaagggcgctcaaactacctctgcctcgaacgtctcgaacagcaggcgctggcggggggcgatctgccggtacaaatcttaagcgatgtgatcctgctgcgctcctggtctaatcaaacagtcgatggtgatatcagcacctgcgtcagcgtggcggaagattcacaggcgtggccgctggttaccagcaccaacgacaactgtcttggcagcgactgcccgatgtataaagattgctttgtggtcaaagcacgtaaaaaagcgatggacgccgatgtggtggtggtaaaccatcatctctttctggcggatatggtggttaaagagagtggatttggcgaactgatcccggaagcggacgtcatgatcttcgacgaagcccaccagctaccggacattgccagccagtattttggtcagtcactctccagtcgacaactgctcgacctggcaaaagacatcaccatcgcctaccgcaccgaattaaaagacacccagcagttacaaaagtgcgctgatcgtcttgcccagagtgcgcaggattttcgtctgcaactcggtgagccaggttatcgaggtaacctgcgtgagctgttagctaatccgcaaattcagcgggcatttttactgctcgatgacaccctggaactttgttatgacgtggcgaaactgtcactggggcgttccgccttgctggatgcggcatttgagcgcgctacgttgtatcgcacacggctgaagcggctaaaagagatcaatcagccgggctacagctactggtacgaatgcacttcgcgccattttactctggctctcacgccgctcagcgtggcggataaattcaaagagttaatggcgcaaaagcttggtagctggatcttcacctcagcaacgctgtcggtgaacgacgatctgcatcatttcacctcgcggcttgggatagaacaggcggagtcgttgctattgccaagctcgtttgattacagccgccaggcgttactctgtgtgccgcgcaatctgccgcaaaccaaccagccaggttctgctcgccagttagcggcaatgctgcgaccgatcatcgaagctaacaacggtcgttgttttatgctttgtacctcgcacgccatgatgcgtgatctggccgagcagttccgcgctaccatgacgcttcccgttttgttgcagggggaaaccagcaaagggcaactgttgcagcaatttgtcagcgccggtaacgcgcttcttgtggcaaccagtagtttctgggaaggggtggacgtgcgtggcgatacattgtcattggtgattatcgacaagttgccgtttacctcaccggatgacccgctgttaaaagcgcgcatggaagattgccgtttgcgcggtggcgacccgttcgatgaagtacaactgccggatgcggtgattactctcaagcagggggtagggcgactgattcgcgacgccgacgatcgcggggttttggtgatttgtgacaatcggctggtgatgcgcccttacggcgcgacgtttctcgccagtctgccgcccgcgccgcgcacccgtgacattgcccgtgcggttcgtttccttgcgataccatcctccaggtaa

SEQ ID NO: 460389 - DNA, 348 bp, Shigella boydii
atgatgactatcgttcgtatcgatgctgaagcccgctggtctgatgtagtaatccacaacaacacgctctactacactggtgtaccggaaaacctcgacgccgatgcttttgagcaaaccgccaacacgctggcgcagattgacgccgtgctggaaaaacagggcagcaataaatcgagcattctggatgccaccattttcctggctgataaaaacgacttcgcggcgatgaataaagcgtgggatgcctgggttgtggcgggtcatgcgccggtgcgctgcacggtgcaagcggggctgatgaacccgaagtataaagttgaaattaagattgtggctgcggtgtaa

SEQ ID NO: 460390 - DNA, 192 bp, Shigella boydii
atgaaaggcttcccaattgcacatatttttcacccttcaatcccgccaatgcacgcagtggttaacaatcacaatagaaatattgattattggacggtaaaaagaaagtttgcagaaattgtctccaccaatgacgttaaaaaaatttacagtataagtaatgaactgcgggtaatgctgccaacttactga

SEQ ID NO: 460391 - DNA, 345 bp, Shigella boydii
atgacggggataaccatattttatggcgataacatcattcgttatgtggttaatacaaaaaaggggctgagaccatatttcaagcaattaccggataattaccaggcaaaatttgagttaaatttaatgagcaagttctcaaattttattataaataaaccattttcagcgataaatactgcggcacgtcacattttttcacgctatttgttggagaacaaacatttattttatcaatattttaaaatttcgaatacaggtattgatcatctcgaacaattgattaacgtcaactttttctcttctgacaggacgtcattttgtgaatgcaatcgttttccataa

SEQ ID NO: 460392 - DNA, 939 bp, Shigella boydii
atgagcactattcttcttccgaaaacgcagcacctggtagtctttcaggaagtcattagaagtggctctatcggctcggctgcaaaagaattagggttaactcaaccggccgtcagtaaaatcattaacgatattgaagattattttggtgtggaattagtggtgcggaaaaataccggtgtaacattaacacctgccggtcaattgttactctcccgttccgaatccattacccgtgaaatgaaaaatatggttaatgagataagcggtatgtcttctgaggcggtggtggaagtctcatttggttttccttcattgattggttttacttttatgtcagggatgatcaacaagttcaaagaggtgttcccgaaagcgcaggtttctatgtatgaagcgcaactgtcttcgttcttaccggcaatccgcgacggtcgactggattttgcgattggtacgttaagtgcagaaatgaagcttcaggatttacatgttgagccgctgttcgagtccgagtttgtgctggtagccagtaagtcccgaacatgcaccggcaccaccacgctggagtcgttgaagaacgaacagtgggtgttgccacaaaccaatatggggtactacagcgagcttcttactacgttacaaagaaatggcatcagtattgaaaacatcgttaaaaccgactcagtcgtgacaatttataatcttgttctcaatgctgatttcttaactgtaattccttgtgatatgacgtcaccttttggttcaaatcaatttattactattccggttgaagaaacattacctgtggcacaatatgccgcggtatggtcgaaaaattatcgtattaaaaaagcagcatcggttttggtggaattagccaaagagtattcatcttataatgggtgtagacgaaggctattaatagaagttggttag

SEQ ID NO: 460393 - DNA, 990 bp, Shigella boydii
atgcatattacatacgatctgccagttgctattgatgatattattgaagcgaaacaacgactggctgggcgaatttataaaacaggcatgcctcgctccaactattttagtgaacgttgcaaaggtgaaatattcctgaagtttgaaaatatgcagcgtacgggttcatttaaaattcgtggcgcatttaataaattaagttcactgaccgatgcggaaaaacgcaaaggcgtggtggcctgttctgcgggcaaccatgcgcaaggggtttcgctctcctgcgcgatgctgggtatcgacggtaaagtggtgatgccaaaaggtgcgccaaaatccaaagtagcggcaacgtgcgactactccgcagaagtcgttctgcatggtgataacttcaacgacactatcgctaaagtgagcgaaattgtcgaaatggaaggtcgtatttttatcccaccttacgatgatccgaaagtgattgctggccagggaacgattggtctggaaattatggaagatctctatgatgtcgataacgtgattgtgccaattggtggtggtggtttaattgctggtattgcggtggcaattaaatctattaacccgaccattcgtgttattggcgtacagtcagaaaacgttcacggcatggcggcttctttccactccggagaaataaccacgcaccgaactaccggcaccctggcggatggttgtgatgtctcccgcccgggtaatttaacttacgaaatcgttcgtgaattagtcgatgacatcgtgctggtcagcgaagacgaaatcagaaacagtatgattgccttaattcagcgcaataaagtcgtcaccgaaggcgcaggcgctctggcatgtgctgcattattaagcggtaaattagaccaatatattcaaaacagaaaaaccgtcagtattatttccggcggcaatatcgatctttctcgcgtctctcaaatcaccggtttcgttgacgcttaa

SEQ ID NO: 460394 - DNA, 1332 bp, Shigella boydii
atgagtacttcagatagcattgtatccagccagacaaaacaatcgtcctggcgtaaatcagataccacatggacgttaggcttgtttggtacggcaatcggcgccggggtgctgttcttccctatccgcgcaggttttggcggactgatcccgattcttctgatgttggtattggcataccccatcgcattttattgccaccgggcgctggcgcgtctgtgtctttctggctctaacccttccggcaacattacggaaacggtggaagagcattttggtaaaactggcggcgtggttatcacgttcctgtacttcttcgcgatttgcccactgctgtggatttatggcgttactattaccaatacctttatgacgttctgggaaaaccagctcggatttgcaccgctgaatcgcggctttgtggcgctgttcctgttgctgctgatggctttcgtcatctggtttggtaaggatctgatggttaaagtgatgagctacctggtatggccgtttatcgccagcctggtgctgatttctctgtcgctgatcccttactggaactctgcagttatcgaccaggttgacctcggttcgctgtcgttaaccggtcatgacggtatcctgatcactgtctggctggggatttccatcatggttttctcctttaacttctcgccaatcgtctcttccttcgtggtttctaaacgtgaagagtatgagaaagacttcggtcgcgacttcaccgaacgtaaatgttcccaaatcatttctcgtgccagcatgctgatggttgcagtggtgatgttctttgcctttagctgcctgtttacgctgtctccggccaacatggcggaagccaaagcgcagaatattccagtgctttcttatctggctaaccactttgcgtccatgaccggtaccaaaacaacgttcgcgattacactggaatatgcggcttccatcatcgcactcgtggctatcttcaaatctttcttcggtcactatctggggacgctggaaggcttgaatggtctgattctgaagttcggttataaaggcgacaaaactaaagtgtcgctgggtaaactgaacactatcagcatgatcttcatcatgggctccacctgggttgttgcctacgccaacccgaacatcctcgaccttattgaagccatgggcgcaccgattatcgcatccctgctgtgcctgttgccgatgtatgccatccgtaaagcgccgtctctggcgaaataccgtggtcgtctggataacgtgtttgttaccgtgattggtctgctgaccatcctgaacatcgtatacaaactgttttaa

SEQ ID NO: 460395 - DNA, 1209 bp, Shigella boydii
atgaatgaatttccggttgttttggttattaactgtggttcgtcttcgattaagttttccgtactcgatgccagcgactgtgaagtattaatgtcaggtattgccgacggtattaactcggaaaatgcattcttatccgtaaatgggggagagccagcaccgctggctcaccacagctacgaaggtgcattgaaggcaattgcatttgaactggaaaaacggaatttaaatgacagagtggccttaattggccaccgcatcgctcacggcggcagtatttttaccgagtccgccattattaccgatgaggtcattgataatatccgtcgcgtttctccactgtcacccctgcataattacgccaatttaagtggtattgaatcggcgcagcaattatttccgggcgtaactcaggtggcggtatttgataccagtttccaccagacgatggctccggaagcttatttatacggcctgccgtggaaatattatgaagagttaggtgtacgccgttatggtttccacggcacgtcgcaccgctatgtttcccagcgcgcacattctttgctgaatctagcggaagatgactccggcctggttgtggcgcatcttggcaatggcgcgtcaatctgcgcagttcgcaacggtcagagtgttgacacctcaatgggaatgacgccgctggaaggcttgatgatgggtacccgcagtggcgatgtcgattttggtgcgatgtcctgggtcgccagccaaaccaaccagagcttgggtgacctggaacgcgtagtgaataaagagtcgggattattaggtatttccggtctttcttcggatttacgtgttctggaaaaagcctggcatgaaggtcacgaacgcgcgcaactggcaattaaaacctttgttcaccgaattgcccgtcatattgccggacacgcagcttcattacgtcgcctggatggaattatattcaccggcggaataggagagaattcaagcttaattcgtcgtctggtcatggaacatttggctgtattaggcgtagagattgatacagacatgaataatcgctctaactcctgtggtgagcgaattgtttccagtgaaaatgcgcgtgtcatttgcgctgttattccgactaacgaagaaaaaatgattgctttggatgccattcatttaggcaaagttaacgcgcccgcagaatttgcataa

SEQ ID NO: 460396 - DNA, 2295 bp, Shigella boydii
atgaaggtagatattgataccagcgataagctgtacgccgacgcatggcttggctttaaaggtacggactggaaaaacgaaattaatgtccgcgattttattcaacataactatacaccgtatgaaggcgatgaatctttcctcgctgaagcgacgcctgccaccacggaattgtgggaaaaagtaatggaaggtatccgtatcgaaaacgcaacccacgcgccggttgatttcgataccaatattgccaccacaattaccgctcatgatgcgggatatattaaccagccgctggaaaaaattgttggcctgcaaacggatgcgccgttgaaacgtgcgctacacccgttcggtggcattaatatgattaaaagttcattccacgcctatggccgtgaaatggacagtgaatttgaatatctgtttaccgatctgcgtaaaacccataaccagggcgtatttgatgtttactcaccggatatgctgtgctgccgtaaatctggcgtgctgaccggtttaccagatggctatggccgtgggcgcattatcggtgactatcgccgcgtagcgctgtatggcatcagttatctggtacgtgaacgcgaactgcaatttgccgatctccagtctcgtctggaaaaaggcgaggatctggaagccaccatccgtctgcgtgaggagctggcagagcatcgtcatgcgctgttgcagattcaggaaatggcggcgaaatatggctttgatatctctcgcccggcgcagaatgcgcaagaagcggtgcagtggctctacttcgcttatctggcggcagtgaaatcgcaaaatggcggcgcgatgtcgctgggccgcacggcatcgttcctcgatatctacattgagcgcgactttaaagctggcgtactcaatgagcagcaggcacaggaactgatcgatcacttcatcatgaagatccgtatggtacgcttcctgcgtacaccggaatttgattcgctgttctccggcgacccaatctgggcgacggaagtgatcggcgggatggggctggacggtcgtacgctggtgaccaaaaactccttccgctatttgcacaccctgcacactatggggccggcaccggaacctaacctgaccattctttggtcggaagaattaccgattgccttcaaaaaatatgccgcgcaggtgtcgatcgtcacctcttccttgcagtatgaaaatgacgatctgatgcgtactgacttcaacagcgacgattacgcgattgcctgctgcgtcagcccaatggtgattggtaagcaaatgcagttctttggtgcacgcgctaacctggcgaaaacgctgctctacgcaattaacggcggggtggacgagaagctgaagattcaggtcgggccgaaaacagcaccgctgatggacgacgtgctggattacgacaaagtgatggacagcctcgatcacttcatggactggctggcggtgcagtacatcagcgcgctgaatatcattcactacatgcacgacaagtacagctacgaagcttcgctgatggcgctgcacgatcgtgatgtctatcgcactatggcatgcggcatcgcgggcctgtcggtggcgacggactccctgtctgccatcaaatatgcccgcgtgaaaccaatccgtgacgaaaacggcctggcggtggactttgaaatcgacggtgaatatccgcagtacggcaacaacgacgagcgcgtagacagcattgcctgcgacctggttgaacgctttatgaagaaaattaaagcgctgccaacctatcgcaacgccgtccctacccagtcgattctgactatcacttctaacgtggtgtacggccagaaaaccggtaatacgccggacggtcgtcgcgccggaacaccgttcgcgccgggcgctaacccgatgcatggtcgtgaccgcaaaggtgccgtggcctcattgacgtcggtggcgaaactgccgttcacctacgccaaagatgggatctcgtacaccttctcaatcgttcctgcggcgctgggcaaagaagatccagtacgtaaaaccaaccttgtcggcctgctggatgggtatttccaccacgaagcggatgtcgaaggcggtcaacacctcaacgtcaacataatgaatcgggaaatgctgctggatgccatcgagcacccggaaaaatatcctaacctgacaatccgtgtctctggctacgccgtgcgcttcaacgcactgacccgtgaacagcaacaggatgttatttcacgtacttttacccaggcgctctga

SEQ ID NO: 460397 - DNA, 390 bp, Shigella boydii
atgaaaaagattatcgaaacgcaacgtgccccaggcgcaatcggcccttatgttcagggcgttgatttaggcagcatggtcttcacctccgggcaaattccggtttgcccgcagaccggtgagatcccggctgatgtgcaagatcaggcgcgtttaagcctcgaaaacgtcaaagcgatcgtggttgctgccgggctgagcgtgggcgatatcatcaagatgaccgtgttcatcaccgatctgaatgattttgccaccatcaatgaagtctataagcagttcttcgatgagcatcaggcgacctacccgacccggagctgtgtgcaggttgcgcgtttgccgaaagatgtgaagctggaaattgaagctatcgcagtacgtagtgcgtaa

SEQ ID NO: 460398 - DNA, 1365 bp, Shigella boydii
atgattagtgcattcgatattttcaaaattgggattggtccctccagttcgcataccgtggggccaatgaatgccggaaaaagttttattgatcggctggaaagtagcggcttattaaccgcgacgagccatattgtggtcgatctgtatgggtcgttgtcactgacgggcaaaggccatgccacggatgtcgccattatcatgggactggcaggaaacagtccgcaggatgttgtcattgatgagatccctgcatttatagagttagtaacgcgcagcgggcggctgccagtggcatctggtgcgcatattgttgattttcctgtagcaaagaacattatcttccatcccgaaatgttgcctcgccatgagaacggaatgcggatcactgcctggaagggacaggaagcgctattaagtaaaacctattactctgtcggcggcgggtttattgtcgaagaagaacacttcggcctgtcgcacgatgtcgaaacgtccgtaccttacgatttccactcagcaggtgaactgctgaaaatgtgtgattacaacggcctgtctatatctggcctgatgatgcacaacgagctggcgctgcgcagcaaagcggaaattgacgcagggtttgcccgtatctggcaagtgatgcatgacggtattgaacgcgggatgaacactgaaggcgtgctgcctggtccgctcaatgtgccgcgtcgtgccgtagcgctgcgtcgtcagctggtttctagcgataacatctctaacgatccgatgaatgtcatcgactggatcaacatgtacgcgctggcggttagtgaagaaaacgcagctggcgggcgcgtggtaacggcaccgactaacggtgcgtgcggcattattccggcagtgctggcttattacgataagttccgtcgtccggtaaacgagcggtcaattgcccgctattttctggcagcgggggctattggcgcgctgtataaaatgaacgcctccatctctggcgcggaggtcggctgtcagggggagattggcgtggcctgttcaatggcggcggcagggttaactgaactactgggcggcagtccggcgcaggtatgcaatgcggcggaaatcgcgatggagcataaccttgggctgacctgcgatccggttgccggacaggtacaaatcccgtgcattgaacgtaatgccattaatgccgtgaaagcagtaaacgccgcgcggatggcgatgcgccgcacctcggcaccgcgtgtttcactcgataaagtgatcgagacgatgtatgaaaccggcaaagatatgaacgataaataccgcgaaacatcacgcggaggactggccattaaagtggtctgcggctga

SEQ ID NO: 460399 - DNA, 693 bp, Shigella boydii
atgcctttaagcgcacaacagttagctgcacagaaaaacctttcgtatgttctggctgagaagctggcgcaacgcatcttaaaaggtgaatatgaacccggcaccattttgcctagtgagattgagctgggcgagcaatttggagtgagtcgtacagcggtacgcgaagcggtcaaaacgttaacggcaaaagggatggttttaccgcgaccgcgaattggtacccgggtcatgccacaatcaaactggaattttcttgatcaggaattgcttacctggtggatgacagaagagaactttcatcaggtcatcgatcactttctggttatgcgtatctgtctggagccgcaagcctgcctactggcagcaacggttggcaccgcggaacagaaggcgcatctcaatacgttaatggccgaaatggcggcattaaaaaagaactttcgccgtgaacgctggatcgaagtcgatatggcctggcatgagcatatctatgaaatgagcgccaatccgtttttgacctcattcgcctcgctattccattcggtttatcacacttacttcacgtcaattaccagcgacacagtgataaagctggatctgcaccaggcgattgtcgatgcgattatccaaagcgatggcgacgcggcatttaaagcttgtcaggcgctgctacgctcacctgataagtga

SEQ ID NO: 460400 - DNA, 1428 bp, Shigella boydii
atgagcgataaaaagaagcgtagtatggcgggtttgccgtggatcgcggcgatggccttcttcatgcaggcacttgatgccactattctgaataccgccttacccgcaatcgctcatagccttaatcgttctcctctcgcaatgcaatcagccatcatcagttatacgctgacggtggcgatgtttattccggtaagcggatggctagccgatcgcttcggtacgcgtcgcatttttacccttgccgtgagtctgttcacgttgggttctctggcctgcgcactttctaattcgctaccacagctggttgtcttccgggttattcaggggataggcggcgcaatgatgatgcctgttgctcggctggccttactgcgtgcttatcctcgtaatgaacttcttcctgtattgaattttgtcgccatgccgggtctggtggggccaattttaggccccgttcttggcggcgtgctggtcacctgggcaacctggcactggatatttttaatcaatatccccataggtattgcgggccttctttacgcgcgcaaacatatgcccaatttcaccaccgcacgacgcagattcgatatcactggctttttgctgtttggcctcagccttgttctcttctcaagcggaatagagctattcggggaaaagattgtcgccagctggattgccttgacggtaattgtcaccagcatcgggttactgcttctctatattctccatgcgcgacacacgccaaacccattaatttcattagatttatttaaaacccgcactttctcgatcggtatcgtaggcaatattgcaacccgtctggggaccggtagtgtaccgttccttatgccattgatgttacaggtaggatttggttatcaggcgtttattgccggctgtatgatggcaccgacagcgttaggttccattattgcaaaatcgatggttacccaagtcttacgtcgtctgggctatcgccatacgttagtggggatcacggtgattattgggctaatgatcgctcagttctctttgcaatcaccggcaatggcgatatggatgctgatcttgccgttgtttatattagggatggctatgtcgacgcaatttaccgcgatgaataccatcacacttgccgatctgaccgatgacaacgccagcagcggtaacagtgttctggcggtcacgcagcaactgtcgattagtttaggcgttgctgtaagtgcggccgtccttcgcgtttataaagggatggaaggcacaacgactgtcgaacaattccactatacgtttatcacgatgggcattattactgttgcttcagcagcaatgttcatgcttctgaaaacaaccgatggtaataatttgatcaaaagacagcgtaaatctaagccgaaccgcgttccatcagaatcggagtaa

SEQ ID NO: 460401 - DNA, 993 bp, Shigella boydii
ttggctacaatgaaagatgtttcccgcctggcgggcgtttctacctcaacagtttctcacgttatcaataaagatcgcttcgtcagtgaagcgattaccgccaaagttgaagcggcgattaaagaactcaattacgcgccatcagccctggcgcgtagcctcaaactcaatcaaacacataccattggcatgttgatcactgccagtaccaatcctttctattcagaactggtgcgtggcgttgaacgcagctgcttcgaacgcggttatagtctcgtcctttgcaataccgaaggcgatgaacagcggatgaatcgcaatctggaaacgctgatgcaaaaacgcgttgatggcttgctgttactgtgcaccgaaacgcatcaaccttcgcgtgaaatcatgcaacgttatccgacagtgcctactgtgatgatggactgggctccgttcgatggcgacagcgatcttattcaggataactcgttgctgggcggagacttagcaacgcaatatctgatcgataaaggtcatacccgtatcgcctgtattaccggtccgctggataaaactccggcgcgcctgcggttggaaggttatcgggcggcgatgaaacgtgcgggtctcaacattcctgatggctatgaagtcactggtgattttgaatttaacggcgggtttgacgccatgcgccaactgttatcacatccgctgcgtcctcaggccgtctttaccggaaatgacgctatggctgttggcgtttaccaggcgttatatcaggcagagttacaggttccgcaggatatcgcggtgattggctatgacgatatcgaactggcaagctttatgacgccaccattaaccactatccaccaaccgaaagatgaactgggggagctggcgattgatgtactcatccatcggataacccagccgacccttcagcaacaacgattacaacttactccgattctgatggaacgcggttcggcttag

SEQ ID NO: 460402 - DNA, 930 bp, Shigella boydii
atgcaaaacgcaggcagcctcgttgttcttggcagcattaatgctgaccacattcttaatcttcaatcttttcctactccaggcgaaaccgtaaccggtaaccactatcaggttgcatttggcggcaaaggcgcgaatcaggctgtggctgctgggcgtagcggtgcgaatatcgcgtttattgcctgtacgggtgatgacagcattggtgagagcgttcgccagcagctcgccactgataacattgatattactccggtcagcgtgatcaaaggtgaatcaacaggtgtggcgctgatttttgttaatggcgaaggtgagaatgtcatcggtattcatgccggcgctaatgctgccctttccccggcgctggtggaagcgcaacgtgagcgtattgccaacgcgtcagcattattaatgcagctggaatcaccactcgaaagtgtgatggcagcggcgaaaatcgcccatcaaaataagactatcgttgcgcttaacccggctccggctcgcgaacttcctgacgaactgctggcgctggtggacattattacgccaaacgaaacggaagcagaaaagctcaccggtattcgtgttgaaaatgatgaagatgcagcgaaggcggcgcaggtactgcatgaaaaaggtatccgtactgtactgattactttaggaagtcgtggtgtatgggctagcgtgaatggtgaaggtcagcgcgttcctggattccgggtgcaggctgtcgataccattgctgccggagatacctttaacggcgcgttaatcacggcgttgctggaagaaaaaccattgccagaggcgattcggtttgcccatgctgcagctgcgattgccgtaacacgtaaaggcgcacaaccttccgtaccgtggcgtgaagagatcgacgtatttttagacaggcagaggtga

SEQ ID NO: 460403 - DNA, 300 bp, Shigella boydii
atgcagaacctgttgaccgctcatccggatgttcaggctgtattcgcgcagaatgatgaaatggcgctgggcgcgctgcgcgcactgcaaactgccggtaaatcggatgtgatggtcgtcggatttgacggtacaccggatggcgaaaaagcggtgaatgatggcaaactagcagcgactatcgctcagctacccgatcagattggcgcgaaaggcgtcgaaaccgcagataaagtgctgaaaggcgagaaagttcaggctaagtatccggttgatctgaaactggttgttaagcagtag

SEQ ID NO: 460404 - DNA, 582 bp, Shigella boydii
atgaacatgaaaaaactggctaccctggtttccgctgttgcgctaagcgccaccgtcagtgcgaatgcgatggcaaaagacaccatcgcgctggtggtctccacgcttaacaacccgttctttgtatcgctgaaagatggcgcgcagaaagaggcggataagcttggctataacctggtggtgctggactcccagaacaacccggcgaaagagctggcgaacgtgcaggacttaaccgttcgcggcaccaaaattctgctgattaacccgaccgactccgacgcagtaggtaatgctgtgaagatggctaaccaggcgaacatcccggttatcactcttgaccgccaggcaacgaaaggtgaagtggtgagccacattgcttctgataacgtactgggtggcaaaatcgccggtgattacatcgcgaagaaagcgggtgaaggtgccaaagttatcgagctgcaaggcattgctggttcatccgcagcccgtgaacgtggcgaaggcttccagcaggccgttgctgctcacaagtttaatgttcttgccagccagcagattttgatcgcactaaaggtttga

SEQ ID NO: 460405 - DNA, 252 bp, Shigella boydii
gtggcgcgtctctcctccgcacaacccacggcggggactggctatgagctggatgctattgctgcggtggttctgggcggtacgagtctggcgggcggaaaaggtcgcattgttgggacgttgatcggcgcattaattcttggcttccttaataatggattgaatttgttaggtgtttcctcctattaccagatgatcgtcaaagcggtggtgattttgctggcggtgctggtagacaacaaaaagcagtaa

SEQ ID NO: 460406 - DNA, 642 bp, Shigella boydii
atgacaacccagactgtctctggtcgccgttatttcacgaaagcgtggctgatggagcagaaatcgcttatcgctctgctggtgctgatcgcgattgtctcgacgttaagcccgaactttttcaccatcaataacttattcaatattctccagcaaacctcggtgaacgccattatggcggtcgggatgacgctggtgatcctgacgtcgggcatcgacttgtctgtaggttctctgttggcgctaaccggcgcagttgctgcatctatcgtcggcattgaagtcaatgcgctggtggctgtcgctgctgctctcgcgttaggtgccgcaattggtgcggtaaccggggtgattgtagcgaaaggtcgcgttcaggcgtttatcgctacgctggttatgatgcttttactgcgcggcgtgaccatggtttataccaacggtagcccagtgaataccggctttactgagaacgccgatctgtttggctggtttggtattggtcgtccgctgggcgtaccgacgccagtctggatcatggggattgtcttcctcgcggcctggtacatgctgcatcacacgcgtctggggcgttacatctacgcgctgggcggcaacgcgtctttctggtatcaacgtcaataa

SEQ ID NO: 460407 - DNA, 306 bp, Shigella boydii
atggaacaggcaattggtctgctttccggtggcaatcagcaaaaagtgttgatccttgatgaacctacccgtggcgtagatgtcggcgcgaaaaaagagatctatcaactgattaaccagttcaaagccgatggcttgagcatcattctggtatcatcggagatgccagaagtattaggcatgagcgatcgcatcatcgtcatgcatgaagggcatctcagcggggaatttactcgtgagcaggccacccaggaagtgttaatggctgccgctgtgggcaagcttaatcgcgtgaatcaggagtaa

SEQ ID NO: 460408 - DNA, 1119 bp, Shigella boydii
atggaagcattacttcagcttaaaggcatcgataaagccttcccgggcgtaaaagccctctcgggcgctgcgttaaatgtctatccgggccgcgtgatggcgctggtgggcgaaaacggcgcgggtaaatccaccatgatgaaagtgcttactggtatctatgctcgcgatgccggcacgcttttatggctggggaaagaaacgacatttaccgggccgaaatcttcccaggaagccgggattgggattatccatcaggaactgaacctgatcccgcagttgaccattgccgaaaacattttcctcggtcgtgagtttgttaatcgctttggcaaaattgactggaaaaccatgtatgccgaagcggataaattgctggctaaacttaacctgcgctttaaaagcgacaagctggtgggcgatctttccatcggtgaccagcaaatggttgaaatcgccaaagtgctgagctttgagtcgaaagtcatcattatggatgaaccgaccgatgcgctgaccgataccgaaacagaatccctgttccgcgtcatccgcgaactaaaatcgcaaggccgcggtattgtctatatctcccaccgcatgaaagaaatcttcgagatttgcgatgccgttaccgtttttcgtgacgggcaatttattgctgagcgcgaagtggcatcactgaccgaagattcgctgattgagatgatggtgggtcgcaagctggaagatcaatatccacacctggacaaagcgccgggagatatccgcctgaaagtcgataatctctgcggacctggcgttaacgatgtctcttttactttacgcaaaggcgaaattcttggcgtctctggtttgatgggcgcaggtcgtaccgaactgatgaaagtgctctacggcgcactaccgcgcaccagcggttacgtcaccctggatgggcatgaagtcgttacccgttcaccgcaggatggcctggcaaacggcattgtgtatatctccgaagaccgtaaacgtgacggtttagttttgggcatgtcagtaaaagagaacatgtcgctgacagcgctgcgctacttcagccgcgctggcggcagtttgaagcatgccgatgaacagtag

SEQ ID NO: 460409 - DNA, 420 bp, Shigella boydii
atgaaaaaaggcaccgttcttaattctgatatttcatcggtgatctcccgtctgggacataccgatacgctggtggtgtgtgatgctggtttacccatccccaaaagtacaacgcgtatcgatatggcattaacccagggtgtaccttcttttatgcaggtgctgggcgtcgttacaaatgaaatgcaggtcgaggctgccattatcgcggaagagatcaaacaacataatccgcaactccacgaaacgttgctcactcaccttgagcagctgcaaaaacaccagggaaataccattgaaattcgttacaccacgcatgaacaattcaaacaacaaaccgcagaaagtcaggcggtaattcgcagcggagaatgttctccgtatgcgaatatcattctctgtgctggcgtgacgttctga

SEQ ID NO: 460410 - DNA, 1869 bp, Shigella boydii
atgagcactgataataagcaatcattgcccgcgattaccctcgcggcgattggagttgtctacggcgatattggtaccagcccgttatatacacttcgtgaatgtttgtccggccagtttggttttggcgttgaacgcgatgccgtgtttggctttttatcgctgatcttctggctgctaatctttgtggtttccattaaatatctcaccttcgtgatgcgggcagataacgccggtgagggggggatcctgacgttgatgtcgcttgccgggcgtaatacgtcggcacgaaccacatcaatgctggtgattatggggctaatcggcggcagctttttctatggtgaagtcgtcataacacccgctatttcggtgatgtcagccattgaaggtctggaaatcgtcgccccgcagctggatacctggatagttcccctctcaattatcgttctcactttattatttatgattcaaaaacatggcacggctatggtcggtaagctgtttgcgccgatcatgctgacctggtttttgattctggcaggactggggttacgtagcattattgctaacccggaagtgctgcatgcgctgaatccaatgtgggcggtgcatttcttccttgaatacaaaacggtttcttttattgcattaggggcagtggtgttgtcgattacgggggtcgaggcgctgtatgctgatatggggcactttggtaagttccctattcgcctggcgtggttcaccgtcgtattaccttccttgacccttaattacttcggtcagggggcgctgttgttaaagaacccggaagcgattaagaacccgttcttcctgttggcaccggactgggcgctgatcccgctgctgatcatcgccgcactggcgacggtaattgcctcgcaggcggttatctctggcgtcttctcattgacgcgtcaggcggtacgtctgggatatttgtcgccgatgcgcattattcacacctccgaaatggagtcagggcaaatctatattccgtttgtgaactggatgctctatgtcgcggtcgtgattgtgattgtcagctttgagcactccagcaacctggcggcggcgtacgggattgcggtgaccggaaccatggtgctgacgtctattctctcgactaccgtggcacgtcagaactggcactggaataagtattttgttgcgctgatcctgattgctttcctttgtgtcgatattccattgttcaccgctaacctcgataaactgctctccggcggttggttgccattgagcctcggtacggtgatgtttatcgtgatgaccacctggaagagcgagcgtttccgcttgctgcggcggatgcatgaacatggtaactctctggaagcgatgattgcttcgctggagaaatcaccgcctgttcgcgtgcccgggaccgcggtgtatatgtcgcgtgcaatcaacgtcattccctttgcgctgatgcataaccttaaacataacaaggtattgcatgagcgggtgattttgttaactctgcgtaccgaagacgcgccatatgtccataatgtccgtcgggtacagattgaacaactgtcgctcactttctggcgcgtggtggcaagttatggttggcgagaaacgccaaacgtggaagaagttttccaccgctgcggtctggaaggattaagttgccggatgatggaaacctccttctttatgtcgcatgagtcgttgatcctcggcaaacgcccgtggtatttgcgtctgcgcggcaagctgtacttgctgctgcaacgtaatgcgctgcgtgcaccagatcaatttgaaatcccgccaaacagggttatcgaactgggtactcaggtcgaaatctaa

SEQ ID NO: 460411 - DNA, 2142 bp, Shigella boydii
gtggcgtatgaaaccacctcgtttgttaaagcctccattgaagacgtggtgaaaacgctgctggaagctatcgccctggttttcctcgttatgtatctgttcctgcaaaacttccgcgccacgctaatacccactatcgccgtgccggtggtgttgatgggaaccttctccgtactttacgccttcggttacagcgtcaacaccttaaccatgttcgcgatggtactggcgatcggtctgctggtggatgacgcaatcgtggtggtggaaaacgtcgaacgtattatgagtgaggaaggactcactcctcgcgaagccacacgtaaatcgatggggcagatccagggggcactggtcgggattgcgatggtgctttcggcggtatttgtaccaatggccttcttcggcggcaccaccggtgccatctatcgccagttctctattaccattgttgcggcgatggtgctgtcagtactggtagcgatgatcctcactccggctctgtgtgccacactacttaagccactgaaaaaaggtgagcatcacgggcaaaaaggcttttttgcctggtttaaccagatgtttaaccgcaacgccgaacgctacgaaaaaggggtggcgaaaattctccaccgcagcctgcgctggattgtgatttatgtcctgctgcttggcggcatggtgttcctgttcctgcgtttgccgacgtcgttcttaccgctggaagaccgtggcatgtttactacctcggtacaattgcccagcggttcaacccaacaacagaccctgaaagtcgttgagcaaatcgagaaatattacttcacccatgaaaaagacaacatcatgtcggtgtttgccaccgttggttctggccctgggggtaacgggcaaaacgtggcgcgaatgtttatccgcctgaaagactggagcgaacgcgacagtaagaccggcacctcgtttgccattatcgagcgtgcaacaaaggcgtttaacaagattaaagaagctcgcgttatcgccagcagcccgccagcaattagcggtcttggtagttctgcgggttttgatatggagttgcaggaccacgctggagcaggtcacgatgcgctgatggcagcacgtaaccagttgctggcgctggcggcggaaaacccggagctaacccgtgtgcgccataacggcctcgatgacagtccgcagttgcagattgatatcgaccagcgtaaagctcaggcgctgggcgttgctatcgacgatattaacgacacactgcaaaccgcctggggttcgagctatgtgaatgactttatggatcgcggtcgtgtgaagaaagtctatgtgcaggcagctgcgccgtatcgcatgctgccagatgacattaatctctggtatgtccgaaataaagatggcggcatggtgcccttctctgctttcgcgacctcacgctgggagactggctcgccgcgtctggaacgctataacggttattctgcggttgagattgttggggaagccgcaccgggggtcagtaccggtacggcgatggatataatggaatcgttagtgaagcagttgccaaacggctttggtctggagtggacggcgatgtcgtatcaggagcggctttccggcgcgcaggctccggcgctgtacgccatttccttgctggtggtattcctgtgtctggcggcgttgtatgaaagctggtcggtgccgttctcggtaatgctggtcgtgccgctgggggttatcggcgcgctgctggcaacctggatgcgcgggctggaaaacgacgtttacttccaggtgggcctgttaacggtcattggtttatcggcgaaaaacgccatcctgatcgtcgagtttgctaacgagatgaaccaaaaaggccacgacctgtttgaagcgacgctccacgcctgccgtcagcgtttacgcccgattctgatgacctcgctggcatttatcttcggcgtattgccaatggcaaccagcacgggtgccggttccggtggtcagcatgcggtgggtactggcgtaatgggcgggatgatttcggccactattctggctatttacttcgtgccgctgttctttgtactggtgcgccgccgcttcccgctgaagccgcgcccggaataa

SEQ ID NO: 460412 - DNA, 1023 bp, Shigella boydii
atggcgaatttctttattgatcgccccatttttgcctgggtgctggcaatcctgttgtgtctgacagggaccctggcgattttttcattgcccgttgaacaataccccgatctcgcgccaccgaatgtgcgagtgaccgctaactatcccggcgcatcggcccagacgctggaaaacaccgtgccccaggttatcgagcaaaatatgaccggcctcgataatctcatgtatatgtcatctcagagcagtggcaccggtcaggcatctgtcactttaagttttaaagcaggcaccgatccggacgaagccgtgcagcaagtacaaaaccagctgcaatcagccatgcgaaagttaccgcaggcggtgcaaaatcagggcgtgacggtgcgtaaaaccggcgataccaatattctgaccattgctttcgtctctaccgatggttcgatggataaacaggatattgccgattatgttgccagtaatattcaggacccgttaagccgcgtgaatggcgtcggggatatcgatgcctatggttcgcaatattccatgcgtatctggctggccccggcgaaactcaacagtttccagatgacggctaaagatgtcactgatgccattgagtcacagaacgcgcagattgcggttgggcaacttggtggtacaccttccgtcgataagcaggcgctcaacgccaccattaacgcccagtcactgctgcaaacaccagaacagttccgcgatatcaccttgcgggtgaatcaagacggctcagaggtaaggctgggcgatgtcgccaccgtcgaaatgggggcggagaaatacgattatcttagccgcttcaatggtaagccagcctccgggctgggggtaaaactggcctccggcgcaaacgaaatggcgacagggagctggtgctcaatcgtctcgacgagctggcgcagtacttcccgcacggactggaatacaaggtggcgtatgaaaccacctcgtttgttaaagcctccattgaagacgtggtga

SEQ ID NO: 460413 - DNA, 1701 bp, Shigella boydii
gtgattgttaaacgacccgtctcggccagtctggcccgggcctttttttacattgtgctgctgtcgattctttccacgggtatcgctctgctaactctggcgagcagtttgcgcgacgctgaggctatcaatattgccggatcgctgcgtatgcagagttaccgcctgggctacgacttgcaaagtggcagtccacaactcaatgcacatcgccagttgtttcagcaggcactgcattcaccggtattaaccaatctcaacgtctggtatgtgccagaagcagtaaaaactcgctatgcgcatctgaatgccaactggctggagatgaataatcggctcagcaagggcgatttgccgtggtatcaggccaatattaataattatgttaatcagatagacctgttcgtgctggctttacagcactacgctgaacgcaaaatgctgctggtggtggcgatttccctggctggcggtatcggtattttcacgctggtcttttttactttgcgccgtatacgccatcaggtggttgccccgctgaatcagctggttaccgccagtcaacgtattgaacacgggcagttcgactcgccgccgctggataccagtctgccgaatgagcttggtctgcttgcaaaaacctttaaccagatgtcgagcgagctgcataaattgtacctttcgctggaggcgtcagtagaagaaaagacccgcgatctccacgaggccaagcgtcgtctggaggtgttgtatcaatgttcgcaggcgctgaacacaagccagattgatgtgcattgtttccgccatattttgcagattgttcgcgacaatgaagcggctgaatatctggagttaaatgtcggtgaaaactggcggattagcgaagggcaaccaaacccggaattgccgatgcagattttaccggtgacaatgcaagagacggtttacggcgaactgcactggcaaaatagtcacgtttcatcatcagaaccgctgcttaacagcgtttcgtcgatgctgggacgcggtttgtactttaatcaggcgcagaagcattttcagcagttattgttgatggaagaacgtgcaaccatcgcccgcgaattgcacgactcgctggctcaggtactttcttacttacgtatccagttgacgttactgaagcgttcgataccggaagataacgccaccgcacaaagtatcatggccgatttttccctggcgttgaatgatgcttatcggcagttacgcgagctgttgactactttccgcctgacgctgcagcaggcggatctcccctccgcgttgagggaaatgctggatacgttacaaaatcaaaccagcgccaaactgaccctcgactgccgtctgccaacccttgcgctggatgcgcaaatgcaggtgcatttgttgcaaattattcgcgaagcggtgctgaatgcgatgaagcacgccaacgccagcgaaatcgccgtcagttgcgtcaccgcgccggacggcaatcacacggtttatatccgtgataacgggattggtatcggtgaaccgaaagaacccgaaggtcattatggtctgaatatcatgcgcgaacgcgcggaacggctgggtgggacgctgactttttcacaaccttccggcggcggcacgttagtgagtattagctttcgctctgcagagggtgaggaaagtcagttgatgtaa

SEQ ID NO: 460414 - DNA, 663 bp, Shigella boydii
atgaatcgttttattatggccaacagtcagcaatgtctgggttgtcatgcttgtgaaatcgcctgtgtcatggctcacaatgatgagcaacatgtcctgagccaacaccattttcatccccgaattacggttatcaaacatcagcagcaacgtagtgcagtgacctgtcaccattgtgaagatgcgccctgcgcccgtagctgccctaatggcgcaatcagccacgttgatgacagcattcaggtcaatcagcaaaagtgtattggctgtaaatcctgcgtggtggcctgtccgtttggtacgatgcaaatcgtcctgacacccgtcgcggcaggaaaagtaaaagccacggcgcataaatgcgacctttgtgcagggcgcgaaaacggtcctgcctgtgtcgagaattgcccggcggacgcgctgcaactggtcactgacgtcgcactctccggcatggcgaaatcccgccgcttgcgcaccgcacgtcaggagcatcaaccgtggcatgccagtaccgctgcacaagaaatgccggtaatgagtaaagtcgaacaaatgcaggcaacgcccgcgcgtggcgagccggataaactggcgattgaagcgcgcaaaaccggttttgatgaaatttatctgccatttcgcgccgaccaggcataa

SEQ ID NO: 460415 - DNA, 1224 bp, Shigella boydii
gtgaaagccggaaacatcgacgccgccgtcgagctttctcaccagaccaacaccctgccggaaattaccggacgcgtttgtccgcaagaccgtttgtgtgaaggtgcctgtactattcgcgatgagcacggcgcggtaactatcggcaacattgaacgctatatttcagatcaggcgttggcgaaaggttggcgtcctgacttaagtcatgtcaccaaagtggacaagcgggtggcgattatcggggcaggtccggcagggctggcctgtgcggatgttctgacccgcaatggcgtggcggtgacggtgtacgatcgccatccagaaatcggtggcttgctcactttcggcattccttctttcaaactggataaatccctgctggcacgccgtcgggaaatcttcagcgcgatggggattcacttcgaactcaattgtgaagtgggtaaagatgtctctttggattcgcttttggaacaatacgacgcggtcttcgttggcgtaggcacttaccgttccatgaaagcgggtttacccaatgaagatgcgccgggcgtttatgacgcgctgccgttcctcatcgccaacactaaacaggtgatggggctcgaagagctaccggaagagccgtttatcaataccgccggacttaacgtcgtggtactgggcggcggcgacaccgcgatggactgtgtgcgtactgcgctgcgccacggcgcgagtaacgtcacctgcgcttatcgtcgtgatgaagctaacatgccaggctcgaagaaagaggtgaagaacgcccgcgaagagggggccaacttcgaatttaacgtccagccggtggcgcttgagctgaatgaacaaggtcacgtttgcgggattcgtttcctgcgcacgcgtcttggcgagccggatgcccaggggcgtcggcgtccagtaccggtggaaggcagtgaatttgtcatgccagccgacgcggtgattatggcgtttggcttcaatccgcacgggatgccgtggctggagtcgcacggtgtaacggtagacaaatggggccgcatcatcgcggatgtggaaagccagtaccgttaccagacctccaatccgaaaatcttcgccggtggcgacgccgtgcgtggtgcggatctggtggttaccgcaatggcagaaggacgtcatgcggcacaggggattattgactggctgggggtaaaatcagtcaaatctcactga

SEQ ID NO: 460416 - DNA, 576 bp, Shigella boydii
atgacgcaacaaatcaccctcattaaagacaaaattctctccgataactatttcaccctgcacaacattacctacgatctcacgcgcaaagatggcgaagttatccgccataaacgtgaagtttacgatcgcggtaatggtgcgacgatcctcctgtacaacgcgaagaaaaagaccgtggttctgattcgtcagttccgtgtcgctacctgggttaatggcaatgaaagcgggcagctgattgaaacctgcgccgggctgctggataacgacgaaccggaagtgtgcattcgtaaagaagcgattgaagagacgggctatgaagtgggcgaagtgcgcaaattatttgaactgtatatgtcgccaggcggtgtgactgagctaatccacttttttatcgccgaatacagtgacaatcagcgcgctaacgccggtggcggtgtcgaagatgaagatattgaagtgctcgagctgccattcagccaggcgctggagatgatcaaaaccggcgagatacgtgacggtaagacggtgttattgcttaactatttgcaaacgtcacatttaatggactga

SEQ ID NO: 460417 - DNA, 1044 bp, Shigella boydii
atgcgctatcgcattttccttctcttttttttcgctttgttgccgacgtctttggtgtgggcggcaccagcgcaacgggcgttttccgactggctggtcacctgtaataaccaaaacttctgcgtggcgcgtaatacgggcgatcataatggactggtgatgaccctgagccgcagcgccggggcgcataccgatgccgttttacgtattgagtgcggcggattgaagtcgccggaggcgtcagaaggggagatagcgccacggctgctgttagatggcgagccgttggcgttaagtggtgacaagtggcggatttcaccatggttattagtaaccgatgatacggcaaccatcaccgcgtttttgcagatgattcaggaagggaaggcgatcaccttacgcgacggcaatcagaccatttcgctgagtggcttaaaagcggcgttgttgtttattgatgctcagcaaaagcgcgttggcagtgaaaccgcgtggatcaagaaaggggacgaaccgccgctcagcgtaccgcccgcgcctgcgctgaaagaggtcgcggtggttaacccaacgccgacgccactctcactcgaagaacgcaacgatttgctggattatggaaactggcggatgaatggtctgcgctgctcgcttgatccattgcgtcgtgaggtgaatgtcactgcgctgactgatgataaagcgctgatgatgattagctgtgaggcaggggcctataacaccattgatttggcatggattgtgtcgcgtaaaaatccgctggcctcgcgcccggttcggttgcgtttgccgttcaacaacgggcaggagacgaatgaactggaactgatgaacgcaacatttgatgagaaatcgcgtgaactggtgaccttagcgaaagggcgcggattaagcgattgtggcattcaggcgcgctggcgctttgacggtcagcgttttcgcctggtgcgttacgccgcagaacccacctgcgataactggcatgggccagacgcctggcccacgttgtggatcacccgttaa

SEQ ID NO: 460418 - DNA, 768 bp, Shigella boydii
atgaccgctatagccaacggcatcgcgcaccacggcggctttgtgccgtataccgcgacgttcctgatgtttgttgaatacgcccgtaacgccgcgcggatggcggcactgatgaaagcgcggcagattatggtttatacccacgactcaattggcctgggcgaagatggtccgacgcaccaggctgttgagcaactggccagcctgcgcttaacgccaaatttcagcacctggcgaccgtgcgatcaggtggaagcggcggtgggctggaagctggcggttgagcgccacaacggaccgacggcactgatcctctcaaggcagaatctggcccaggtggaacgtacgccggatcaggtaaaagagattgcccgtggcggttatgtgctgaaagacagcggcggtaagccagatattattttgattgccaccggttcagagatggaaatccccctgcaagcggcagagaaattagcgggagaaggtcgcaatgtacgcgtagtttccctgccctcgactgatattttcgacgcccaggatgaggaatatcgggagtcggtgttgccttctaacgttgcggctcgcgtggcggtggaagcaggtattgccgattactggtacaagtatgttggtttgaaaggggcgattgttgggatgacaggttatggggaatctgctccggcggataagctgttcccgttctttggctttaccgccgagaatattgtggcaaaagcgcataaggtgctgggagtgaaaggtgcctga

SEQ ID NO: 460419 - DNA, 213 bp, Shigella boydii
atgcctgaacaccataaggttagcctcttactcgttggaaatcaacacagggggctgggaatgccgcaaaaatacggattactttcattaatagtgatttgtttcacgcttttatttttcacctggatggtaagagattcactgtgtgaattgcatattaaacaggggcgttatgagctggcggcatttttagcctgcaatttaaaagagtaa

SEQ ID NO: 460420 - DNA, 213 bp, Shigella boydii
atgtccggtaaaatgactggtatcgtaaaatggttcaacgctgacaaaggcttcggcttcatcactcctgacgatggctctaaagatgtgttcgtacacttctctgctatccagaacgatggttacaaatctctggacgaaggtcagaaagtgtccttcaccatcgaaagcggcgctaaaggcccggcagctggtaacgtaaccagcctgtaa

SEQ ID NO: 460421 - DNA, 291 bp, Shigella boydii
atggaatataaagatccaatgcatgagctgttgagcagcctggaacagattgtttttaaagatgaaacgcagaaaattaccctgacgcacagaacaacgtcctgtaccgaaattgagcagttacgaaaagggacagggttaaaaatcgatgatttcgcccgggttttgggcatatcagtcgccatggtaaaggaatgggaatccagacgcgtgaagccttcaagtgccgaactaaaattgatgcgtttgattcaagccaacccggcattaagtaagcagttgatggaatag

SEQ ID NO: 460422 - DNA, 711 bp, Shigella boydii
atggcgacaggaaagtcctgctctcgctggtttgcgcctcttgcggcgttattaatggtagttagcctgagtgggtgttttgataaagaaggcgatcagcgtaaagcgtttatcgacttcctgcagaatacagtgatgcgtagcggtgaacgtctaccaaccctgactgccgatcagaaaaaacagtttggtccttttgtctctgattacgcgattctgtatggttattctcagcaggtgaatcaggcgatggattccggtctgcgcccggtcgtagacagcgttaacgcaattcgcgtaccgcaggattacgttacgcaaagcggtccgctgcgtgaaatgaacggttcgctgggtgtgctggcgcaacaactgcaaaatgcgaagttgcaggccgatgctgcgcactctgcgctaaaacagaccgatgatttgaaaccggtctttgatcaggcattcaccaaagtggtaacgacgccagctgatgcattgcaaccgttgattccggttgcacaaactttcacgcaacaactggtgatggttggagactacattgctcaacaaggtactcaggtgagctttgtagcaaatggtatccagttcccgacttcgcagcaggcaagtgaatataacaaactgattgcgccgttaccggcacaacatcaggcgtttaatcaggcctggactacagcagttactgcaacccaataa

SEQ ID NO: 460423 - DNA, 975 bp, Shigella boydii
atgaagccgtccgttatcctctacaaagccttacctgatgatttactgcaacgcctgcaagagcatttcaccgttcaccaggtggcaaacctcagcccacaaaccgtcgaacaaaatgcagcaatttttgccgaagctgaaggtttactgggttcaaacgagaatgtagatgccgcattgctggaaaaaatgccgaaactgcgtgccacatcaacgatctccgtcggctatgacaattttgatgtcgatgcgcttaccgcccgaaaaattctgctgatgcacacgccaaccgtattaacagaaaccgtcgccgatacgctgatggcgctggtgttgtctaccgctcgtcgggttgtggaggtagcagaacgggtaaaagcaggcgaatggaccgcgagcataggcccggactggtacggcactgacgttcaccataaaacactgggcattgtcgggatgggacggatcggcatggcgctggcacaacgtgcgcactttggcttcaacatgcccatcctctataacgcgcgccgccaccataaagaagcagaagaacgcttcaacgcccgctactgcgatttggatactctgttacaagagtcagatttcgtttgcctgatcctgccgttaactgatgagacgcatcatctgtttggcgcagaacaattcgccaaaatgaaatcctccgccattttcattaatgccggacgtggcccggtggttgacgaaaatgcactgatcgcagcattgcagaaaggcgaaattcacgccgccgggctggatgtcttcgaacaagagccactgtccgtagattcgccgttgctctcaatggccaacgtcgtcgcagtaccgcatattggatctgccacccatgagacgcgttatggcatggccgcctgtgccgtggataatttgattgatgcgttacaaggaaaggttgagaagaactgtgtgaatccgcacgtcgcggactaa

SEQ ID NO: 460424 - DNA, 660 bp, Shigella boydii
atgaagaaacgtgtttatcttattgccgccgtagtgagtggcgctctggcggtatctggctgcacaactaacccttacaccggcgaacgcgaagcaggcaaatctgctatcggcgcaggtctggactctctcgtgggcgcgggtattggtgcgctctcttcttcgaagaaagatcgcggtaaaggcgcgctgattggcgcagcagcaggcgcagctctgggcggcggcgtgggttattacatggatgtgcaggaagcgaagctgcgtgacaaaatgcgcggcacaggtgttagcgtaacccgcagcggggataacattatcctcaatatgccgaacaatgtgaccttcgacagcagcagcgcgaccctgaaaccggcaggcgctaacaccctgaccggcgtggcaatggtgctgaaagagtatccgaaaacggcggttaacgtgattggttataccgacagcacggggggtcacgacctgaacatgcgtctctcccagcagcgtgcggattctgttgccagcgcgttgatcacccagggcgtggacgccagccgcatccgtactcagggccttggcccggctaacccaatcgccagcaacagcaccgcagaaggtaaggcgcaaaaccgccgtgtagaaattaccttaagcccgctgtaa

SEQ ID NO: 460425 - DNA, 2334 bp, Shigella boydii
ttggccaactcatcctcacgatattccgttctgactgccgcccactgggggcccatgctggttgaaaccgacgacgaaaccgtgtttagctcgcgtggcgcgttagccacaggaatggaaaactccttgcagagcgcggttcgcgaccaggttcacagcaatacgcgggtacgatttccaatggtgcgcaaaggctttctcgcgtcaccggaaaacccgcaaggcattcgtgggcaggatgaatttgttcgcgtgagttgggatgaggcgctggatcttattcaccaacaacataaacgcattcgtgaggcttatggtccggcatcgatttttgctggttcctacggctggcgttcaaacggcgtgctgcataaggcctcgacattattacaacgctatatggcgctggcaggcggttataccgggcatctgggggattattcgaccggtgcggcacaggcgatcatgccgtatgtcgtgggtggcagcgaagtttatcaacagcaaaccagttggccgctggtgctggaacatagcgatgtcgtggtgttgtggagtgctaacccactcaatacgctgaaaattgcgtggaatgcatctgatgagcaggggctttcttacttttccgcactgcgtgacagcgggaaaaagctgatctgtattgatccaatgcgatcggaaaccgtcgatttctttggcgataaaatggagtgggtggcaccgcacatgggcaccgatgttgcgctgatgctggggatcgcccatacgctggtggaaaatggttggcacgacgaagcgtttctggcgcgttgcaccacaggttatgccgtcttcgcctcttatttgctgggcgagagtgacggaatagccaaaaccgccgaatgggcggcagggatttgtggggttcacgcagcgaaaattcgcgagttggcggctcttttccaccaaaacacgaccatgctgatggctggctggggaatgcagcgccaacagtttggtgagcaaaaacactggatgatcgtcacgctggcggcaatgttggggcaaatcggcacacccggcggcggttttggtctttcttatcattttgccaatggtggtaatcccacgcggcgttctgcggtgctctcttccatgcagggtagcttgccgggtggcagcgatgcggtagataaaatccctgttgcccgtattgttgaagcactggaaaaccctggctgcgcataccaacacaatggcatgaatcgcctcttcccggatattcgctttatctggtgggcgggtggcgccaacttcacccatcatcaggacactaatcgcctgatacgagcttggcaaaaaccggagctggtagttatctccgaatgcttctggacggcggcggcaaaacacgcggatatcgttctgcctgcgactacctcttttgagcgtaatgatctcaccatgaccggcgattacagtaatcagcatctggtgccgatgaagcaagtggtgccgccacgctatgaagcgcgtaatgattttgatgtttttgccgagttaagtgaacgctgggagaagggcggttatgcacgttttacggaaggaaaaagtgagttgcaatggctggaaacgttttataacgttgcccgacagcgcggggcaagccagcaggttgaattgccgccatttgctgagttctggcaagccaatcagttaattgagatgccggaaaacccggacagcgagcggtttattcgcttcgctgatttttgccgcgatccgcaggcgcatccattaaaaaccgacagcggtaagattgaaatcttctcgcagcgtattgccgattacgcttatccggattgcccggggcatccaatgtggctggagccggacgaatggcagggcaatgccgaaccggaacagttacaggtactttctgctcatccggcgcatcgtctgcacagccagctgaattacagttctctgcgcgaattgtatgcggtggcaaatcgtgagcctgccaccattcatcctgacgatgccctggcgcgcggcattcaagatggcgatactgttcggctgtggaacgcacgcgggcaaattcttgccggagcggtcattagcgagggaattaaacctggcgtgatttgtattcacgaaggggcatggccggatttggatttaaccgctgacggtatttgtaaaaacggcgcagtcaacgtgctgaccaaagatctccccagctcgcggctggggaatggctgtgcgggtaatacggcgctggcatggctggaaaaatacaacggtccggaactgacacttacagcgtttgaaccaccggccagctcataa

SEQ ID NO: 460426 - DNA, 441 bp, Shigella boydii
atgattcgggaagcgcaacgttcagaactccccgcgatcctcgaactgtggctggaaagtacaacctggggacatccctttataaaagcgaattactggcgtgattgcattccgctggtgcgggatgcgtatcttgccaatgcgcaaaactgggtctgggaagaagacagtaagcttctcggttttgtcagcattatggaaggccgatttctggcagcgatgtttgtcgcaccgaaggccgtcaggcgcggtattggtaaggcgctgatgcaatatgtgcagcagcgccatccccacctgatgctggaggtttatcaaaaaaatcaaccggcgataaatttttaccaggcgcagggttttcacattgtcgattgcgcatggcaggatgaaacccaactacccacctggattatgagctggccggtggttcaaacgctgtaa

SEQ ID NO: 460427 - DNA, 564 bp, Shigella boydii
atggaacgttgcggctgggtgagtcaggacccgctttatattgcctaccatgataatgagtggggcgtgcctgaaactgacagtaaaaaactgttcgaaatgatctgccttgaagggcagcaggctgggttatcgtggatcaccgtcctcaaaaaacgcgaaaactatcgcgcctgctttcatcagttcgatccggtgaaggtcgcagcaatgcaggaagaggatgtagaaagactggtacaggacgccgggattatccgccatcgcgggaaaattcaggcaattattggtaatgcgcgggcgtacctgcaaatggaacagaacggcgaaccgtttgccgactttgtctggtcgtttgtaaatcatcagccacaggtgacacaagccacaacgttgagcgaaatccccacatctacgcccgcctccgacgccctatctaaagcactgaaaaaacgtggttttaagtttgtcggtaccacaatctgttactcctttatgcaggcatgtgggctggtgaatgatcatgtggttggctgctgttgctatccgggaaataaaccatga

SEQ ID NO: 460428 - DNA, 699 bp, Shigella boydii
atgatcataaaaaaaagcggtggtcgctggcagctaagcctgctggcgagcgtggtaatcagtgccttttttctcaacacagcttacgcctggcaacaagaatatatcgttgatacgcaacccggacattccacagagcgttacacctgggatagtgatcatcaacctgattacaacgatattttgtcgcaacgtattcaaagtagccaaagggcgctgggactggaagtcaatctggcggaagaaactcctgtggatgtgaccagcagtatgagtatgggctggaattttcctttatatgaacaggttacaaccggcccggtcgcggcattacattacgatggcacaaccacctcgatgtataacgagtttggcgacagtactaccacgctgaccgatccgttatggcatgccagcgtgagtagcttaggctggcgtgttgactcccggcttggcgatctccgaccctgggcgcaaatcagctataaccagcaatttggcgagaatatctggaaggcgcaatcaggcctgagccggatgacggcgacaaaccagaacggcaactggctggatgtcaccgtaggcgctgatatgttgctcaatcaaaatattgccgcctatgccgcgctaactcaggcagaaaataccactaataatagcgactatctgtatacgatgggggttagcgccagattttaa

SEQ ID NO: 460429 - DNA, 1203 bp, Shigella boydii
atgacaccttcaaattatcagcgtacccgctggctgacactcatcggtactatcattacccagtttgcgctggggtcggtttatacctggagtctgtttaatggcgcgctttctgccaagctggatgcgccggtaagccaggtcgctttctctttcggcttgttaagtctggggctggcaatttcatcttctgttgcggggaaattacaggaacgttttggcgttaaacgcgtcactatggcttccggcattttgctaggattaggcttcttcctgacagcgcattctgacaacctgatgatgctgtggttaagcgccggtgtgctggtcggtctggcggatggcgcgggttacctgctgacgctctctaactgcgtgaagtggttcccggagcgtaaaggtctgatctccgcgttcgctatcggttcttatggtcttggtagcctgggtttcaaatttatcgacacgcagctgctggaaacggtgggtctggaaaaaacatttgtgatttggggagcgattgcgctggtgatgattgttttcggcgcaacgttaatgaaagacgcaccaaaacaggaagtgaaaaccagcaatggtgtggtggagaaagattacacgctggcagagtcgatgcgtaaaccgcagtactggatgttagcggtaatgttcctgactgcctgcatgagcggcctgtacgtgattggggtagcgaaagatatcgcccaaagtctggcacaccttgatgtggtttccgcagccaatgcagtaacggttatttccatcgctaacctttcaggtcgtctggtgctgggcattctgtctgacaaaattgcccgtatccgtgttatcaccattggtcaggtgatttcgctggtgggtatggcggccctgctgtttgcaccattaaatgcagtgacgttctttgcagcgattgcctgcgtggcatttaactttggcggcactattaccgtctttccatcactggtcagtgagttcttcggcctcaataacctggcgaaaaactacggtgtgatttacctcggtttcggtatcggtagcatttttggttcgattatcgcctcactgtttggcggtttctatgtgaccttctacgtgattttcgccctgctgattctgtcattggcgctttctacgacgattcgtcagccagagcagaaaatgttgcgtgaggcgcatatttag

SEQ ID NO: 460430 - DNA, 1356 bp, Shigella boydii
atgatcttctctgactggccgtggcgtcactggcggcaagtgcggggagaagccatcgccttacgtcttaatgacgagcaactcaactggcgcgagctttgtgctcgcgtcgatgagttagctacgggctttgcggcgcagggtgtggttgagggcagcggcgtgatgttgcgggcgtggaatacgccgcaaacgctgctcgcctggctggcgttactgcaatgcggggcgcgggtgctgcccgtaaatccacagcttccgcaaccgttgcttgaggaattactgccaaatcttacactgcaatatgcgctggtgctggaaggagaaaatactttcccggcgttaacttcactgcatattcagatggttgaaggcacacattcagctctgtggcaaccaacacgtctttgttcaatgacattgacctccggctccaccggtttaccgaaagccgctgtccatacttatcaggcccatcttgccagtgcgcaaggtgtgttatcgctgattccgtttggcgatcacgatgactggttgctctctttaccgctgtttcacgtctccggtcagggaattatgtggcgctggttatacgctggtgcgcggatgacggtgcgtgataaacagccattggagcaaatgctggcaggctgtactcacgcttcactggtgccaacacaactctggcgtttgctggttaaccgcagttccgtttccctgaaagcggtgttacttggcggcgcggctatcccggtcgagttgacggaacaggcgcgcgagcaggggattcgttgcttttgcggctatggtctgaccgagtttgcctccacggtatgtgcgaaagaagccgacggcctggcagacgttggttcgccgctgccgggtcgggaagtgaaaatcgttaataatgaagtgtggctgcgggctgccagtatggcagaaggttactggcgtaacgggcaactggtttcactggttaatgacgaaggctggtacgctacgcgcgatcgcggtgagatgcataatggcaagctgaccattgtcggacgtttagacaatctgttattcagtggcggtgagggtattcagccggaagaagtcgagcgtgttattgctgcacatcctgcggttttgcaggtgtttatcgttcccgttgccgacaaggagtttggtcatcggccggtagcggtggtggagtatgaccagcaaaccgttgatcttggcgaatgggtgaaagataagctggctcgttttcaacaaccggtgcgctggctgactttaccgccggagctgaaaaacggcggtattaaaatttcacgtcaggcgctaaaagagtgggtgcaacgtcagcaataa

SEQ ID NO: 460431 - DNA, 963 bp, Shigella boydii
atgcgtagcgcgcaggtataccgctggcagatccccatggacgcgggggtggttctgcgcgacaggcggttaaaaacccgcgacgggctgtacgtttgcctgcgtgagggcgagcgcgaagggtggggggagatctccccactgccgggcttcagccaggaaacctgggaagaggcgcaaagcgtgctgcttgcctgggtaaataactggctggcaggcgattgcgagctaccgcagatgccttccgttgcctttggcgtaagctgtgcattggcggagctggcagatacgctcccgcaggcggccaattaccgtgcggcaccactgtgtaatggcgatcctgacgatctgatcctcaaacttgctgatatgccaggcgagaaagtggcgaaggtcaaagtgggattgtacgaagccgtgcgcgacggcatggtggttaatctgttgctggaggcaattccggatctgcatttgcgtcttgacgcaaatcgcgcctggacaccgctgaaaggtcagcagtttgccaaatatgttaacccggattatcgccaccgcatcgcgtttctcgaagagccgtgcaaaacccgcgatgattcgcgagcgtttgcccgtgaaacaggcattgccattgcctgggatgaaagcctgcgcgagccggattttgcctttgtggctgaagagggcgtgcgcgcggtagttatcaaacccacgctcacgggcagtctggaaaaagtacgcgagcaggtacaggcggcgcacgcgttgaggctgacggcggtgatcagttcttctattgagtcgagcttaggcttaacgcaactggcgcggattgccgcctggttaacgccggacaccattccagggctggacacgctggatctgatgcaggcgcagcaggtacgtcgctggccgggtagcacgctgcctgtcgtggaagttgatgcactggagcggttgttatga

SEQ ID NO: 460432 - DNA, 858 bp, Shigella boydii
atgatttatcctgatgaagcaatgctttacgcaccggttgaatggcacgactgctccgaaggtttcgaggacattcgttatgaaaaatccaccgatggtatcgcaaaaatcaccattaatcgtccgcaggtgcgcaatgccttccgtcctctgacggtaaaagagatgatccaggcactggcagatgcgcgttatgacgacaacgtcggcgtgatcattctgactggcgcaggtgataaagcgttctgctccggcggtgaccagaaagtgcgtggtgattacggcggctataaagatgattccggcgtacatcacctgaacgtgctggacttccagcgtcagatccgtacctgtccgaaaccggttgtcgcgatggtggctggctactccatcggcggcggtcacgttctgcacatgatgtgcgacctgactatcgcggcagataatgccatcttcggtcagactggcccgaaagtcggttccttcgacggcggctggggcgcttcctacatggctcgcatcgtcggacagaaaaaagcgcgggaaatctggttcctgtgccgtcagtacgacgcgaaacaggcgctggatatgggccttgtcaacaccgtggtaccgctggcggatctggaaaaagaaaccgttcgctggtgccgcgaaatgctgcaaaacagtccgatggcgctgcgctgcctgaaagctgcactgaacgccgactgtgacgggcaggcggggctgcaggagctggcgggcaacgccaccatgctgttctacatgacggaagaaggtcaggaaggtcgcaacgctttcaaccagaaacgtcagcctgatttcagcaaatttaaacggaatccgtaa

SEQ ID NO: 460433 - DNA, 759 bp, Shigella boydii
atgatcctgcacgcgcaggcaaaacacggaaaaccaggtttaccctggctggtgtttttgcacggtttttccggcgattgccacgaatggcaagaagtgggcgaggcgtttgccgactactcacggttgtatgttgatctcccaggtcatggtggttcggcggcgattagcgtcgatggatttgatgatgtcaccgacttactgcgtaaaaccttggttagttacaacatccttgacttctggctggtggggtactcgcttggcggacggggggcgatgatggcggcttgccaggggctggcggggctttgtggggttattgtcgaaggcgggcatccggggctgcaaaatgctgaacaacgtgcggaacgtcagcgttccgatcgccaatgggcgcagcgttttcgcacagaaccgttaacggcggtatttgccgactggtatcaacagcctgtttttgcctcgctcaatgacgatcaacgccgggagctggtggcgctgcgcagcaacaataatggcgcaacccttgccgccatgctggaggcgacttctctcgccgtccagcctgatttacgtgctaaccttagcgcccgcacatttgcgttttattatttatgtggtgaacgtgacagcaaattccgcgccctggcggcggaactggctgccgactgccatgtcattcctcgcgccggacataacgcgcatcgggaaaatcccgctggcgtaatcgcaagtctggcgcagatcttgcgtttctga

SEQ ID NO: 460434 - DNA, 1671 bp, Shigella boydii
atgtcagtaagcgcatttaaccgacgctgggcggcggtcattctggaagcattaacgcgtcacggcgtcagacacatctgtatcgccccaggctcgcgttctacaccgttaacgttagcggcggcggagaattccgcattcattcaccacacccatttcgatgagcgtgggttggggcatctggcgctggggctggcgaaagtcagcaagcagccggtggcggtgattgtgacctccggcacggcggtggcaaatctctatccggcactgattgaagccgggttaaccggagaaaaactgattctcttaaccgccgatcgcccgccggagctaattgactgcggcgcgaatcaggcaattcgccagccgggaatgttcgcctctcaccccacgcacagtatttcattgccgcgcccgacccaggatatccccgcacgttggctggtttctaccatcgaccacgctctcggtacgcttcatgcggggggagtccatatcaactgcccgtttgctgaaccgctgtatggcgaaatggacgataccgggcttagctggcaacagcgtctgggtgactggtggcaggacgacaaaccgtggctgcgtgaagcgcctagtctggaaagtgaaaaacagcgcgactggttcttctggcgacaaaagcgcggcgtggtggttgccgggcgcatgagtgcggaagagggcaaaaaagttgccctgtgggcgcaaactcttggctggccgctgattggcgatgtgctgtcacaaaccgggcagccgctgccgtgtgccgatctttggttaggcaatgccaaagcgaccagcgagctgcagcaggcgcaaattgtggtgcaactgggaagcagcctgacgggcaaacggctcctgcaatggcaggcaagctgtgaacccgaagagtactggattgtggatgacatcgaagggcggcttgatccggcgcaccatcgtggacgccgcttaattgccaatattgccgactggctggagctgcatccggcagaaaaacgccagccctggtgcgttgaaatcccgcgcctggcggaacaggcaatgcaggcggttattgcccgtcgcgatgcgtttggcgaagcgcaactggcgcatcgcatcagcgactatctgcctgaacaggggcaattgtttgtcggtaacagcctggtggtacgtctgattgatgcgctttcgcaacttccggcaggttacccggtgtacagcaaccgaggggccagcggtatcgacggactgctttcgaccgccgcaggcgttcagcgggcaagcggcaaaccgacgctggcgattgtgggcgatctctccgcactttacgatctcaacgcgctggcgttattgcgtcaggtttctgcgccgctggtattaattgtggtgaacaacaacggcgggcaaattttctcgctgttgccaacgccgcaaagcgagcgtgagcgtttctatctgatgccgcaaaacgtccattttgagcacgccgccgcgatgttcgagctgaaatatcatcgtccgcaaaactggcaggaacttgaaacggcatttgccgacgcctggcgcacgccaaccaccacggtgattgaaatggtggttaacgacaccgatggtgcgcaaacgctccagcaacttcaggcgcaggtaagccatttatga

SEQ ID NO: 460435 - DNA, 1296 bp, Shigella boydii
gtgcaatcacttactacggcgctggaaaatctactgcgccatttgtcgcaagagattccggcgacacccggcattcgggttatcgatattcctttccctctcaaagacgcttttgatgccttgagctggctggccagtcagcaaacgtacccgcaattctactggcaacaacgtaatggtgatgaagaagctgccgtcctgggcgcgattacccgttttacgtcgttggaccaggcacaacgttttcttcgccagcacccggaacacgccgacttacgcatttgggggctgaatgcttttgacccgtcgcagggcaatttacttttaccccgcttggaatggcgacgctgtggcggtaaagccacgctgcggctgacgctattcagcgaaagctcccttcagcacgatgcgattcaggcaaaagaatttatcgccacactggtgagtatcaagcccttgcctgggttacatttaaccaccacgcgagaacaacactggccggacaaaacgggctggacgcaattaatcgaactggcaacgaaaaccatcgccgaaggtgagctcgacaaagtggtgctcgctcgggcaactgacctgcatttcgcaagtccggtcaacgcggcggcgatgatggctgccagtcgtcgactgaatctgaattgctaccatttttacatggcctttgatggcgaaaatgcttttcttggctcttcaccggaacggttatggcggcggcgtgacaaagcgctgcgtactgaagcgctggcgggaacagtagcaaatcatcctgatgataagcaggcgcagcagttagaagagtggctgatggcggatgataaaaaccagcgcgagaacatgctggtggtggaagatatctgccaacgattacaggccgatacccagacgctggatgttttaccgccgcaggtactgcgtctgcgtaaagtgcagcatcttcgccgctgtatctggacttcactcaacaaagcggatgatgtgatctgtttacatcagttgcagccaacggcagcagttgctggcttaccgcgcgatctggcgcgacagtttatcgcccgtcacgaaccgttcacccgagaatggtacgccggttctgcgggctatctctcattacaacaaagcgaattctgcgtttccctgcgctcagcaaaaattagcggcaatgtcgtgcgattatatgctggcgcgggcattgtccgtggttccgaccccgagcaagagtggcaggaaatcgacaacaaagcggcagggttgcgtactttattacaaatggaatag

SEQ ID NO: 460436 - DNA, 306 bp, Shigella boydii
atgtctaatcagtttggtgatacacgtatcgatgacgacctgacgctgcttagtgaaacactggaagaggtgctccgctcctctggcgatcccgctgatcagaaatatgttgagctgaaagcgcgtgcagaaaaagcgctggatgatgtgaaaaaacgggttagccaggtttcagacagttattactatcgggcgaagcaggctgtttatcgtgctgatgactacgtccacgaaaaaccttggcaaggaattggtgtgggcgcggccgttgggctggtactaggactgttgctggcacgccgttaa

SEQ ID NO: 460437 - DNA, 462 bp, Shigella boydii
atgattgaatggcaagatctgcatcactctgaattatcggtttcccagctttatgccttattacaactgcgttgcgcggtgtttgttgtcgagcagaattgcccttatcaggatatcgatggtgatgatttgacggggaataatcgccatattctcggttggaaaaatgatgaactggtggcatatgcgaggattctgaaaagtgatgatgatcttgagccggtcgttattggtcgggtgattgtcagtgaagcgttgcgtggcgaaaaagtggggcagcaactgatgagtaaaaccctcgacacctgcacgcatcactggcctgataagcctgtttacctcggggcgcaggcgcatctgcaaaacttctaccagagtttcggttttatccctgtgacggaggtctatgaagaagatggtatcccacacattgggatggcacgcgaggtaattcaggcgtaa

SEQ ID NO: 460438 - DNA, 936 bp, Shigella boydii
ttgaaacgtgatgaactcatggaattaatttttttaggtacttcagccggtgtgccaacccgcacgcgcaatgtcacggcaatattgcttaacctgcaacatccgacccagagcggactttggttgtttgactgcggtgaaggcacccagcatcagctactgcataccgcctttaaccctggaaaactggacaagatttttatcagtcaccttcatggcgatcatctttttggtttacccggcttgctgtgcagtcgttctatgtcaggcattatccaacccttaacgatttatggtccgcaaggtatccgtgaatttgtggaaaccgcgctgcggattagcggctcatggaccgattatccgctggaaattgtcgaaattggcgctggcgaaattctcgatgatggcctgcgcaaagtaaccgcttatccgctggaacacccactggaatgttatggctatcgtattgaagaacatgataaaccgggtgcattaaatgcccaggcattaaaagctgctggcgtgccgcctggcccactgtttcaggaattaaaagcgggcaaaacaatcatgctggaagatggaaggcagattaacggcgcagattacttagctgctccagtgccaggtaaagcgctcgctattttcggcgataccggcccctgcgatgccgcacttgacctggctaaaggtgtcgatgtcatggtgcacgaagcgacgctggatataaccatggaagccaaagccaatagtcgcggccatagctctacacgccaggctgcgacactagcccgtgaggctggagtcggtaagctaatcattacccacgtcagctcgcgctatgatgacaaaggttgtcagcacctgttacgtgaatgcaggtcaattttcccggcgactgaactagcgaatgatttcaccgtgtttaacgtttaa

SEQ ID NO: 460439 - DNA, 777 bp, Shigella boydii
ttgcaactaaaaggagcccatgatggttacagttgtcagcaattattgtcaattatctcaaacccaactcagtcagacatttgcagaaaaatttactgggaccgaggaattactgcagtctttaaaaaaacagcgttatccggagatgaagaaagtattgagttactgcataatattgcgttaggttatgatgaatttggaaaaaaagctgaagatattctttaccatattgttagaaacccaacaaatgagaccctatcgattatccgacttattaaaaatgcctgtttaaaattatataatttggcacataccgcaaccaactcccaccttaaaccaactggtccggataattcagatgttctcctattcaaaaagctattctccccttcgaaattaatgacaattatcggtgatgaaattcctcttatatctgaaaaacagtcgctttcaaaggtgcttttaaatgatgagaataatgaactgagtgatggtacaaacttctgggataaaaatcgtcaattaaccacagatgaaatagcttgctatcttcagaagatcgccgctaatgcaaaaaatactcaagtcaattatcctactggtctctacgtcccctactccaccagaactcacctggaagacgctctcaatgaaaatattaagagcgatccatcatggccgaatgaagtccagttattccccataaatactggcggacactggatattagtttcgctacagaaaatagtaaataaaaaaataataaactacaaataa

SEQ ID NO: 460440 - DNA, 372 bp, Shigella boydii
atgggagaaatgtcgaataataatataaaagttcatttaaatgaaccagagataatatttttacatgccgatcttcagcaatacttaagccaaagttgcggtgcgtttgtgtgcatggcagcccaggaagtgattgaacaaagggaaagcaattctgacagcgccccctatacgttattaaaaaactatgctgacagatttaaaaaatattcagcagaagagcagtgcaaaattgattttcaacatcgactggtaaacaggaattgttatttagataaatatggcgatgcaggtaatgactccaacttactgatagttttttatgttcagataatgcccgatgaccttgtcatgcagctccaccgattttga

SEQ ID NO: 460441 - DNA, 741 bp, Shigella boydii
gtgaactgggcggcgcaaattctcggcctgcgtgagtacctgaaacgcaagccgggcgcgctttccggcgggcaacgccagcgtgtggcgctcgggcgggcgattgtgcgcgaagcgggcgtgtttttaatggatgaaccgctctctaaccttgatgccaagctgcgcgtgcaaatgcgcgcagagatcagcaagctacaccagaagctgaataccaccatgatctacgtgacccacgatcagaccgaagcgatgaccatggcgacgcggattgtgattatgaaggatgggattgttcagcaagttggtgcgccgaaaacggtttataaccaaccagcgaatatgtttgttgccggatttattggatcaccggcgatgaattttattcgtggcacgatcgatggcgataaattcgttacggaaacgcttaaattaaccattcccgaagagaaattagcggttctgaaaacacagggaagtttgcataagcccatcgtgatgggaatacgtccggaagatattcatccggacgcgcaagaggaaaataacatttccgccaaaattagcgtggcagaattaaccggtgcggaatttatgctctacaccacggttggggggcacgagttagtggtccgtgctggtgcgttaaatgattatcatgcaggagaaaatatcactattcattttgatatgacgaaatgtcatttctttgatgcagaaacggaaatagcaattcgctaa

SEQ ID NO: 460442 - DNA, 906 bp, Shigella boydii
atgaaaaagttattaccctgtaccgcactggtgatgtgtgcgggaatggcctgcgcacaggccgaggaaaagaactactggcactttaatatcggcgcgatgtacgaaatagaaaacgtcgagggttatggcgaagatatggatgggctggcggagccttcagtctattttaatgccgccaacgggccgtggagaattgctctggcctattatcaggaagggccggtagattatagcgcgggtaaacgtggaacgtggtttgatcgcccggagctggaggtgcattatcagttcctcgaaaacgatgatttcagtttcggcctgaccggcggtttccgtaattatggttatcactacgttgatgaaccgggtaaagacacggcgaatatgcagcgctggaaaatcgcgccagactgggatgtgaaactgactgacgatttacgtttcaacggttggttgtcgatgtataaatttgccaaccatctgaacactaccggttacgctgatacccgtgtcgaaacggaaacaggtctgcaatataccttcaacgaaacggttgccttgcgagtgaactattatctcgagcgcggcttcaatatggacgacagccgcaataacggtgagttttccacgcaagaaattcgcgcctatttgccgctgacgctcggcaaccactcgttgacgccgtatacgcgcattgggctggatcgctggagtaactgggactggcaggatgatattgaatgtgaaggccatgattttaaccgtgtaggtttattttacggttatgatttccagaacggactttccgtttcgctggaatacgcgtttgagtggcaggatcacgacgaaggcgacagtgataaattccattatgcaggtgtcggcgtaaattactcgttctga

SEQ ID NO: 460443 - DNA, 999 bp, Shigella boydii
atgtcccctactatttatgatattgccagggttgcaggcgtatcaaaatccaccgtatcacgcgtgctgaataagcaaactaatatctccccggaagcgcgcgaaaaagtgttacgggccattgaagaattacagtatcagccaaacaagctggcccgcgcgctgacctcttcgggttttgatgccattatggtgatttctacccgttcgaccaaaactacggcgggtaatccgtttttctctgaagttttgcatgccatcaccgccaaagctgaagaggaaggtttcgacgtgatattgcagacgtcgcacaatccggcagaagacttacaaaaatgtgaaagcaaaattaagcagaaaatgattaaaggcattattatgctaagttctccagcggatgagtcattttttgcccaacttgataaatacgatattcctgtcgtggtgattggcaaagttgaaggtcaatatgcccatgtttattctgtcgataccgataattttggcgacagcattgcgttgaccgatacattaattgaaagtgggcatcaaaatattgcctgcctgcatgctccgcttgatgtccatgtttcagtggatcgggtaaatggttataagcagagcctggctgcgcataatattgcagtgcgtgatgaatggattgttgacggtggttatacccatgaaacagcactgcaagccgcgagagaattattaagccagtcaccgttgcctgaggcggtgtttgccactgacagtctgaaattaatgagtatttatcgtgcggcggcagagaaaaatattgctattccgcagcagttagcggtggtgggttatagtaatgaaacgctgtcgtttattttaacacctgcaccgggcggcatcgatgttccgacgcaggagttaggtcaacaaagctgcgagttattattccgcttaatttctggaaaaccgtcaccacagaatattaccgttgccacgcatatgacgctgaaataa

SEQ ID NO: 460444 - DNA, 1398 bp, Shigella boydii
atgaagcgacttaaaaatgaacttaatgcgctggtgaatcggggtgtcgacagacatctgcgcctcgccgtaaccggactaagccgcagcggcaaaacagcgtttatcactgcgatggtcaatcagttgctcaatattcacgccggagcacgcttgccgctgttaagcgcggtgcgtgaagagcgcctgctgggcgtaaaacgcattcctcagcgtgactttggcattccgcgcttcacatatgatgaaggactggcgcagttatatggcgatcctcccgcctggccgacgccaacgcgcggcgtcagtgaaatccgcctggcgctacgttttaaatcgaacgattcgctgctacgccacttcaaggacacctccacgctgtatctggagattgtggattatcccggcgaatggttgctcgacctgccgatgctggcgcaggactatttaagctggtcacgccagatgacgggcttactcaatggtcagcgcggcgaatggtcggtcaaatggcgaatgatgtgcgaagggctggacccgctagcacctgccgacgaaaaccggctggcagacattgccgccgcgtggaccgattatctccaccactgtaaacagcaggggctgcactttattcagccagggcgctttgtcttgccaggagatatggcaggtgcgcccgcgctgcaattcttcccgtggccggatgtcgatacctggggcgagtccaaactggcgcaggccgataagcacaccaatgccggaatgctgcgcgagcggtttaattattactgcgagaaggtggtgaaggggttctataagaatcattttctgcgctttgaccgccagattgtgctggttgattgcctgcaacctctcaacagtgggccacaggcatttaatgatatgcgtctggcactgacgcagctgatgcaaagtttccactacgggcagcgtaccttgttccggcgtttgttttcgccggttatcgataagctattgtttgctgccactaaagcggaccatgtgaccatcgatcagcacgccaatatggtttcattactgcaacaactgattcaggatgcctggcaaaatgcggcgtttgaagggattagtatggattgtctggggctggcctcggtgcaggcgaccaccagcggcattattgacgtcaacggcgagaaaattccggcattgcgcggtaaccggctcagcgatggtgcgccactcaccgtttatcccggtgaagttcctgcgcgtttgcccggtcaggcgttctgggacaaacaagggttccagtttgaagcgtttcgcccgcaggtgatggatgtcgacaaaccgctgccgcatattcgtcttgatgccgcgctggaatttttaataggagataaattgcgatga

SEQ ID NO: 460445 - DNA, 1062 bp, Shigella boydii
atgaccgaaccgttaaaaccacgtattgatttcgacggtccgctggaggtcgatcagaatccaaaattcagggcgcagcagacctttgacgaaaatcaggcgcaaaattttgccccggccacgctcgatgaagcgcctgaagaagaggggcaagttgaagcggtaatggatgcagcgttacgtccgaaacgcagcctgtggcgcaaaatggtgatgggcgggctggctctgtttggcgcaagcgttgtcgggcagggtgtacagtggacaatgaatgcctggcaaactcaggactgggtggcgctgggtggatgtgccgctggggcattgattatcggcgctggcgtaggttctgtggtaacagagtggcggcgcttatggcgcttgcgacagcgcgcccatgaacgcgacgaagcgcgcgatttgttgcacagccacggcacgggcaaaggccgcgcattttgcgaaaaactggcgcagcaggcgggtattgatcagtctcatccagcgctgcaacgctggtatgcctcaatccatgaaacgcaaaacgaccgtgaagtggtcagtttgtatgcgcatttggtccagccagttttagatgcccaggcgcggcgcgaaatcagccgttcggcggcggaatcaacgttgatgattgcggtcagcccgctggcgttggtcgatatggcgtttatcgcctggcgcaatctgcgtttaattaatcgcatcgccacgctgtatggcattgaactggggtattacagccgtttgcgtctgtttaagctggtattgctgaatatcgcttttgccggagccagcgaactggtgcgcgaagtggggatggactggatgtcgcaagatctcgctgctcgtttgtctacccgcgcagctcagggaattggtgctggacttctgacggcacgactcgggattaaagctatggagctttgccgcccgctgccgtggattgacgatgacaaacctcgcctcggggatttccgtcgtcagcttatcggtcaggtgaaagaaacgctgcaaaaaggcaaaacgcccagcgaaaaataa

SEQ ID NO: 460446 - DNA, 1542 bp, Shigella boydii
atgcgtctggaagtcttttgtgaagaccgactcggtctgacccgcgaattactcgatctactcgtgctaagaggcattgatttacgcggtattgagattgatcccattgggcgaatctacctcaattttgctgaactggagtttgagagtttcagcagtctgatggccgaaatacgccgtattgcaggtgttaccgatgtgcgtactgtcccgtggatgccttccgaacgtgagcatctggcgttgagcgcgttactggaggcgttgcccgaacctgtgctctctgtcgatatgaaaagcaaagtggatatggcgaacccggcgagctgtcagctttttgggcaaaaattggatcgcctgcgcaaccataccgccgcacaattgattaacggctttaattttttacgttggctggaaagcgaaccgcaagattcgcataacgagcatgtcgttattaatgggcagaatttcctgatggagattacgcctgtttatcttcaggatgaaaatgatcaacacgtcctgaccggtgcggtggtgatgttgcgatcaacgattcgtatgggccgccagttgcaaaatgtcgccgcccaggacgtcagcgccttcagtcaaattgtcgccgtcagcccgaaaatgaagcatgttgtcgaacaggcgcagaaactggcgatgctaagcgcgccgctgctgattacgggtgacacaggtacaggtaaagatctctttgcctacgcctgccatcaggcaagccccagagcgggcaaaccttacctggcgctgaactgtgcgtctataccggaagatgcggtcgagagtgaactgtttggtcatgctccggaagggaagaaaggattctttgagcaggcgaacggtggttcggtgctgttggatgaaataggggaaatgtcaccacggatgcaggcgaaattactgcgttttcttaatgatggcactttccgtcgggttggcgaagaccatgaggtgcatgtcgatgtgcgggtgatttgcgctacgcagaagaatctggtcgaactggtgcaaaaaggcatgttccgtgaagatctctattatcgtctgaacgtgttgacgctcaatctgccgccgctacgtgactgtccgcaggacatcatgccgttaactgagctgttcgtcgcccgctttgccgacgagcagggcgtgccgcgtccgaaactggccgctgacctgaatactgtacttacgcgttatgcgtggccgggaaatgtgcggcagttaaagaacgctatctatcgcgcactgacacaactggacggttatgagctgcgtccacaggatattttgttgccggattatgacgccgcaacggtagccgtgggcgaagatgcgatggaaggttcgctggacgaaatcaccagccgttttgaacgctcggtattaacccagctttatcgcaattatcccagcacgcgcaaactggcaaaacgtctcggcgtttcacataccgcgattgccaataagttgcgggaatatggcttaagccagaagaagaacgaagagtaa

SEQ ID NO: 460447 - DNA, 507 bp, Shigella boydii
atgtcacaaaccgttcatttccagggcaacccggttacagtcgccaattccatcccgcaggcgggtagcaaagcgcagacttttactctcgtggcaaaagatctgtctgacgtcaccctcggtcagtttgcgggtaaacgcaaagtgctgaacattttcccgagtattgataccggtgtttgcgccgcatcagtacgtaagtttaaccaactggcaaccgagatcgacaacaccgttgtgctgtgtatttctgccgatctgccgttcgcccagtctcgtttctgcggcgcagaaggtctgaacaacgttatcaccctctccactttccgtaacgctgaatttctgcaagccttcggtgtggcaattgctgatggcccactgaaaggtctggcagcgcgtgccgttgtggttattgacgaaaatgacaatgtgattttcagccagctggtggatgaaatcaccaccgagccggattacgaagcagctctggctgtactgaaagcataa

SEQ ID NO: 460448 - DNA, 966 bp, Shigella boydii
atgagaaccgttaaggtatttgaggaagcctggcccttacataccccgtttgtgattgcccggggaagtcgcagtgaagcgcgcgtggtggtggttgaactggaagaagagggtattaaaggcaccggcgaatgcacgccgtatccgcgttatggagaaagtgatgcctcggtaatggcgcaaattatgagcgtcgtgtcgcaattagagaaagggctgacacgggaggagttgcaaaaaattctccctgccggcgcagcacgtaatgcgctggattgtgcattgtgggatctggccgcgcgaaaacagcagcaatcgctggctgatttgatcggcataacgcttcccgagacagttatcactgcacagacggtagtcatcggtacgcctgatcagatggccaatagtgcatcaacactctggcaggcaggcgcgaaattactgaaagtgaagctggataaccatcttattagtgagcggatggtggcaattcgcacagctgtgcccgatgcgacgctgatcgttgatgcaaatgaatcctggcgtgcagaagggttggcggcgcgttgccagctattggcggatttaggcgttgcgatgcttgaacaaccccttcctgcgcaggacgatgcggcgctggagaattttattcatccgttgccgatttgtgctgatgagagttgtcatacacgtagcaatctgaaggcgctgaaagggcgctatgagatggttaacattaagctcgataaaaccggtggtctgacggaagcgctggcgctggcgactgaagcgcgtgcacaaggtttcagtctgatgctgggctgcatgttgtgtacctctcgtgccattagcgccgctttaccgctggtgccgcaggtcagtttcgccgatcttgacggaccgacctggctggcggtagatgtggaaccggcgcttcagttcacgacgggcgaattgcatctttag

SEQ ID NO: 460449 - DNA, 729 bp, Shigella boydii
atgaccgtaacccgcccacgcgccgaacgcggcgcatttccgcccggaacagaacattacggacgttcattattgggcgcgccgttaatctggtttcctgcccctgcagccagccgcgaaagtggtttgattctggctggcactcacggtgatgaaaactcttcggtcgtcacgctctcctgtgctctgcggacgttgacaccttctttgcgccgccatcatgtggtgctgtgtgtgaatcctgacggctgccagctggggttacgggccaatgctaatggtgtggatttaaacagaaactttccggcggcgaactggaaggaaggtgaaacggtttatcgctggaacagcgccgctgaagaacgtgatgtcgtattactgacaggtgacaaacctggctcagaacctgaaacccaggcgctgtgccagcttatacaccgcattcaacctgcctgggtggtctcattccacgatccactggcctgtattgaagatcccagacacagcgaattaggcgaatggctggcccaggcgtttgaattgcctctggtaaccagcgtcggttatgaaacgcctggctctttcggcagttggtgtgcagatctcaacttgcattgcatcaccgcagagtttccgcccatctcctccgacgaagccagcgaaaaatatctctttgcgatggcatacttgctgcgctggcatcctaaagatgcaattcgcccgtcgtga

SEQ ID NO: 460450 - DNA, 261 bp, Shigella boydii
atgttttcgaactttttcatggcttcctcagctgacttatatgttctgctatatagcgagtctcagaagtgttttcatattgagactgtttccgcaatgattgataaaaatgttcgcatgtaccttgaagggcgaagcggcgattatgtcaccattggtattggttcttccgcagaagagcttcgcgagataaggggcaaacttgttgagatgcgtcatggtgttgctgctcctcactttttggttgctccggaggagtaa

SEQ ID NO: 460451 - DNA, 504 bp, Shigella boydii
atgatcaataaagctacaactcttgactgtctcgaagaactgaaaaacctcggcagcctcattacactaatagcaaaagcaacacctgatgctacactctctagcgatatagagtcatgcgcaggactggcatgggatatgacaaatagcatatccagaaagctatcgtcagcaatgcttttacagaacaaaaattctgcaatcaacaaccgtcttcgcacccaacgcgaagcctgcggcttaacaaccgccgaactcgccaggctgctcgatctcgatgaagaaattatcatccagtgggagagcggagagtatgaaccaactatcagtatgcttatcccactggcaaatattcttggctgcgatccgatgtggctgttaactggtgaggttactcctccggagcaaccaaaaagtgaggagcagcaacaccatgacgcatctcaacaagtttgccccttatctcgcgaagctcttctgcggaagaaccaataccaatggtga

SEQ ID NO: 460452 - DNA, 657 bp, Shigella boydii
atgaagtctttaggtgaacgtctcatcaacgcacggcaaaaagctgggttaacacaagatgcgttggctaaaaaagctgggatcaccagagttgcaatcagtaaagccgagcaaggccttacaaaaagtttcaacggtgacaccctttttaaagttgcagctgcactgcggtgttcaccgcagtggcttcagaacggagatgaaaaagataagcattgggaaaataatgttaagagctgcccacagagagacacagcacactcttaccctgtaattaactgggttcaggcaggattattcgcaacttctggtgatgactacaacatgtatgatcaggataattggaggcattctgtaaaatacgctggtgagagggggttctggctggaagtgcacggagactcaatgacttcgcccgtaggaataacatttcctgaaggaatgtcgatccttgtcaacccagataaagaagttttttcagggtgttacgtcatcgccagaaaaaaatccaccaatgaagcaacattcaaaaaatatatttctgacatgggaaaggcgtttctaaagccccttaatccacaatatccaatcatagaaatggacaatgattgcgaaatagtaggtgttgtggttgatgccaggtgggatattttctga

SEQ ID NO: 460453 - DNA, 228 bp, Shigella boydii
atgaccctttatgaaatattaaaaattcaatttaaaaccaatgccgctattggtcgcaggttcccaaagaaaggaaggcctcgtggcagtcaaggtgttggaaagtggaaaacgcgaggtgttccggaggatgttgccattctttgtcatctggatccgagcattccatatacacacccaaggctagcgaatacagaagatgacaagcccacaggagaccaacaatga

SEQ ID NO: 460454 - DNA, 708 bp, Shigella boydii
atgaacaccgcaatttttaacggcaaagcatccatgaccagcgttgagatcgcagagctggtgggaagccgaccagatagtgttaagagaactattgaaacactggctaaaaagggaatcatccaatttccacagactgtggaaattgagaataaacaatcacttgggcctcgccgattttctagcgcgtatgtattcgaaggtgaacgaggtaagcgcgacagcatcattgtcgtcgcacagctctgtcctgaattcacagctcgcctggtagatcgctggcgcgaactggaagaacagatccgtaagccaatgagcgaaatcgaaatggttgccgcgatggctcttgaagccgttcgccaacagaaacggatcactcaggtggaagaaaaagtcagccacgttgctgaaacagtcgagcaaattaaaaagggcactattcgtgagggctatgccggatatcgccaactgaaagcaaaaaccggtttgtcagatgataaatgccgcaatctggtgaacgcctatcaaattcctacagacacccatgagttcatgacgccggacagattgttgccacgtcgcgcaattgttgctgtggaaccgtttatggctgctttttatcgggttatggaggaagcagaaccgcgagggactcgctggtatcacccgaaaatggggttatttcaggttattggttggcagcggtga

SEQ ID NO: 460455 - DNA, 849 bp, Shigella boydii
atgatcatttcaagaccaaatattgattctgcaatttcgggacgttacactgtctccgcaccttataaagcgggtgccgggattggcgtcctgaaattcgcacatgcgcataaccgcgcttcagcggtttttttgcgcacgtttcctcacatccaaattatggtggggcgtgcaggggcatcgaaagatgcgccggggtcatgtgcgaccggttacgccaaccctgtacgtctcaccacctctgtgattggcgtcccatgtggtgagttttcaaaattcgcacatgaggatgtcactatggcaaccacccctacccaaactcaccctaaaattgatgttatccatgggaaggctgttacctcttctttggccgttgccgaatatttctgcaagcagcacaaaaacgttattcaaaaaatccagacgcttgagtgctctgttgaattcactgagctgaattttcagcccagtgattacaccgattgcacaggccgcaaactaccttgctatcaaatcacccgcgatggcttcgcgttccttgctatgggctttactggcaaacgtgcagcccggttcaaagaggcatacatcaacgcctttaaccagatggagaagaatttatctggtgctgacgcggttgatatgtcagctgtcgcacgaaacgccagaggcgtatacctgcatttgcgtgaaatccatcaaatctggacaagccagctttatccaatgcttaaggccgttgaatctccgctggctagcaaactgtacgaccgtgttggtgatgctgtttttggcgctgcacttgttgattccaggctgaatggttctgacaaggaggttcgcccatga

SEQ ID NO: 460456 - DNA, 195 bp, Shigella boydii
atgattagttacgaaatcatcatctccactacggaatacagaaacgatgtatcagttcgcacggatgtatctgtctggcaccgtcgctataaatccagaaaaacagcggaactgaaagcggcagagatgtgtgaaaccatctcaatgaaaggtagcccggttaaatacgtaactacggtggaggtgcgtccatga

SEQ ID NO: 460457 - DNA, 225 bp, Shigella boydii; identical to SEQ ID NO: 7797

SEQ ID NO: 460458 - DNA, 300 bp, Shigella boydii
gtgaactgttttcagtttgtgtgcggatgtgctttcgataacccgattcagcgcctgattatgttgcgtgttttgatgtcgggttcttcagacggtgaaggcgagagagttattgatcatcaggtgcttgctgatttctgctgttgttctaagcaagcgatattcagggaaaccctggcactggaaagagctggttatcttcatatccgaaaaattgcaacgcttactattgatgcaaaagccagactacaacctgcgcgtggctacacaattctcatgccgcggaaggaggttgtatga

SEQ ID NO: 460459 - DNA, 981 bp, Shigella boydii
atgagccgttacgcccccacaccggaagttatggctattggtcaaattaatatttccggcaatgttacacctgcgaactggtggaaatatattcgactacccagtgggcgtccggatgcgacggctatcgctctgctttcagagatcgtttactggtaccgcccgacagaggtcagggatgagcacaccggagcgttgctgggatatcgcaagcgttttcagggcgacaaactgcaaagaagctaccaggcgtttgctgagcagtttggtttcgggaaaagggaaaccgcagatgcgctgaagcgtctgcgcgatgcagggtttattactctggatttacgcacggtggaaatgctcgatggggtgaaatgcagcaatattttgtttgtcgggatcaacccacaggcaattgcggccatcaccacaccttcttctgtttcgccagaaagtaacagcaataatgcaatcagcgatacagctattacgttaaaacggaacaccccccgacgtcataacggaacaggggatacgccgaatgttgatacaaatacagagattacaacggagactaaaaacactattgatgcatccgctgacgcgtctgcgccagcgcgttctgcccgacaggaatattcaccggaatttgaacaggcctggcaggaatatcccaaacgtgctggtggcaattccaagtcagcagccttcaaagcctggaaagcccgtatcagggaaggaataaaaccggagaccatgcttgatggcgtgaagcggtatgccgcctgggtacgtgctacaggaaataccggcacacagttcgtgaagcaggctgcgacgttctttggacccgatcgtcacttcgaagattactggcaacagccagccgctcacggaggtgggcgacagcgacaggttgatgtcctggctggcctgggagccatgtctgacaaattcggtaaatccagtaacaaattgacattctga

SEQ ID NO: 460460 - DNA, 879 bp, Shigella boydii
atgatgacgattgaccaacgtgagaaacaaacaagactacaggcgcgaatggatgagttacgggcagagattgcatttgctcagaagggcgaaaagccatggccttatcgttcctgcctgatgcgtgaaggtcgcggatattgcgaaaaacacggtaaatatcgtacgcatatactggtgtggagcgatcgtaatggcgaggacagagaaaaaatttcatgctgccctgactgcttgatcgctgaagccagttatttgaccatggaactgtcgtccctcaaggcggaagaactgactgataacgccggaattgctctgcgttttcgggactgcgagtttgataattatctggaggttaatcctgacgcagccagaaatcttgcggcctgtcgccgctatgcggagaactggccagatatgctggagaacggtaccagtcttgttatgaccggcagttgcggtaccgggaaaaatcatctggcggtatcaatggcaaaacacatcatccgtaactatctggccagtgtggagatcaccgacgtgatgcgccttacccgggctgtgaaaaactgctggcggaatgacagtgaaaaaacagcggatgacgtcattgagcattatgcgtcactggatttgctgattgtcgacgaagtcggcgttcagtttggcagtgcggctgaaatggccattttgcaggaaattatcaatgcccggtatgagggtattttgccaactatcttgatcagcaatctttcaccggaagaattgtgggcgttcatcagtccccggattgccgacaggatcaccgatggcgggcgcaactggttgtcgtttaactggcccagctaccgttctcgtatcggaggtgttgccgcatga

SEQ ID NO: 460461 - DNA, 879 bp, Shigella boydii
atgaccagccagaacaccccggcatggcgtaacgatgacctggaaggcgctgtcatcggtgcgttttttctgcgtggggccgatccggaagtgatggatattctggccacacttccggcggatgtattttttgtgcgtcagtaccgggatatttacgcggggatttgcagacaggctcgcatatccggcgtcattgaccccgtactgctgtgcaatgagatgccggaacttgccccggtgattaccgacaccggacgcaaaacctgggtgaagtcttcactggagcactatgtcgcagcgttgcggcgcaatgccgcactgcgcgatgcagaaaaaacactgactgaagcattacagaatttacgtgatgcgtatacctgtgaagcagccgaggatgccctgaaggatgtgcagaacatgatggcctcactgtcgaccggaaagggcgtcattcagccggttcacattgatgatgtccttctggaagtggtcgaccgtgttgaatgccgcaatcagggactggagaaatccagggcgctgatgaccggtattgatgaactggacgcaaaaacgggcggtatggagcccggagacctggtattcattgccgcccgtccttcgatggggaaaaccgaacttgcgctggacatcatcgacaaggtgactgagcaggggcatggcgtgcttctgttcaccatggagatggcgaacatccagattggtgaacgtatggtgtctgctgccggtggaatgccggtatcccgtcttaagtctgttgcccgttttgaagatgaagactgggcgcgtttctcgcagggcgtgggacgaatgacggggcgtaatatctggatggtggaccaggcaaacctgacccattga

SEQ ID NO: 460462 - DNA, 492 bp, Shigella boydii
atgaaacacccggaaacggcgctggtggtggtcgattacctcggcctgattaaaacccgcagtacggggcgtcacgaccttgcggtgggggaaatctcaaagggacttaaaagcctggcaaaatccggcggttttccgctgattgctctgagccagctctcccgcggcgtggaatccagacccaataaacgcccaatgaactcggacctgaaaaactccggggaaatcgaggcggatgccgacatcattctgatgctttacagggatgaggtatacaacccggaaactcaggccagaggcatagcagaaatcaacatcacgaaacagcgtaatggcacgctcgggaccatttaccggcgttttcataacggacattttctgcctgtggaccaggagagtgcccgggttctttccacacccatgacgccgggcaatccgcgcagatacagcaataaccgcatgtcgggcagtaaaacggagcgtttattttga

SEQ ID NO: 460463 - DNA, 258 bp, Shigella boydii
ttgaacaacagaacaatcactgtttcaccggaacaacttcgtcggcaggcgcaggagatgcttcgttgtgctgaacagatggaaaaaacgagcgtggcaaaagatacgctccgcaagcagcttactccggcgcttcgtgatctgctgcaggcaaaacaccgtacacaaaaggcggtggatgagctggtggattgcgtggcggaactggaaggccaggtaagccagtttgaaacgctggtgaaggagtttactgcgtga

SEQ ID NO: 460464 - DNA, 828 bp, Shigella boydii
gtgagagcattgttgactcctgaaattgccccgcgaatggggattgtattgttcaggcccggttcagagctgatgcccctgtttatgcaggggcgtgtcctgctggagcctgagccggaacgttattcatctttcgccagcggtgccgttccggcagcatcacaaccgctggcggatgatcctgccgttcgggccgtgttccgccatgaggcggtgatccgtcgtgctggtggcgtggaatgccttgagagctggttacttcgtgaaaagggctgtcagtggcctcattccgactggcacagcgagaacatgaccacaatgcggcacgcgccaggcgcaatccgtctgtgctggcactgtgacaatcttctccgtgaccagttcacggaacggctggaatcaatggcaacggataactgtgcccgctgggtgttgtctgttgtgcgtcgggatctcggttttgatgacagtcacgttgtgacaatgccggaactgtgctggtggctgattcgtaatgacctggcggatgccttaccggaaagtgcagcccgtaaggcactgagattaccgaagcctgttgtgccgtctgtcacccgggaaagtgaccttgtgccttcggttcctgccaccagcatcatccaggataaggcgaaaaaggtgctggcgctgaaagtggatccggagtcgccggagtcttttatgttacgcccaaaacgtcgccgctgggttaacgagaaatacacacgctgggtgaagacacagccgtgtgcgtgttgtggtaagccagccgacgatccccatcacctgattggtcatggtcagggctga

SEQ ID NO: 460465 - DNA, 162 bp, Shigella boydii
atggggacaaaatctcacgatattttcacgctaccgctgtgtcgggagcatcacaacgagcttcatgcggatcctctggcgttcgaagaaaagcatggttctcaggttgatttaatttttcgttttcttgatcacgcctttgcaactggcgtgcttgggtaa

SEQ ID NO: 460466 - DNA, 375 bp, Shigella boydii; identical to SEQ ID NO: 4955

SEQ ID NO: 460467 - DNA, 822 bp, Shigella boydii
atgaaactggaagatttaccgaaatactactccccaaaatcccctagcctgaccgatgcatcggcctcaacgtcaaaagatgcgctgagtatcactgatgtgatggccgcgcagggcatgacacagaatcgggctgagatggggttttctgcgttcctggggaaaatgggcatcagtatgaatgacagggcgcgggcaacagaattactggcagattatgcactcagtcggtgcgatcgtgtggcggcgttgagaaaacttccggcagaaataaaaccggtagtgatgcgcattatggcttcgtatgcgtttgaagattatgcccgtagcgcggcgagcaaaaaacagtgcccctgctgtcacggaaaaaaatttattgaaagcgaggtttttacaaacaagatccagtatccggatggtaagccaccagtgtgggcaaagtgcacaaaaggcgtgtatccgtcttactgggaagaatggaaaaaagtcagggaggtggtaaaagttgcctgtccggagtgtggcggaaagggtgaggtttccaccgcctgtaaggattgccgtgggcgtggtgtcgccattcatcgtgaagagtcggtaaaacgtggtatgcctgttatcagagactgccagcgttgtggtggtcgtggctgtgaaagactaccatcaacggaggcatttaatgccatatgcaaagtgacgagtgctatcacgcttgatacgtggaaaaaatcagtgaaacgcttttacgatacgttggtggttcggtttgacattgaagaggcatgggcggagcggcagttaaagagggtaacgcgatag

SEQ ID NO: 460468 - DNA, 1350 bp, Shigella boydii
atgtctgaaattgttgtctccaaatttggcggtaccagcgtagctgattttgacgccatgaaccgcagcgctgatattgtgctttctgatgccaacgtgcgtttagtagtcctctcggcttctgctggtatcactaatctgctggtcgctttagcggaagggctggaacctggcgagcgattcgaaaaactcgacgctattcgcaacatccagtttgccattctggaacgtctgcgttacccgaacgttatccgtgaagagattgaacgtctgctggagaacattactgttctggcagaagcggcggcgctggcaacgtctccggcgctgacagatgagctggtcagccacggcgagctgatgtcgaccctgctgtttgtcgaaatcctgcgcgaacgcgatgttcaggcacagtggtttgatgtacgtaaagtgatgcgtaccaacgaccgatttggtcgtgcagagccagatgtagccgcgctggcggaactggccgcgctgcagctgctcccacgcctcaatgacggcttagtgatcacccagggatttatcggtagcgaaaataaaggtcgtacaacgacgcttggccgtggaggcagcgattatacggcagccttgctggcggaggctttacacgcatctcgtgttgatatctggaccgacgtcccgggcatctacaccaccgatccacgcgtagtttccgcagcaaaacgcattgatgaaatcgcgtttgccgaagcggcagagatggcaacttttggtgcaaaagtactgcatccggcaacgttgctacccgcagtacgcagcgatatcccggtctttgtcggctccagcaaagacccacgcgcaggtggtacgctggtgtgcaataaaactgaaaatcctccgctgttccgcgcgctggcgcttcgtcgcaatcagactctgctcactttgcacagcctgaatatgctgcattctcgcggcttcctcgcggaagttttcggcatcctcgcgcggcataatatttcggtagacttaatcaccacgtcagaagtgagcgtggcattaacccttgataccaccggttcaacctccactggcgatacgttgctgacgcaatctctgctgatggagctttccgcactgtgccgggtggaagtagaagaaggtctggcgctggtcgcgttgattggcaatgacctgtcaaaagcctgcggcgttggcaaagaggtattcggcgtactggaaccgttcaacattcgcatgatttgttacggcgcatccagccataacctgtgcttcctggtgcccggcgaagatgccgagcaggtggtgcaaaaactgcatagtaatttgtttgagtaa

SEQ ID NO: 460469 - DNA, 1650 bp, Shigella boydii
atgaaaaacatcaatccaacgcagaccgctgcctggcaggcactacagaaacacttcgatgaaatgaaagacgttacgatcgccgatctttttgctaaagacggcgatcgtttttctaagttctccgcaacattcgacgatcagatgctggtggattactccaaaaaccgcatcactgaagagacgctggcgaaattacaggatctggcgaaagagtgcgatctggcgggcgcgattaagtcgatgttctctggcgagaagatcaaccgcactgaaaaccgcgccgtgctgcacgtagcgctgcgtaaccgtagcaataccccgattctggttgatggcaaagacgtaatgccggaagtcaacgcggtgctggagaagatgaaaaccttctcggaagcgattatctccggtgagtggaagggttataccggcaaagcaatcactgacgtagtgaacatcgggatcggtggttctgacctcggcccgtacatggtgaccgaagcactgcgtccgtacaaaaatcacctgaacatgcactttgtttctaacgtcgatgggactcacatcgctgaagtgctgaaaaaagtaaacccggaaaccacgctgttcttggtagcatctaaaaccttcaccactcaggaaactatgaccaacgcccatagcgcgcgtgactggttcctgaaagcggcaggtgatgaaaaacacgttgcaaaacactttgcggcgctttccaccaatgccaaagccgttggcgagtttggtattgatactgccaacatgttcgagttctgggactgggtcggcggccgttactctttgtggtcagcgattggcctgtcgattgttctctccatcggctttgataacttcgttgaactgctttctggcgcacacgcgatggacaagcatttctccaccacgcctgccgagaaaaacctgcctgtcctgctggcgctgattggcatctggtacaacaatttctttggtgcggaaactgaagcgattctgccgtatgaccagtatatgcaccgtttcgcggcgtacttccagcagggcaatatggagtccaacggtaagtatgttgaccgtaacggtaacgttgtggattaccagactggcccgattatctggggtgaaccaggcactaacggtcagcacgcgttctaccagctgatccaccagggaaccaaaatggtaccgtgcgatttcatcgccccggctatcacccataacccgctctctgatcaccaccagaaactgctgtctaacttcttcgcccagaccgaagcgctggcgtttggtaaatcccgcgaagtggttgagcaggaatatcgcgatcagggtaaagatccggcaacgcttgactacgtggtgccgttcaaagtgttcgaaggtaaccgcccgaccaactccatcctgctgcgcgaaatcactccgttcagcctgggggcgttgattgcgctgtatgagcacaaaatctttactcagggcgtgatcctgaacatctttaccttcgaccagtggggcgtggagttgggtaaacaactggcgaaccgtattctgccagagctgaaagatgacaaagaaatcagcagccacgatagctcgaccaatggtctgattaaccgctataaagcgtggcgcggttaa

SEQ ID NO: 460470 - DNA, 243 bp, Shigella boydii
atgaaaaaagttctgtatggcatttttgccatatctgcgcttgcggcgacttctgcgtgggctgcacctgtacaggtgggcgaagcggcagggtcggcagcaacgtcggtttcggcgggtagttcctccgcgaccagcgtcagcaccgtaagctcggcggtgggtgtcgcgctcgcggcaaccggtggcggtgatggttctaataccgggaccaccacaaccacgaccaccagtacccagtaa

SEQ ID NO: 460471 - DNA, 699 bp, Shigella boydii
atgaagggatttaccataaccacactccggtgtggttattctgcccctctggagaagagtcgtgaagcgacctgcactcattcttatctgcctgctattacaggcctgttcagccagactaaagagctgggcaattcactgtgggacagtctgttcggcacgccaggcgtacagctgacggacgatgatattcaaaatatgccctacgccagccagtacatgcagcttaatggcgggccgcaattgtttgtggtgctggccttcgctgaagacggacaacaaaaatgggtcactcaggatcaagccactcttgtcacacaacatggtcgtctggtgaagactttgcttggcggcgacaacctgattgaagtgaataaccttgccgccgacccgctgattaaacccgcacaaattgttgatggtgcaacatggacgcgcacgatgggctggaccgagtaccagcaggtacgctacgccaccgcacgctcagtcttcaaatgggatggcaccgataccgtcaaagtcggcagcgatgaaaccctggttcgcgtgctggacgaagaagtctccaccgaccaggcgcgctggcataaccgctactggatcgacagcgaagggcaaattcgccagtcggaacagtatctcggcgcggattatttcccggtgaaaaccactctcatcaaggcggcaaaacaatga

SEQ ID NO: 460472 - DNA, 738 bp, Shigella boydii
atgattaaacaaacttttgtcgcgttgcttttgagtgtgggagcgtcatcggtcttcgcggcaggaaccgtcaaggtgttcagcaatggcagcagtgaggccaaaacactaacaggcgcagagcatttaatcgatctggtaggccaaccgcggctggcaaacagctggtggcccggtgcggtgattagcgaagagctggcaacggcggcagcattgcgtcagcagcaggcgttgctgacacggctggctgaacaggccgcagactccagcgccgacgatgccgccgccattaacgccttacgccagcaaattcaggcgttgaaagtgacgggcaggcaaaaaatcaatcttgatcccgatatcgtgcgcgttgccgaacgcggtaacccaccgttgcagggcaactacacgctgtgggtcggaccaccgccgtccacggtcacgttgttcgggcttatcagccgtcctggcaagcagccattcactccaggtcgcgacgtggcgagctatctctccgggcagaacctgcttagcggtgcggatcgcagctacgcgtgggtggtttacccggacggacgcacgcaaaaagcgccggtggcttactggaacaagcgtcacgtagagccgatgcccggcagcattatttatgttggcctcgcggactccgtctggagtgagacgcctgatgcccttaacgccgacattcttcagactctgacgcagcggataccccaataa

SEQ ID NO: 460473 - DNA, 2097 bp, Shigella boydii
atgaaaaaaagacatctgcttagcttactggcgctgggcattagcatggcttgctacggcgaaacatatcctgcgcccattggcccgtcgcagtcggatttcggtggcgtaggattattacaaacgcccaccgcacgcatggcgcgggaaggggagttgagcctgaactatcgcgataacgatcagtaccgttattactcagcttcagtgcaactcttcccgtggctggaaacaacgctgcgctacaccgacgtgcgcacccggcagtacagcagcgtcgaagcgttctctggcgatcaaacgtataaagataaagccttcgatctcaaactgcgtttgtgggaagagagttactggctgccgcaagtggcggttggtgcgagggatatcggcggtacggggctgtttgatgcggaatatcttgttgccagcaaagcctgggggccgttcgattttacgctcggcctgggctggggttatctgggcaccagcggtaatgtgaaaaatccgctctgttcagccagtgataaatattgctatcgcgataacagctacaaacaggcgggatctatcgacggtagccagatgttccacggtcctgcctcactgtttggcggcgtggaataccagacgccctggcaaccgctgcgcctgaaactggagtatgaaggcaataattatcagcaggattttgccgggaagctggagcaaaaaagtaagtttaacgtcggtgcgatttatcgcgttaccgattgggccgacgttaaccttagctatgaacgtggcaacacctttatgtttggcgtcacgctgcgcaccaactttaacgatctgcgcccgtcttacaacgataacgcccgcccgcaatatcaaccgcagccgcaggatgccattttgcagcattcggtggtggcgaatcagttaacgctgttgaaatacaatgccggacttgccgatccgcagatccaggcgaaaggcgatacgctgtatgtcaccggcgagcaggtgaaatatcgtgattcgcgcgaagggatcatccgtgctaatcggatcgtgatgaacgatctgccggatgggatcaaaacgatccgcattacggaaaatcgtcttaacatgccgcaggtgacgacggaaaccgatgtcgccagcctgaaaaatcatctcgccggagagccgttgggccacgaaacgaagctggcgcaaaaacgcgtcgagccagtggttccgcagtccaccgagcagggctggtatatcgacaaatcacgctttgatttccatatcgatccggtgctgaaccagtcggtcggtggcccggaaaacttttacatgtatcagctgggcgtgataggaatggcagatttgtggctgacggaccatctgctgaccaccggcagcctgtttgcaaatcttgccaacaactacgacaagtttaactacaccaatccgccgcaggactcgcacttaccgcgcgttcgtacccatgtgcgcgagtatgtgcagaacgatgtctatgtgaataacctgcaagccaactacttccagcatctgggcaacggcttctacggtcaggtctatggaggttatctcgaaaccatgtttggcggtgcgggggccgaagtgttgtatcgtccgctggacagtaactgggcgtttggtctggatgccaactacgttaaacagcgcgactggcgtagtgcaaaagatatgatgaaattcaccgactacagcgtgaaaaccggacatctgaccgcctactggacgccatctttcgcccaggacgtgttggtgaaagccagcgtcgggcagtatctggcaggggataaaggcggcacgctggagatcgccaaacgctttgacagcggcgtggtggtgggtggctatgccacgatcaccaacgttttgaaagaggagtacggcgaaggggacttcaccaaaggcgtgtatgtctcggtaccgttggatctcttctcgtctggcccgacacgcagccgtgcggcgattggctggacgccgctgacgcgtgacggtggtcagcaacttgggcgtaagttccagttgtatgacatgaccagcgaccgtagcgtcaatttccgctaa

SEQ ID NO: 460474 - DNA, 399 bp, Shigella boydii
atgacgtcactctctcgtccgcgcgtggagtttatctccaccattttgcagaccgtactcaatcttggcctgctgtgcctcggcctgattttggttgtcttcctcggcaaagaaacggtgcatctggcagatgtgctgttcgcgccagaacaaaccagcaaatatgagctggtggtttactttctctatttcgaatttatcgcgctgattgtgaagtactttcagtccggttttcacttcccgctacgttactttgtctatattgggatcaccgccattgtgcgcttgatcatcgtcgatcataaatcgccactggatgtgttgatctactcggctgcgatcctgttactggtgatcactctgtggctgtgtaattcgaaacggctgaagcgggagtaa

SEQ ID NO: 460475 - DNA, 795 bp, Shigella boydii
atgtcacgcggcaagcaagaacaggcggaaagtatcctgcgcaaaattatgggcaacacgcttgcaactcaggcagtacaggaaattaaacactccctggatcatggccgcaaaaccggtggtcgtctgctgatgtttggcgtgggcgtgattgtcatcggcgttatgctctccatcttccagcaatttgtcggcatcaatgtggtgctgtactacgcgccggaagtgttcaaaacgctgggggccagcacggatatcgcgctgttgcagaccattattgtcggagttatcaacctcaccttcaccgttctggcaattatgacggtggataaatttggtcgtaagccactgcaaattatcggcgcactcggaatggcaatcggtatgtttagcctcggtaccgcgttttacactcaggcaccgggtattgtggcgctactgtcgatgctgttctatgttgctgcctttgccatgtcctggggtccggtatgctgggtactgctgtcggaaatcttcccgaatgctattcgtggtaaggcgctggcaatcgcggtggcggcccagtggctggcgaactacttcgtctcctggaccttcccgatgatggacaaaaactcctggctggtggcccatttccacaacggtttctcctactggatttacgggtgtatgggcgttctggcagcactatttatgtggaaatttgtcccggaaaccaaaggtaaaacccttgaggagctggaagccctctgggaaccggaaacgaagaaaacacaacaaactgctacgctgtaa

SEQ ID NO: 460476 - DNA, 726 bp, Shigella boydii
atgatccgcgatctgatcataaagacgccgtacaatcctggcgaacggctgccgccggagcgtgaaattgcagaaatgcttgatgtcacgcggacggtggtacgtgaagcgctgatcatgctggagatcaaagggctggtggaagtgcgccggggtgccggtatctatgttcttgatagctcaggcagccacaacacagacagtccggatgccaacgtctgcaatgatgccggcccctttgaattgttgcaggcgcgacagcttcttgagagcaacatcgcggaatttgccgccctgcaggctacccgcgaagatatcgtcaaaatgcgtcaggcattgcaactggaagagcgtgaactggcttccagcgcgccgggtagcagcgaaagcggtgacatgcagttccatctcgccattgctgaagcaacgcataacagcatgctggtggagttattccgtcagtcctggcagtggcgggaaaacaatccaatgtggatccagttgcacagccatctggatgacagcctgtatcgcaaagagtggttgggcgatcacaaacagatccttgccgcgttaatcaaaaaagatgcccgagcggcgaagctggcaatgtggcagcatctggaaaacgttaagcaacgtctgctggaattctcgaacgttgacgatatttattttgacggctatctgtttgattcatggccgctggataaagtcgacgcctga

SEQ ID NO: 460477 - DNA, 195 bp, Shigella boydii
atggtgttgtgtccgttaggtgcggttaatcaaatttttgccggatgcggcgtgaacgccttatccggcctacaacgggcaattttacggcccccgttaatctcaaactataccattagcactggaagttggcacgtacaggtgggcaaaaaaacgaaaactggtcaaccaaatatcagtttgattgaccagtaa

SEQ ID NO: 460478 - DNA, 1461 bp, Shigella boydii
atgactactattgttgacagcaatctgccggttgcccgcccgtcatgggatcattctcgtctggaatcacgcattgtgcatctcggttgcggggcgtttcaccgcgcacatcaggcgctgtatacccatcatctgctggaaagcaccgacagcgactggggcatctgcgaagttaacctgatgccaggcaacgaccgcgtgctgatcgaaaacctgaaaaaacagcaactgctgtacaccgtagcggaaaaaggcgcagaaagcaccgagctgaaaattatcggttcgatgaaagaagcgctgcatccggaaatcgacggctgcgaaggtattctcaacgcgatggcgcgtccgcaaacggcgattgtctctctaacggtcacggaaaaaggctactgcgctgatgcggcaagcggtcaactggatctcaataacccgctgatcaagcacgatctagaaaacccgactgcgccgaagtccgcgattggttacatcgtcgaagccttgcgtctgcgtcgtgaaaaagggctgaaagcatttacggtgatgtcctgcgataacgtgcgtgaaaacggtcatgtggcgaaggtcgcggtactggggctggctcaggcacgtgacccgcagctggcggcatggattgaagagaacgtcaccttcccgtgcaccatggttgaccgcatcgttccggcggcgacgccagaaaccttacaggaaattgctgatcagctgggtgtttacgacccgtgcgccattgcctgcgaaccgttccgtcagtgggtgattgaagataacttcgttaatggtcgcccggactgggataaagtgggcgcacagttcgttgcagacgttgtgccgttcgaaatgatgaagctgcgtatgctgaacggcagccactctttcctggcatacctcggttacctcggcggctatgaaactattgccgacaccatgactaacccggattatcgcaaagcggcctttgccctgatgatgcaggaacaagcgccaacgctgtctatgccggagggtacggacctgaaggcctatgcgacgctgctgatcgagcgtttcagcaacccgtctctgcgtcaccgtacctggcagattgcgatggacggcagccagaagttaccgcagcgtctgctggacccggtgcgtctgcacctgcaaaacggcggcagctggcgtcacctggcgctgggcgtggctggctggatgcgttacacccagggcgtggatgagcagggtaatgccattgacgtggtcgacccgatgctggccgagttccagaagattaacgcgcagtatcagggcgcagaccgcgtgaaagcgctgctgggcctgagcggtatttttgccgatgatctgccgcagaatgccgactttgttggcgcggtgacggcggcatatcagcagctgtgcgaacgcggtgcgcgcgagtgtgtggctgcgctgtaa

SEQ ID NO: 460479 - DNA, 1185 bp, Shigella boydii
atggaacagacctggcgctggtacggcccaaacgatctggtttctttagctgatgtccgtcaggcgggcgcaactggcgtggttaccgcgctgcaccatatcccgaacggcgaagtatggtccgtagaagagatcctcaaacgcaaggcgatcgttgaagacgcaggcctggtgtggtctgtcgtagaaagcgtaccaattcacgaagatatcaaaacccacactggcaactatgagcagtggatcgctaactatcagcagactctgcgcaacctggcgcagtgcggcattcgcaccgtgtgctacaacttcatgccggtgctcgactggacccgtactgacctcgaatacgtgctgccagacggctccaaagctctgcgcttcgaccagatcgaattcgctgcattcgaaatgcatatcctgaaacgtccaggcgcggaagcggattacaccgaagaagaaattgctcaggcagctgaacgcttcgccactatgagcgatgaagacaaagcgcgtctgacgcgtaacatcattgccggtctgccgggcgcggaagaagggtataccctcgaccagttccgtaagcacctggagctgtacaaagatatcgataaagcgaagctgcgcgaaaactttgccgtcttcctgaaagcgattattccagttgctgaagaagttggcgtgcgtatggcggttcacccggacgatccgccgcgcccgatcctcggcctgccgcgcattgtttccaccattgaagatatgcagtggatggttgataccgtaaacagcatggcgaacggtttcaccatgtgcaccggttcctacggcgtgcgtgctgacaacgatctggttgatatgatcaagcagttcggtccgcgtatttacttcacccatctgcgctccaccatgcgtgaagataacccgaaaaccttccacgaagcggcgcacctgaacagtgacgttgatatgtacgaagtggtgaaagcgattgttgaagaagaacaccgtcgtaaagcggaaggcaaagaagacctgatcccgatgcgtccggaccacggtcatcagatgctggacgacctgaagaagaaaaccaacccaggttactccgcaattggtcgtctgaaaggcctggccgaagttcgcggtgtcgaactggcgatccagcgcgctttctttagccgttaa

SEQ ID NO: 460480 - DNA, 903 bp, Shigella boydii
atgaaacgagttattaccctgtttgctgtactgctgatgggctggtcggtaaatgcctggtcattcgcctgtaaaaccgccaatggtactgctatccctattggcggtggcagcgctaatgtttatgtaaaccttgcgcctgtcgtgaatgtggggcaaaacctggtcgtagatctttcgacgcaaatcttttgccataacgattatccggaaaccattacagactatgtcacactgcaacgaggctcggcttatggcggcgtgttatctaatttttccgggaccgtaaaatatagtggcagtagctatccatttccgaccaccagcgaaacgccgcgggttgtttataattcgagaacggataagccgtggccggtggcgctttatttgacgcctgtgagcagtgcgggcggggtggcgattaaagctggctcattaattgccgtgcttattttgcgacagaccaacaactataacagcgatgatttccagtttgtgtggaatatttacgccaataatgatgtggtggtgcctactggcggctgcgatgtttctgctcgtgatgtcaccgttactctgccggactaccctggttcagtgccaattcctcttaccgtttattgtgcgaaaagccaaaacctggggtattacctctccggcacaaccgcagatgcgggcaactcgattttcaccaatatcgcgtcgttttcaccagcacagggcgtcggcgtacagttgacgcgcaacggtacgattattccagcgaataacacggtatcgttaggagcagtaggaacttcggcggtaagtctgggattaacggcaaattacgcacgtaccggagggcaggtgactgcagggaatgtgcaatcgattattggcgtgacttttgtttatcaataa

SEQ ID NO: 460481 - DNA, 504 bp, Shigella boydii
atgaaatggcgcaaacgtgggtatttattggcggcaatattggcgctcgcaagtgcgacaatacaggcagccgatgtcaccatcacggtgaacggtaaggtcgtcgccaaaccgtgcacagtttccaccaccaatgccacggttgatctcggcgatctttattctttcagtctgatgtctgccggggcggcatcggcctggcatgatgttgcgcttgagttgactaattgtccggtgggaacgtcgagggtcactgccagcttcagcggggcagccgacagtaccggatattataaaaaccaggggaccgcgcaaaacatccagttagagctacaggatgacagtggcaacacattgaatactggcgcaaccaaaacagttcaggtggatgattcctcacaatcagcgcacttcccgttacaggtcagagcattgacggtaaatggcggagccactcagggaaccattcaggcagtgattagcatcacctatacctacagctga

SEQ ID NO: 460482 - DNA, 531 bp, Shigella boydii
atgagaaacaaacctttttatcttctgtgcgcttttttgtggctggcggtaagtcgcgttttggctgcggatagcacgattactatccgcggctatgtcagagataacggctgtagtgtggccgctgaatcaaccaattttactgttgatctgatggaaaacgcggcgaagcaatttaacaacattggtgcaacgactcctgtcgttccatttcgtattttgctgtcaccctgtggtaacgccgtttctgccgtaaaggttgggtttaccggcgttgcagatagccacaatgccaacctgcttgcacttgaaaatacggtgtctgcggcttcgggactgggaatacagcttctgaatgagcagcaaaatcagataccccttaatgctctatcgtccgcgatttcgtggacgaccctgacgccgggtaaaccaaatacgttgaatttttacgcccggctaatggcgacacaggtgcctgtcactgcggggcatatcaatgccacggctaccttcactcttgaatatcagtaa

SEQ ID NO: 460483 - DNA, 861 bp, Shigella boydii
atgttagcgcttaacgtcaatattcctttcagccactggctgcgttctgacagtaaatctcagtggcgacatgccagtgccagctacagcatgtcacacgatctcaacggtcggatgaccaatctggctggtgtatacggtacgttgctggaagacaacaacctcagctatagcgtgcaaaccggctatgccgggggaggcgatggtaatagcggaagtacaggctacgccacgctgaattatcgcggtggttacggcaatgccaatatcggttacagccatagcgatgatattaagcagctctattacggagtcagcggtggggtactggctcatgccaatggcgtaacgctggggcagccgttaaacgatacggtggtacttgttaaagcgtctggcgcaaaagatgcaaaagtcgaaaaccagacgggggtgcgtaccgactggcgcggttatgccgtgctgccttatgccaccgaatatcgggaaaacagagtggcgctggataccaataccctggctgataacgtcgatttagataacgcggtcgctaacgttgttcccactcgtggggcgatcgtgcgagcagagtttaaagcgcgcgttgggataaaactgctcatgacgctaacccacaataataagccgctgccgtttggggcgatggtgacatcagagagtagccagagtagcggcattgttgcggataatggtcaggtttacctcagcggaatgcctttagcgggaaaagttcaggtgaaatggggagaagaggaaaatgctcactgtatcgccaattatcaactgccaccagagagtcagcagcagttattaacccagctatcagctgaatgtcgttaa

SEQ ID NO: 460484 - DNA, 1566 bp, Shigella boydii
ttgtcatctgccgaactctattttaatccgcgctttttagcggatgatccccaggctgtggccgatttatcgcgttttgaaaatgggcaagaattaccgccagggacgtatcgcgtcgatatctatttgaataatggttatatggcaacgcgtgatgtcacatttaatacgggcgacagtgaacaagggattgttccctgcctgacacgcgcgcaacttgccagtatggggctgaatgcggcttctgtctccggtatgaatctgctggcagatgatgcctgcgtgccattaacctcaatgatccatgacgctactgcgcatctggatgttggtcagcagcgactgaacctgacgatccctcaggcatttatgagtaatcgcgcgcgtggttatattcctcctgagttatgggatcccggtattaatgccggattgctcaattataatttcagcggaaatagtgtacagaatcggatttggggtaacagccattatgcatatttaaacctacagagtgggttaaatattggtgcgtggtgtttacgcgacaataccagctggagttataacagtagcgacagatcatcaggtagcaaaaataaatggcagcatatcaatacctggcttgagcgagacataataccgttacgttcccggctgacgctgggtgatggttatacccagggcgatattttcgatggtattaactttcgcggcgcacaattggcctcagatgacaatatgttacccgatagccaaagaggatttgccccggtgatccacggtattgctcgtggtactgcacaggtcactattaaacaaaatgggtatgacatttataatagtacggtgccaccggggccttttaccatcaacgatatctatgccgcaggtaatagtggtgacttgcaggtaacgatcaaagaggctgacggcagcacgcagatttttaccgtaccctattcgtcagtcccgcttttgcaacgtgaagggcatactcgttattccattacggcaggagaataccgtagtggaaatacgcagcaggaaaaaccccgctttttccaaagtacattactccacggccttccggctggctggacaatatatggtggaacgcaactggcggatcgttatcgtgcttttaatttcggtatcgggaaaaacatgggggcactgggcgctctgtctgtggatatgacgcaggctaattccacacttcccgatgacagtcagcatgacggacaatcggtgcgttttctctataacaaatcgctcaatgagtcaggcacgaatattcagttagtgggttaccgttattcgaccagcggatattttaatttcgctgatacaacatacagtcgaatgaatggctacaacatcgaaacacaggatggagttattcaggttaagccgaaattcaccgactattacaacctcgcttataacaaacgcgggaaattacagctcaccgttactcagcaactcgggcgcacatcaacactgtatttgagtggtagccatcaaacttattggggaacgagtaatgtcgatgagcaattctag

SEQ ID NO: 460485 - DNA, 510 bp, Shigella boydii
atggaaaatgccgatggtgtaaaggatggtcgttttatcgtgacgcctcctctgtttgcgatgaagggaaaaaaagagaataccttgcgtattcttgatgcaacaaataaccaattgccacaggaccgggaaagtttattctggatgaatgttaaagcgattccgtcaatggataaatcaaaattgactgagaatacgctacagctcgcaattatcagccgcattaaactgtactatcgcccggctaaattagcgttgccacccgatcaggccgcagaaaaattaagatttcgtcgtagcgcgaattctctgacgctgattaacccgacaccctattatctgacggtaacagagttgaatgccggaacccgggttcttgaaaatgcattggtgcctccaatgggcgaaagcacggttaaattgccttctgatgcaggaagcaatattacttaccgaacaataaatgattatggcgcacttacccccaaaatgacgggcgtaatggaataa

SEQ ID NO: 460486 - DNA, 342 bp, Shigella boydii
gtgtgccacttcagcttgcgtttgcagtaccgcgttgcctatggtgacggtggttttagcgaactgcaaagcgctattcgcattcatggtaacgcggtggaatatattcccatcgcgattgtgctgatgctgtttatggaaatgaatggcgcagaaacctggatggtgcatatttgcggcatcgttttgcttgctggtcgtctgatgcattattacggttttcatcaccgtctgtttcgctggcgacgttccggcatgagcgccacctggtgtgcgctgttgctgatggtgctggcgaatctttggtatatgccctgggagttggttttctccctgcgttag

SEQ ID NO: 460487 - DNA, 744 bp, Shigella boydii
atgtctcaccgcgacacgctattttctgcccctatcgccagactgggcgactggacctttgatgaacgggtagctgaagtcttcccggatatgatccagcgttccgttcccggctattccaatattatttccatgattagtatgctagccgagcgcttcgttcaacctggtacgcaggtttacgatctgggttgttctctgggcgcggcgacgctctcggtgcgtcgcaacattcatcatgataattgcaaaattattgccatcgacaactccccggcgatgattgaacgctgccgtcgtcatattgacgcctataaagcccctacgccagtagacgtcattgaaggtgatattcgcgatatcgccattgaaaacgcatcgatggtggtgctgaattttaccctgcaattcctggaaccttccgagcgccaggcattactggataaaatttatcaaggactgaacccgggcggcgcgctggtgctttcggaaaaattcagtttcgaagatgccaaagttggtgaactgttgttcaacatgcaccacgactttaaacgtgccaacggttacagcgaactggagatcagccagaagcgcagcatgctggaaaacgtgatgctgaccgattccgtggaaacccataaagcacgcctgcataaagccggttttgagcatagcgagctgtggttccagtgctttaactttggttcactggtggcattaaaagcagaggacgctgtatga

SEQ ID NO: 460488 - DNA, 972 bp, Shigella boydii
atgatcgactttggtaacttttattctctgattgccaaaaatcatctttcacactggctcgaaacgctgcccgcgcagattgctaactggcagcgcgagcagcagcacgggctgtttaagcagtggtccaacgcggtggaatttctgcctgaaattaaaccgtatcgtctggatttattgcatagcgtaaccgccgaaagcgaagagccactgagcaccgggcaaattaaacgcattgaaacgcttatgcggaacctgatgccatggcgcaaagggccgttctcactgtatggcgtcaacatcgataccgaatggcgttccgactggaaatgggatcgtgttctgccccatctttctgatttaaccggacgcaccattctggatgtcggctgcggcagcggttatcacatgtggcgcatgattggcgcaggcgcgcacctcgcggtggggatcgaccctacgcaactgtttctgtgccagtttgaagcggtgcgtaaactactgggtaacgatcagcgcgcacatttgttaccgttaggtattgaacagcttccggcactgaaagcctttgataccgtcttttcgatgggcgtgctttaccatcgccgttcgccgctggagcatctctggcagttgaaagatcaactggtgaatgagggtgaactggtgctggaaacgctggttattgatggcgatgagaacacggtgctggtaccaggcgatcgttacgcgcaaatgcgtaatgtctatttcatcccttccgcgctggcgctgaaaaactggctgaagaagtgtggttttgtagatatccgcgttgtggatgtgtgcgttaccactactgaagagcagcgacgcactgaatggatggttaccgaatctctgtccgatttcctcgacccacatgatccgagtaagacagttgaaggttatcctgcgcctaaacgcgcggtgctgattgcgcgcaagccgtaa

SEQ ID NO: 460489 - DNA, 2430 bp, Shigella boydii
atgacattaacaagacgtgaatttattaaacacagcggtattgccgctggagcgctggtggtgacatcggcagcaccgctccccgcatgggcagaagagaagggcggtaaaatcctcaccgcgggacgttggggagcgatgaacgtagaagtgaaggacggcaagattgtttcttcaacaggcgcgctggcgaaaaccataccgaattccttacagtctacggcggcggatcaggtacacaccacgacgcgtattcagcatccgatggtgagaaaaagctatctcgataatccactgcaaccgacgaaaggtcgtggcgaagatacctatgtacaggtgagctgggaacaagcattaaaactgattcatgagcaacacgatcgcattcgcaaagctaacggaccatcggctatttttgccggatcatacggctggcgctcttctggcgtgttgcataaagcgcaaaccttactgcaacgttatatgaacctggcgggcggttattccgggcatagcggcgattattcaaccggggcggcacaggtgatcatgccgcatgtggtcggttctgtagaggtgtatgaacagcagacctcctggccgctgattctggaaaacagccaggttgtggtgctgtgggggatgaacccgctgaataccttaaaaattgcctggagcagtaccgatgagcaagggctggaatacttccatcagctaaaaaaatctggcaaaccagtgattgccattgatcctatccgctccgaaaccatcgacttctttggcgataatgccacctggatcgcgccgaatatgggcaccgacgtggcactgatgttagggattgcgcataccctgatgacacaaggcaaacacgataaagtgttccttgaaaaatacactaccgggtatccgcagtttgaagagtatctgagaggtaagagcgataatacgccgaagagcgcggcctgggcggcggaaattactggcgtaccggaagcgcagatagtcaaactcgctgaactgatggcggcgaatcgcacaatgctgatggcaggctggggaattcagcgccagcaatatggtgaacagaaacactggatgctggtgacgctggcggcggtgttagggcagattggtacaccgggcggcggttttggtttctcttatcattactccaatggtggcaacccgacacgtgttggcggcgtgctgccggaaatgtctgcggcgattgccggacaggccagcgaggccgctgatgatggcggaatgagggcgattcctgttgcccgtatcgtcgatgcgctggaaaatcctggcggcaaatatcagcataacggtaaagagcaaacgtatccgaatatcaaaatgatctggtgggcgggtggcggtaactttacccatcaccaggatactaatcgtctgattaaagcatggcagaaaccggagatgatcgtcgtttctgaatgctactggaccgcagctgctaaacatgcagatatcgtattaccgatcaccacatcgtttgagcgcaatgacttgacgatgaccggtgattacagcaaccagcatattgtgccgatgaagcaggctgtcgctccgcaatttgaagcgcgaaacgattttgatgtgtttgccgatcttgcggaattagtgaaacctggcggaaaagagatctataccgaaggtaaagatgaaatggcgtggctgaaatttttctatgatgccgctcagaaaggtgcccgtgcgcaacgcgtgactatgccgatgtttaatgccttctggcagcaaaataaactgatcgaaatgcgccgcagcgagaagaacgaacagtacgttcgttatgctgatttccgcgccgatccggtgaaaaatgcgctgggtacgccaagcggcaaaattgagatttactccaaaacgctggaaaaatttggctataaggattgcccggcacacccaacctggcttgcgcctgatgagtggaagggtaccgccgacgagaagcagttgcagcttctgaccgcacatccggcacaccgtttacatagtcagcttaactatgcggaactgcgtaaaaaatatgcggttgcagatcgtgaaccaatcactattcataccgaagatgctgctcgctttggtattgcgaatggtgatctggtgcgtgtgtggaacaaacgtggtcagattctgacaggcgcggtggtgactgacgggatcaaaaaaggcgtggtatgcgtgcatgaaggtgcatggccagatctggaaaatggcttgtgtaaaaacggcagtgcgaacgtgttaacggcggatatccccagctcgcagctggcaaatgcctgtgccggtaactctgcgctggtgtatatcgaaaaatatacgggtaacgcaccgaagttaacggcatttgataagcctgctgttcaggcgtaa

SEQ ID NO: 460490 - DNA, 1101 bp, Shigella boydii
atgcgagggaaaaaacgcattgggttattgtttttgctgatagcggttgtggttggtggcggcgggttattgctggcgcaaaaagccttacataaaacgtcggatacagcattttgcctttcctgccactcgatgagtaaaccttttgaggaatatcagggaactgtccacttttcgaaccagaaagggatacgtgcggaatgtgcagattgccatattccaaagtcagggatggattatttatttgctaaattaaaagcatctaaagatatttatcatgaatttgttagcggcaaaatagacagtgacgataagttcgaaactcatcgccaggaaatggccgaaacagtatggaaagaattaaaagcaactgactctgcaacgtgccgtagttgccattcttttgatgccatggatattgcctcgcaaagtgaatctgcgcagaaaatgcataacaaagcacaaaagggcggcgaaacctgtatcgattgtcataaaggcattgcccattttccgccagaaataaaaatggatgacaacgcggcgcatgagctggaaagtcaggccgctacttcagtgactaatggcgcacatatttatcttttcaaaacttctcgcataggcgagctggctaccgtgaatcctggtaccgatctcaccgtcgttgatgccagtggcaaacagccgatcgttctgttgcagggttatcaaatgcagggcagtgaaaacacgctctacctggcggcaggtcaacggctggcgctagccacattaagtgaagaaggtatcaaggcgctcacgctaaacggggaatggcaggctgacgaatacggcaatcaatggcgtcaggcgtctttacagggtgcgcttaccgatcccggattagcggaccgtaaaccgctatggcaatacgctgaaaaacttgacgatacctattgcgctggttgtcatgcccctattgccgccgaccattacaccgtcaatgcgtggccgtccattgccaaaggaatgggggcacgaaccagcatgagcgaaaacgaactggacattttaacgcggtatttccagtacaacgccaaagatattaccgagaaacagtga

SEQ ID NO: 460491 - DNA, 747 bp, Shigella boydii
atggcattactggaaatttgctgttacagcatggaatgtgcactaacggcgcagcaaaacggcgcagacagagttgaattatgcgcagccccaaaagaggggggcttaacgccgtcgttgggtgtactgaaatccgtgcgccagtgggtgacgatccctgtgcatccgattatccgcccacgcggtggtgatttttgctacagcgacggtgagtttgccgccattcttgaggatgtgctcacagtccgcgaattaggttttcctggactggtgacgggcgtgctcgatgttgacgggaatgtcgatatgccacgaatggaaaaaataatggctgctgccggtccgctggcagtgacttttcatcgcgccttcgatatgtgcgctaaccctttaaatacactcagtaatcttgcggaattgggcatcgcccgggtgctgacatcagggcaaaaatcagatgcactgcaaggtttatcaaaaattatggaacttattgcccatcgtgatgctccaatcattatggccggagcaggagtccgtgcagaaaacctgcaccacttcctcgatgccggagtgctggaagtccatagctccgcgggagcgtggcaagcttcaccgatgcgttatcgtaatcaaggattgtccatgtcatcagatgcacacgcggacgagtattcgcgttatgtcgtagacggggcggcggttgctgaaatgaaaggaatcattgaacgccatcaggccaaatga

SEQ ID NO: 460492 - DNA, 567 bp, Shigella boydii
atggcgaactggcaatctatcgacgagctgcaggatattgcatcggatttaccgcgatttacccacgcattagatgaactctcccgccgtctggggttggatatcactccgctgactgccgatcacatttctttgcgttgccatcaaaacgtcaccgctgagcgctggcgtcgcggttttgaacagtgtggcgagcttttgtcagaaaatatgatcaatggcagaccgatttgtctgtttaaattgcatgaaccggtacaggttgcgcactggcagttttccattgtggagctaccgtggcccggggaaaaacgttacccacacgaaggttgggaacatattgaaatcgttctgccgggtgatccagaaacgctgaatgcccgtgcgctggcattgctttctgatgaaggactcagcctaccggggatctcagtgaaaaccagttcgccaaaaggtgagtatgagcgattaccgaatccgacgctggcggtcaccgatggcaaaacaactattaagtttcatccgtggtccattgaagagatcgttgccagcgagcagtcggcgtaa

SEQ ID NO: 460493 - DNA, 1734 bp, Shigella boydii
gtgaatattcaggctcttctctcagaaaaagtccgtcaggccatgattgcggcaggcgcgcctgcggattgcgaaccgcaggttcgtcagtcagcaaaagttcagttcggcgactatcaggctaacggcatgatggcagttgctaaaaaactgggtatggcaccgcgacaattagcagagcaggtgctgactcatctggatcttaacggtatcgccagcaaagttgagatcgccggtccaggctttatcaacattttccttgatccggcattcctggctgaacatgttcagcaggcgctggcgtccgatcgtctcggtgtttctacgccagaaaaacagaccattgtggttgactactctgcgccaaacgtggcgaaagagatgcatgtcggtcacctgcgctctaccattattggtgacgcagcagtgcgtactctggagttcctcggtcacaaagtgattcgcgcaaaccacgtcggcgactggggcactcagttcggtatgctgattgcatggctggaaaagcagcagcaggaaaacgcaggtgaaatggagctggctgaccttgaaggtttctaccgcgatgcgaaaaagcattacgacgaagatgaagagtttgccgagcgtgcacgtaactacgtggtaaaactgcaaagcggtgacgaatatttccgcgagatgtggcgcaaactggtcgacatcaccatgacgcagaaccagatcacctacgatcgtctcaacgtgacgctgacccgtgatgacgtgatgggcgaaagcctctacaacccaatgctgccaggaattgtggcggatctcaaagccaaaggtctggcagtagaaagcgaaggggcgaccgtcgtattccttgatgagtttaaaaacaaggaaggcgaaccgatgggcgtgatcattcagaagaaagatggcggctatctctacaccaccactgatatcgcctgtgcgaaatatcgttatgaaacactgcatgccgatcgcgtgctgtattacatcgactcccgtcagcatcaacacctgatgcaggcatgggcgatcgtccgtaaagcaggctatgtaccggaatccgtaccgctggaacaccacatgttcggcatgatgctgggtaaagacggcaaaccgttcaaaacccgcgcgggtggtacagtgaaactggccgatctgctggatgaagccctggaacgtgcacgccgtctggtggcagaaaagaacccggatatgccagctgacgagctggaaaaactggctaacgcggttggtattggtgcggtgaaatatgcggatctctccaaaaaccgcaccacggactacatcttcgactgggacaacatgctggcgtttgagggtaataccgcgccatacatgcagtatgcttacacgcgtgtattgtccgtgttccgtaaggcagaaattaacgaagagcaactggctgcagctccggtaatcatccgtgaagatcgtgaagcgcaactggcagctcgcctgctgcagtttgaagaaaccctcaccgtggttgcccgtgaaggcacgccgcatgtgatgtgtgcttacctgtacgatctggctggtctgttctctggcttctacgagcactgcccgatcctcagcgcagaaaacgaagaagtgcgtaacagccgtctgaaactggcacaactgacagcgaagacgctaaagctgggtctggatacgctgggtattgagacagtagagcgtatgtaa

SEQ ID NO: 460494 - DNA, 867 bp, Shigella boydii
atggcagcaaagattattgacggtaaaacgattgcgcagcaggtgcgctctgaagttgctcaaaaagttcaggcgcgtattgcagccggactgcgggcaccaggactggccgttgtgctggtgggtagtaaccctgcatcgcaaatttatgtcgcaagcaaacgcaaggcttgtgaagaagtcgggttcgtctcccgctcttatgacctcccggaaaccaccagcgaagcggagctgttggagcttatcgatgcgctgaatgccgacaacaccatcgatggcattctggttcaactgccgttaccggcgggtattgataacgtcaaagtgctggaacgtattcatccggacaaagacgtggacggtttccatccttataacgtcggtcgtctgtgccagcgcgcgccgcgtctgcgtccctgcaccccgcgcggtatcgtcacgctgcttgagcgttacaacattgataccttcggcctcaacgccgtggtgattggcgcatcgaatatcgtcggtcgtccaatgagcatggaactgttgctcgcaggttgcaccactaccgtgactcaccgtttcactaaaaatctgcgtcaccacgtagaaaatgccgatctgttgatcgttgccgtcggcaagccgggctttattcctggtgactggatcaaagaaggcgcaattgtgattgatgtcggcatcaaccgtctggaaaatggcaaagttgtgggcgacgtcgtgtttgaagacgcggctaaacgcgcctcatacattacgcctgttccgggcggcgttggcccgatgacggttgccacgctgattgaaaacacgcttcaggcgtgcgttgaatatcatgatccacagggtgagtaa

SEQ ID NO: 460495 - DNA, 213 bp, Shigella boydii
atggcgacattttctttaggtaaacacccgcacgttgagctgtgcgatttgctgaaactggaaggctggagcgaaagcggcgcgcaggcgaaaatcgcgattgccgaaggccaggtgaaagtcgacggtgcggttgaaacgcgcaaacgctgcaaaatcgtcgccggtcagacagtgagttttgcaggtcacagcgtacaggttgttgcctga

SEQ ID NO: 460496 - DNA, 522 bp, Shigella boydii
atgccaaccgttattacgcacgccgccgttcccctatgcattggtttagggttgggttcgaaagtcatccctccgcgtctgttatttgccggaatcatcctggcgatgctgcccgacgccgacgtattgtcgtttaaatttggcgttgcttacggcaatgtttttggtcatcgcgggtttacccattcgctggtgtttgcgtttgttgtcccgctgttatgtgtgctgattggacgccgatggttcagggctgggctgattcgctgctggctgtttttaaccgtctcgttgctatcgcacagcttgctggattcggtaaccactggcggtaagggcgttggctggctgtggccgtggtcagatgaacgctttttcgctccctggcaggtgattaaagtcgcgccgtttgcattgtctcgttacaccacgccgtacgggcatcaggtgataatttctgaattgatgtgggtgtggttgccggggatggtgcttatgggaatgttgtggtggcgcaggcgataa

SEQ ID NO: 460497 - DNA, 1386 bp, Shigella boydii
atgctaaaaatcttcaatactctgacacgccaaaaagaggaatttaagcctattcacgccggggaagtcggcatgtacgtgtgtggaatcaccgtttacgatctctgtcatatcggtcacgggcgtacctttgttgcttttgacgtggttgcgcgctatctgcgtttcctcggctataagctgaagtatgtgcgcaacattaccgatatcgacgacaaaatcatcaaacgcgccaatgaaaatggcgaaagctttgtggcgctggtggatcgcatgatcgccgaaatgcacaaagattttgatgctttgaacattctgcgcccggatatggagccgcgcgcgacgcaccatatcgcagaaattattgaactcactgaacaactgatcgccaaaggtcacgcttatgtggctgacaacggcgacgtgatgttcgacgtcccgaccgatccgacttatggcgtgctgtcgcgtcaggatctcgaccagctgcaggctggcgcgcgcgttgacgtggttgatgacaaacgcaacccgatggacttcgttctgtggaagatgtcgaaagagggcgaaccgagctggccgtctccgtggggcgcgggtcgtcctggctggcacattgaatgttcggccatgaactgcaagcagctgggtaaccactttgatatccacggcggcggttcagacctgatgttcccgcaccacgagaacgaaatcgcgcagtccacctgtgcccatgatggtcagtatgtgaactactggatgcactccggaatggtgatggttgaccgcgagaagatgtccaaatcgctgggtaacttctttaccgtgcgcgatgtgctgaaatactacgacgcggaaaccgtgcgttacttcctgatgtcgggccactatcgcagccagttgaactacagcgaagagaacctgaagcagacgcgtgcggcgctggagcgtctctacactgcgctgcgcggcacagataaaaccgttgcgcctgccggtggcgaagcgtttgaagcgcgctttattgaagcgatggacgacgatttcaacaccccggaagcctattccgtactgtttgatatggcgcgtgaagtaaaccgtctgaaagcagaagatatggcagcggcgaatgcaatggcatctcacctgcgtaaactttccgctgtattgggcctgctggagcaagaaccggaagcgttcctgcaaagcggcgcgcaggcagacgacagcgaagtggctgagattgaagcgttaattcaacagcgtctggatgcccgtaaagcgaaagactgggcggcggcagatgcggcgcgtgaccgtcttaacgagatggggatcgtgctggaagatggcccgcaagggaccacctggcgtcgtaagtaa

SEQ ID NO: 460498 - DNA, 495 bp, Shigella boydii
atggttactttccacaccaatcacggcgatattgtcatcaaaacttttgacgataaagcacctgaaacagttaaaaacttcctggactactgccgcgaaggtttttacaacaacaccattttccaccgtgttatcaacggctttatgattcagggcggcggttttgaaccgggcatgaaacaaaaagccaccaaagaaccgatcaaaaacgaagccaacaacggtctgaaaaatacccgtggtacgctggcaatggcccgtactcaggctccgcactctgcaactgcacagttcttcatcaacgtggttgataacgacttcctgaacttctctggcgaaagcctgcaaggttggggctactgcgtgtttgctgaagtggttgaaggcatggacgtggtagacaaaatcaaaggtgttgcaaccggtcgtagcggtatgcaccaggacgtgccaaaagaagacgttatcattgaaagcgtgaccgttagcgagtaa

SEQ ID NO: 460499 - DNA, 723 bp, Shigella boydii
gtggcgacactctttattgcagatcttcatctctgcgtggaagaaccggcgatcaccgccggttttctgcgttttttagcgggggaagctcgcaaggccgacgcgctgtatattcttggcgatctgtttgaagcgtggattggcgacgacgatcccaatccactccatcgccagatggcggcagcgatcaaagcggtgtccgattccggcgttccctgttatttcattcatggcaaccgtgattttctgctcggcaaacgctttgcccgtgaaagtggcatgacgttattgccggaagaaaaggtgctcgaactttatggccgccgggtgttgattatgcatggcgacacgctgtgcaccgatgacgcgggttatcaggcttttcgcgccaaagtccacaaaccctggctgcaaatgctattcctcgccctgccgttgtttgtgcgcaaacgcattgccgcgcgaatgcgcgcgaacagcaaagaagccaacagcagtaaatcgctggcgatcatggacgttaaccaaaacgcagtggtcagtgcgatggaaaaacatcaggtgcaatggctgatccacgggcatacccatcgcccggcggtgcatgaacttatcgccaaccagcaacctgcttttcgcgtggtactgggtgcctggcatacggaaggttcgatggtgaaagtcacggcggatgacgttgagctgattcattttccgttttaa

SEQ ID NO: 460500 - DNA, 510 bp, Shigella boydii
atgtcttcccgcaataatccggcgcgtgtcgccatcgtgatggggtccaaaagcgactgggctaccatgcagttcgccgccgaaatcttcgaaatcctgaatgtcccgcaccacgttgaagtggtttctgctcaccgcacccccgataaactgttcagcttcgccgaaagcgccgaagagaacggttatcaggtgattattgcgggcgcaggtggcgcagcgcacctgccaggcatgattgccgccaaaacgctggtgccggtgctgggcgtgccagtacagagcgccgcactgagcggtgtcgatagcctctactccatcgtacaaatgccgcgcggcattccggtgggtacgctggcgattggtaaagctggcgcggcaaacgcggcattactggcagcacaaattctcgcgactcacgataaagagctacaccagcgtctgaatgactggcgcaaagcccagaccgacgaagtgctggaaaacccggacccgcgaggtgcggcatga

SEQ ID NO: 460501 - DNA, 1068 bp, Shigella boydii
atgaaacaggtttgcgtcctcggtaacgggcagttaggccgtatgctgcgtcaggcaggcgaaccgttaggcattgctgtctggccggtcgggctggacgctgaaccggcggcggtgccttttcaacaaagcgtgattaccgctgagatcgaacgctggccggaaaccgtattaacccgcgagctggcgcgtcatccggcctttgtgaaccgcgatgtgttcccgattattgctgaccgtctgactcagaagcagcttttcgataagctccacctgccgaccgcgccgtggcagttacttgccgatcgcagcgagtggcctgcggtgtttgatcgtttaggtgaactggcgattgttaagcgtcgcactggtggctatgacggtcgcggtcaatggcgtttacgcgccaatgaaaccgaacagttaccggcagagtgttacggcgaatgtattgtcgagcagggcattaacttctctggtgaagtgtcgctggttggcgcgcgcggctttgatggcagcaccgtgttttatccgctgacgcataacctgcatcaggacggtattttgcgcaccagcgtcgcttttccgcaggccaacgcacagcagcaggcgcaagccgaagagatgctgtcggcgattatgcaggagctgggctatgtgggcgtgatgacgatggagtgttttgtcaccccgcaaggtctgctgatcaacgaactggctccgcgtgtgcataacagcggtcactggacacaaaacggtgccagcatcagccagtttgagctgcatctgcgggcgattaccgctctgccgttaccgcaaccagtagtgaataatccgtcggtgatgatcaatctgattggtagcgatgcgaattatgactggctgaaattgccgctggtgcatctgcactggtacgacaaagaagtccgtccggggcgtaaagtggggcatctgaatttgaccgacagcgacacatcgcgtctgactgcgacgctggaagccttaatcccgctgctgccgccagagtatgccagcggcgtgatttgggcgcagagtaagttcagttaa

SEQ ID NO: 460502 - DNA, 693 bp, Shigella boydii
atgaaaacactggttgtagctcttgggggcaacgccttactccagcgcggtgaggcgctgacggcggaaaatcaatatcgcaatatcgccagtgctgtacccgcgctggcacgcctggcccgttcttatcggctggcgattgttcacggcaacgggccgcaggtggggctgctggcgttacagaatctggcgtggaaagaggtagaaccgtatccgctggatgtgctggtggcggaaagccaggggatgattggctatatgctggcgcagagcttgagcgcacagccgcagataccgcctgttacgacggtgctgacgcgcattgaggtttcgcctgatgatccggcgtttttgcagccagagaaatttattggtccggtttatcagccagaagaacaagaggcactggaagcggcttacggctggcagatgaaacgtgatggtaaatatttgcgccgggtggtggcgtctccgcaaccgcgtaaaattctcgacagcgaagccatcgagttgttgctcaaagaggggcatgtggtgatttgcagtggcggcggcggtgtgcctgtgacggaagatggggcagggagtgaagcggtgattgataaagatctcgccactacgttgctcgccgagcagattaatgccgatggactggtgatcctcaccgatgctgatgcggtatatgaaaactga

SEQ ID NO: 460503 - DNA, 816 bp, Shigella boydii
atgacgatcatccatcctctgcttgccagcagtagcgcaccgaattatcgccagtcctggcggttagcgggagtgtggcggcgggcgattaacctgatgacggaaagcggcgaactgttaacgctgcatcgtcagggtagtggtttcggccccggaggatgggtgcttcgccgcgcgcaattcgatgcgttatgcggtggattatgcggcaatgaacgaccacaggttgtggctcaagggattcgcctcgggcgtttcacggttaaacagccacagcgttattgtttgctgcgtattacgccgccttcgcatcctcaaccgcttgcagctgcatggatgcaacgcgcggaggaaaccggacttttcggaccactggcgatggcggcaagcgatccgctgaccgctgaattacgccagtttcgtcactgttttcaggccgcgctcaatggcgttaagaccgactggctgcactggctgggtaaaggccccggattaacgccaagtcatgatgacacgttgagcggaatgctgctggcggcttggtattatggcgctttagatgcgcgcgccggtcgcccgttttttgcctgttccgacaatcttcaactcgttaccacagcggtgagcgtcagttatttacgttatgccgcgcaaggatatttcgcctcgccactcctgcactttgtccatgctctgagttgcccgaaacgtaccgctgttgcgattgattcgctgctggcgctggggcatacgtcaggggcagatacgctgctggggttctggcttggccaacaattattacaagaaaaaccatga

SEQ ID NO: 460504 - DNA, 1260 bp, Shigella boydii
atgtttacatcagtggcgcaagccaatgctgcggttatcgaacaaattcgtcgtgctcgtccacactggctggatgtgcaaccggctttttcacttatcagcgaactaaacgagggcaaaacactgcttcacgccgggccgccaatgcgctggcaggagatgaccggacccatgaaaggggcgtgcgtgggcgcatgtctgttcgaaggctgggcgaaagatgaagcgcaggcactggcgatgctggaccagggggaagtgaacttcattccttgtcaccatgtgaatgccgtcgggccaatgggcggcattacttctgccagtatgccaatgctggtggtcgagaacgtgaccgacggcaaccgggcgtactgcaacctcaacgaaggtatcggcaaagtgatgcgttttggcgcttacggcgaagatgtcctgactcgccatcgctggatgcgcgatgtgttaatgccagtattaagcgcggcgctggggcgcatggagcgcggtatcgatctcacggcgatgatggcgcagggcattacgatgggcgatgagttccatcaacgcaatattgcttcctcagcactgttaatgcgtacgctggccccacaaattgctcgcctcgatcatgataaacagcacattgcggaagtgatcgatttcctcagcgtgaccgatcagttcttcctcaacctcgcgatggcctactgcaaggcggcgatggatgctggcgcgatgatccgcgcaggcagcatcgttacggctatgacccgcaacggcaatatgttcgggattcgggtaagcgggctgggtgaacgctggtttactgcgcctgtaaacactccgcaaggtctgtttttcaccggcttctcgcaggagcaggcgaacccggatatgggcgatagcgcgattaccgaaacctttggtatcggaggtgcggcaatgatcgcagcgcctggcgtaacgcgctttgtcggtgcgggtggcatggaagcggccagggcggtatctgaagagatggcggaaatttaccttgaacgcaatatgcagttgcagatcccaggctgggattttcagggcgcgtgcctggggctggatattcgtcgcgtggtagaaaccggcattacgccactcatcaataccggtatcgcccataaagaggcggggatcgggcagattggcgcaggcaccgtgcgggcaccgctggcgtgctttgaacaggcgctggaagcactggctgaaagcatggggattggttga

SEQ ID NO: 460505 - DNA, 504 bp, Shigella boydii
atggtagtgtccgctattgccagtacacctcaccgggtggcatggataaacccggaagagagtaaatcaaaccgcgcaattggcgttgcgctgaatgatactgcatgtcgcgtattgaaaaaacaaatcgggaatcatcaccgttgggtatttgtgtataaggaaagctgtaccaaaccagacggaacgaaagcgccaacagtcaggaagatgcggtatgacgcaaacacagcctggaaagcggcgctgagacgagcaggtattgatgatttcagatttcacgacttgagacacacctgggcaagttggctggttcaggccggagtcccgttatcagtgttacaggaaatgggaggctgggagtctatcgaaatggttcgtcgatatgctcacctcgcacctaatcaccttaccgaacacgcacggcaaatagactcgattctgaacccatcggtcccaaatttgtcccagtcaagaaataaggaacgtactaatgatgtgtaa

SEQ ID NO: 460506 - DNA, 1254 bp, Shigella boydii
atgctggaacaaatgggcattgccgcgaagcaagcctcgtataaattagcgcaactctccagccgcgaaaaaaatcgcgtgctggaaaaaatcgccgatgaactggaagcacaaagcgaaatcatcctcaacgctaacgcccaggatgttgctgacgcgcgagccaatggccttagcgaagcgatgcttgaccgtctggcactgacgcccgcacggctgaaaggcattgccgacgatgtacgtcaggtgtgcaacctcgccgatccggtggggcaggtaatcgatggcggcgtactggacagcggcctgcgtcttgagcgtcgtcgcgtaccgctgggggttattggcgtgatttatgaagcgcgcccgaacgtgacggttgatgtcgcttcgctgtgcctgaaaaccggtaatgcggtgatcctgcgcggtggcaaagaaacgtgtcgcactaacgctgcaacggtggcggtgattcaggacgccctgaaatcctgcggcttaccggcgggtgccgtgcaggcgattgataatcctgaccgtgcgctggtcagtgaaatgctgcgtatggataaatacatcgacatgctgatcccgcgtggtggcgctggtttgcataaactgtgccgtgaacagtcgacaatcccggtgatcacaggtggtataggcgtatgccatatttacgttgatgaaagtgtagagatcgctgaagcattaaaagtgatcgtcaacgcgaaaactcagcgtccgagcacatgtaatacggttgaaacgttgctggtgaataaaaacatcgccgatagcttcctgcccgcattaagcaaacaaatggcggaaagcggcgtgacattacacgcagatgcagctgcactggcgcagttgcaggcaggccctgcgaaggtggttgctgttaaagccgaagagtatgacgatgagtttctgtcattagatttgaacgtcaaaatcgtcagcgatcttgacgatgccatcgcccatattcgtgaacacggcacacaacactccgatgcgatcctgacctgcgatatgcgcaacgcccagcgttttgttaacgaagtggattcgtccgctgtttacgttaacgcctctacgcgttttaccgacggcggccagtttggtctgggtgcggaagtggcggtaagcacacaaaaactccacgcgcgtggcccaatggggctggaagcactgaccacttacaagtggatcggcattggtgattacaccattcgtgcgtaa

SEQ ID NO: 460507 - DNA, 1104 bp, Shigella boydii
atgagtgacagccagacgctggtggtaaaactcggcaccagtgtgctaacaggcggatcgcgccgtctgaaccgtgcccatatcgttgaacttgttcgccagtgcgcgcagttacatgccgccgggcatcggattgttattgtgacgtcgggcgcgatcgccgccggacgtgagcacctgggttacccggaactgccagcgactatcgcctcgaaacaactgctggcagcggtagggcagagtcgactgattcaactgtgggaacagctgttttcgatttatggcattcacgtcgggcaaatgctgctgacccgtgctgatatggaagaccgtgaacgcttcctgaacgcccgcgacaccctgcgtgcgttgctcgataacaatatcgttccggtaatcaatgagaacgatgctgtcgctacggcagagattaaagtcggcgataacgataacctttctgcgctggcggcgattctggcgggtgccgataaactgttgctgctgaccgatcaaaaaggtttgtataccgctgacccgcgcagcaatccgcaggcagaactgattaaagatgtttacggcattgatgacgcactgcgcgcgattgccggtgacagcgtttcaggcctcggaactggcggcatgagtaccaaattgcaggccgctgacgtggcttgccgtgcgggtatcgacaccattattgccgcgggcagcaagccgggcgttattggtgatgtgatggaaggcatttccgtcggtacgctgttccatgcccaggcgactccgcttgaaaaccgtaaacgctggattttcggtgcgccgccggcgggtgaaatcacggtagatgaaggggcaactgccgccattctggaacgcggcagctccctgttgccgaaaggcattaaaagcgtgactggcaatttctcgcgtggtgaagtcatccgcatttgcaacctcgaaggtcgcgatatcgcccacggtgtcagtcgttacaacagcgatgcattacgccgtattgccggacaccactcgcaagaaattgatgcaatactgggatatgaatacggcccggttgccgttcaccgtgatgacatgattacccgttaa

SEQ ID NO: 460508 - DNA, 1056 bp, Shigella boydii
atgaaaaagagcactctggcattagtggtgatgggcattgtggcatctgcatccgtacaggccgcagaaatatataacaaagacggtaataaactggatgtctatggcaaagttaaagccatgcattatatgagtgataacgacagtaaagatggcgaccagagttatatccgttttggttttaaaggcgaaacacaaattaacgatcaactgactggttatggtcgttgggaagcagagtttgccggtaataaagcagagagtgatactgcacagcaaaaaacgcgtctcgcttttgccgggttgaaatataaagatttgggttctttcgattatggtcgtaagctgggcgcgttgtatgacgtggaagcctggaccgatatgttcccggaatttggtggcgactcctcggcgcagaccgacaactttatgaccaaacgcgccagcggtctggcgacgtatcggaacaccgacttcttcggcgttatcgatggcctgaacttaaccctgcaatatcaagggaaaaacgaaaaccgcgacgttaaaaagcaaaacggcgatggcttcggcacgtcattgacatatgactttggcggcagcgatttcgccattagtggggcctataccaactcagatcgcaccaacgagcagaacctgcaaagccgtggcacaggcaagcgtgcagaagcatgggcaacaggtctgaaatacgatgccaataatatttatctggcaactttctattctgaaactcgcaaaatgacgccaataactggcggctttgccaataagacacagaactttgaagcggtcgctcaataccagtttgactttggtctgcgtccatcgctgggttatgtcttatcgaaagggaaagatattgagggcatcggtggtgaagatctggttaattatatcgacgtcggtgctacgtattatttcaacaaaaatatgtcagcatttgttgattataaaatcaaccaactggatagcgataacaaattgaatattaataatgatgatattgtcgcgattgggatgacgtatcagttttaa

SEQ ID NO: 460509 - DNA, 402 bp, Shigella boydii
atgacgttaccgagtggacacccgaagagcagattgatcaaaaaatttaccgcactaggcccgtatattcgtgaaggtaagtgcgaagataatcgattctttttcgattgtctggctgtatgcgtcaacgtgaaaccggcaccggaagtgcgtgaattctggggctggtggatggagctggaagcgcaggaatcccgttttacctacagctaccagtttggtctgttcgataaagcaggcgactggaagagtgttcctgtaaaagatactgaagtggttgaacgactggagcacaccctgcgtgagtttcacgagaagctgcgtgaactgctgacgacgctgaatctgaagctggaaccggcggatgattttcgtgacgagccggtgaagttaacggcgtga

SEQ ID NO: 460510 - DNA, 1245 bp, Shigella boydii
atgacacaggcaaacctgagcgaaaccctgttcaaaccccgctttaaacatcctgaaacctcgacgctagtccgccgctttaatcacggcgcacaaccgcctgtgcagtcggctcttgatggtaaaaccatccctcactggtatcgcatgattaaccgtctgatgtggatctggcgcggtattgacccacgtgaaatcctcgacgtccaggcacgtattgtgatgagcgatgctgaacgtaccgacgatgatttatacgatactgtgattggctaccgtggtggcaactggatttatgagtgggccacccaggcgatggtgtggcaacaaaaagcctgtgcggaagaagatccgcaactcagtggtcgacactggctgcatgcggctacgttgtacaacattgccgcctatcctcatctgaaaggagatgacctggccgagcaagcgcaggctttatcaaaccgcgcctatgaagaggccgcccagcgtctgccgggcacgatgcggcagatggagtttaccgtacccggcggtgcgcccatcaccggctttttgcatatgccgaaaggcgatggcccgttcccgacagtattaatgtgtggtggtctggatgcgatgcagacggactattacagcctgtatgaacgttattttgcgccgcgcggcattgtgatgctgactattgatatgccgtcggtgggcttttcttcaaaatggaagctcacccaggactccagcctgttgcatcagcacgtcttaaaggcgctgcctaacgtaccgtgggtggatcacactcgcgtcgcggcctttggtttccgtttcggcgctaacgttgccgtgcgtctggcatatcttgaatcgccgcgtctgaaagcggttgcctgtcttggtccggtagttcataccctgttgagtgattttaagtgccagcaacaggtgccggaaatgtatcttgacgttctggcgagtcgtttggggatgcatgatgcttccgacgaagcgttacgcgtggagctgaatcgctattcattaaaagtgcaaggattgctgggacgtcgctgcccaacgccaatgttatcaggctactggaagaacgatccgttcagcccggaagaggactcacgcttaatcacctcatcatctgctgacggtaaattattagagatcccatttaacccggtgtatcggaattttgacaaaggtcttcaggaaatcaccggctggatcgaaaaacgcttgtgttaa

SEQ ID NO: 460511 - DNA, 459 bp, Shigella boydii
atgagcgaaaaatacatcgtcacctgggacatgttgcagatccatgcacgtaaactcgcaagccgactgatgccttctgaacaatggaaaggcattattgccgtaagccgtggcggtctggtaccgggtgcgttactggcgcgtgaactgggtattcgtcatgtcgataccgtttgtatttccagctacgatcacgacaaccagcgagagcttaaagtgctgaaatgcgcagaaggcgatggcgaaggcttcatagttattgatgacctggtggataccggtggtactgctgttgcgattcgtgaaatgtatccaaaagcgcactttgtcaccatcttcgcaaaaccggctggtcgtccgctggttgatgactatgttgttgatattccgcaagatacctggatcgaacagccgtgggatatgggcgtcgtattcgtcccgccaatctccggtcgctaa

SEQ ID NO: 460512 - DNA, 1458 bp, Shigella boydii
gtgtctgaactgtctcaattatctccactgccgctgtgggatatttttgccaaaatctgttctattcctcacccgtcctatcatgaagagcaactcgctgaatacattgttggttgggcaaaagagaaaggtttccatgtcgaacgcgatcaggtaggtaatatcctgattcgtaaacctgctaccgcaggtatggaaaatcgtaaaccggtcgtcttacaggcccacctcgatatggtgccgcagaaaaataacgacaccgtgcatgacttcacgaaagatcctatccagccttatattgatggcgaatgggttaaagcgcgcggcaccacgctgggtgcggataacggcattggtatggcctctgcactggcggttctggctgacgaaaacgtggttcacggtccgctggaagtgctgctgaccatgaccgaagaagccggtatggacggtgcttttggcttacagagcaactggttgcaggctgatattctgattaacaccgactccgaagaagaaggtgaaatctacatgggttgtgcggggggtatcgacttcacctccaacctgcatttagatcgtgaagcggttccagctggttttgaaaccttcaagttaaccttaaaaggtctgaaaggcggtcactccggcggtgaaatccacgttggcctgggtaatgccaacaaactgctggtgcgcttcctggcgggtcatgcagaagaactggacctgcgccttatcgatttcaacggcggcacactgcgtaacgccatcccgcgtgaagcctttgcgaccattgctgtcgcagctgataaagtcgacgcactgaaatctctggtgaatacctatcaggagatcctgaaaaacgagctggcagagaaagagaaaaatctggccttgttgctggactctgtagcgaacgataaagctgccctgattgcgaaatctcgcgatacctttattcgtctgctgaacgccaccccgaacggtgtgatccgcaactccgatgtagccaaaggtgtggttgaaacctccctgaacgtcggtgtggtgaccatgactgacaataacgtagaaattcactgcctgatccgttcactgatcgacagcggtaaagactacgtggtgagcatgctggattcgctgggtaaactggctggcgcgaaaaccgaagcgaaaggcgcatatcctggctggcagccggacgctaattctccggtgatgcatctggtacgtgaaacctatcagcgcctgttcaacaagacgccgaacatccagattatccacgcgggcctggaatgtggtctgttcaaaaaaccgtatccggaaatggacatggtttctatcgggccaactatcaccggtccacactctccggatgagcaagttcacatcgaaagcgtaggtcattactggacactgctgactgaactgctgaaagaaattccggcgaagtaa

SEQ ID NO: 460513 - DNA, 615 bp, Shigella boydii
atgatcttgctacaactctcctcagcgcaggggccggaagaatgttgtctcgcagtgaaaaaggcgctggacaggctaattaaagaagctgcccgacaagacgtcgcggtaacggtgttggaaacagaaacgggccgctactctgacacgctgcgttcagctctggtttctctggatggcgataacgcatgggcattaagcgaaagctggtgtggcactattcagtggatttgtccgagtccgtatcggcctcatcatgggcgcaaaaactggtttctgggcattgggcgttttaccgctgatgagcaggagcaatccgatgcgatccggtatgagacgctgcgttcgtcggggccgggcggtcaacatgtcaataaaaccgactcggcggtacgcgccacgcatttggcatccggtattagcgtgaaggttcagtcagagcgtagtcagcatgctaacaagcggctggcacgattgctgattgcctggaagctggagcagcagcaacaggaaaatagcgcggtgctgaaatcgcagcggcgaatgttccatcaccagattgaacgtggcaacccgagacggacatttacagggatggcttttatcgaaggataa

SEQ ID NO: 460514 - DNA, 198 bp, Shigella boydii
gtgacgcaactctcgcggactgaacttggcagtcggataatttgtcgcgataaacaactcatctttgaagaagcgccacaagcctataaatcggctgaaagcgtggtgcaatgtctggtgcaggccggtttaattattcctgtcgcgcggctgcgtccggtgctaacgctcaaaaacagtggagggaaaaaaggatga

SEQ ID NO: 460515 - DNA, 255 bp, Shigella boydii
atgcaacaagttaaggccacgggaagtccggttctggatgtggcgcataactttgttagcgcgtgtcaaatcggcgatcaacagggctggttgcatcgtaaaggtgccacgccggatgacaacggtctggtgattactcctggattgtacagcctgttgcgaacgaaaaaacgctccactcgctggcgcatggggcagggcgtaaatgggggcgcaccgagtgtaaatggcgtctggcagcgaaatacacggtga

SEQ ID NO: 460516 - DNA, 588 bp, Shigella boydii
gtgacaccgacccttttaagtgctttttggacttacaccctgattaccgctatgacgccaggaccgaacaatattctcgcccttagctctgctacgtcgcatggatttcgtcaaagtacccgcgtgctggcagggatgagtctgggatttttgattgtgatgttactgtgtgcgggcatttcattttcactggcagtgattgacccggcagcggtacaccttttgagttgggcgggggcggcatatattgtctggctggcgtggaaaatcgccaccagcccaacaaaggaagacggacttcaggcaaaaccaatcagcttttgggccagctttgctttgcagtttgtgaacgtcaaaatcattttgtacggtgttacggcactgtcgacgtttgttctgccgcaaacacaggcgctaagctgggtagttggcgtcagcgttttgctggcgatgattgggacgtttggcaatgtgtgctgggcgctggcggggcatctgtttcagcgattgtttcgccagtatggtcgccagttaaatatcgtgcttgccctgttgctggtctattgcgcggtacgcattttctattaa

SEQ ID NO: 460517 - DNA, 384 bp, Shigella boydii
atgattacaggtatccagattactaaagccgctaacgacgatctgctgaactctttctggctgctggacagcgaaaaaggcgaagcacgttgcatcgttgcaaaagcaggttatgcagaagatgaagtggttgcagtaagcaaactgggtgacattgaataccgtgaagttccagtagaagtgaaaccagaagttcgcgttgaaggtggtcaacacctgaacgttaacgttctgcgtcgtgaaactctggaagatgcagttaagcatccggaaaaatatccgcagctgaccatccgtgtatccggttatgcagttcgctttaactctctgactccggaacagcagcgcgacgttatcgctcgtacctttactgaaagcctgtaa

SEQ ID NO: 460518 - DNA, 690 bp, Shigella boydii
atggctaacgaattaacctggcatgacgtgctggctgaagagaagcaacaaccttattttcttaatacccttcagaccgtcgccagcgagcggcagtccggcgtcactatctatccaccacaaaaagatgtctttaacgcgttccgctttaccgagttgggtgacgttaaagtggtgattctcggccaggatccttatcacggaccgggacaggcgcatggtctggcattttccgttcgtcccggcattgccattcctccgtcattattgaatatgtataaagagctggaaaatactattccgggcttcacccgccctaatcatggctatctcgaaagctgggcgcgtcagggcgttctcctgctcaatactgtgttgacggttcgcgcaggtcaggcgcattcccacgccagcctcggttgggagacgtttactgataaagtcatcagcctgattaaccagcaccgcgaaggcgtggtgtttttgttgtggggatcacatgcgcaaaagaaaggggcgattatagataagcaacgccatcatgtactgaaagcaccgcatccgtcgccgctttcggcgcatcgtggattctttggctgcaaccattttgtgctggcaaatcagtggctggaacaacgtggcgagacgccgattgactggatgccagtattaccggcagagagtgagtaa

SEQ ID NO: 460519 - DNA, 1038 bp, Shigella boydii
atgaacgatgaaatgaaaggtaaaagcggcaaggtcaaagtgatgtatgtccgcagtgatgatgattctgataaacgtacccacaacccgcgtaccgggaaagggggcgggcgtccaggaaaatctcgtgctgacggtggccgtcgccccgcccgcgatgacaaacagagtcagccccgtgaccgcaagtgggaagattcgccgtggcgcacggtttcccgcgcgccgggtgatgagacgccggaaaaggccgatcacggtggcatcagtggtaaaagttttattgatccggaagtgttgcgtcgtcagcgtgcggaagaaacccgcgtctacggcgaaaacgcctgtcaggcactgttccagagccgtccggaagcaattgttcgcgcctggtttatccagagcgtaacgccacgttttaaagaagccttgcgctggatggcggcaaaccgcaaagcgtaccatgtggtggatgaagctgaattgacaaaagcgtcaggcacggaacatcacggcggcgtttgcttcctgatcaaaaagcgtaacggtacaaccgtgcagcagtgggtaagccaggcaggcgcgcaggattgcgttctggcactggaaaacgaatctaacccgcataacctgggtggcatgatgcgcagctgcgcgcacttcggcgtgaaaggtgtcgtggtgcaggatgcggcactgctggagtcgggggcggctatccgtaccgcagaaggcggcgcagagcacgttcagccgattactggcgacaacattgttaacgtgctggatgatttccgtcaggcaggttacaccgtagtgaccacttccagcgagcagggtaaaccgctgttcaaaactagtctgccagcgaaaatggtactggtgctgggtcaggaatatgaagggttaccggatgccgcacgcgatccgaacgatctgcgcgtgaagattgacggtacgggcaacgttgccgggctgaatatctctgtcgcaaccggcgttttgcttggtgaatggtggcgtcagaataaagcctga

SEQ ID NO: 460520 - DNA, 420 bp, Shigella boydii
atgaataccgtttgtacccattgtcaggccatcaatcgcattcccgacgatcggatcgaagatgcggcaaaatgcggacgctgcggtcacgacttgtttgacggagaggtgattaatgcgaccggtgaaacactcgacaaattgctgaaggatgatctacctgtggtgatcgacttctgggcaccgtggtgcggcccctgccgtaatttcgcaccaatttttgaagatgtcgcgcaagagcgtagcggtaaagtgcgctttgtgaaagtgaataccgaagctgaacgtgaattgagcagtcgctttggaattcgtagtataccgacgatcatgattttcaaaaacggtcaggttgtcgacatgcttaatggcgcagtaccgaaagctccgttcgatagctggctgaacgaatctctttaa

SEQ ID NO: 460521 - DNA, 699 bp, Shigella boydii
atgaccgaaaacgctgttctccagttacgcaccgagcgtattgcgcgcgcaacacgtccttttcttgcccgcggtaatcgcgttcgtcgctgccaacgctgtcttttgccagagaaattatgtctctgttcgacaattaccccagcacaagcaaaaagtcgcttctgtttgctgatgttcgacaccgagccaatgaagcccagtaataccgggcgtctgattgctgatattttgcctgataccgttgcgtttcaatggtcgcgtaccgaaccctcgcaggatttgctggatctggtacaaaacccggattatcagccaatggtggtctttcccgcctcgtatgctgatgagcaacgggaagtgatcttcacaccacctgccggtaagccaccgctgtttatcatgctcgatggtacctggccggaagctcgcaagatgtttcgtaaaagtccgtatctggataatcttcccgtcatttccgtcgatctttcccggctttctgcctatcgcctgcgtgaagcccaggctgaaggccaatattgtactgccgaggtagccatcgcactgttagatatggccggcgataccggggcggcagcagggttaggcgagcattttacccgctttaaaacacgctatctggcaggaaaaacgcaacatctgggtagcatcacagcagaacagttagaaagcgtttaa

SEQ ID NO: 460522 - DNA, 2661 bp, Shigella boydii
atgagtcagcgaggactggaagcactactgcgaccaaaatcgatagcggtaattggcgcgtcgatgaaacccaatcgcgcaggttacctgatgatgcgtaacctgctggcgggaggctttaacggaccggtactcccggtgacgccagcctggaaagcggtgttgggtgtgttggcctggccggatattgccagcttgccctttacacccgaccttgcggttttatgtaccaatgccagccgtaatcttgctcttctggaagagctcggcgagaaaggctgtaaaacctgcattattctttccgccccggcatcgcaacacgaagatctccgcgcctgcgccctgcgccataacatgcgcctgcttggaccaaacagtctgggtttactggctccctggcaaggtctgaatgccagcttttcgcctgtgccgattaaacgcggcaagctggcgtttatttcgcaatcggctgccgtctccaacaccatcctcgactgggcgcaacagcgtaagatgggcttttcctactttattgcgctcggcgacagcctggatatcgacgttgatgaattgcttgactatctggcacgcgacagtaaaaccagcgccatcctgctctatctcgaacagttaagcgacgcgcgacgctttgtttcggcggcccgtagtgcctcgcgtaataaaccgattctggtgattaaaagcggacgtagcccggcggcacagcgactgctcaacaccacggcaggaatggacccggcatgggatgcggctattcagcgtgccggtttgttgcgggtacaggacacccacgagctgttttcggcggtggaaacccttagccatatgcgcccgctacgtggcgaccggctgatgattatcagcaacggtgctgcgcctgccgcgctggcgctggatgccttatggtcacgcaatggcaagctggcaacgctaagcgaagaaacctgccagaaactgcgcgatgcactgccagaacatgtggcaatatctaacccgctcgatctacgcgatgacgccagcagtgagcactatattaaaacgctggatattctgctccacagccaggattttgacgcgctgatggttattcattcgcccagcgccgctgctcccgcaacagaaagcgcgcaagtattaattgaagcggtaaagcatcatccccgcagcaaatatgtctctttgctgacgaactggtgcggcgagcactcctcgcaagaggcacgacgtttattcagcgaagccgggctgccgacctaccgtaccccggaaggaaccatcactgcttttatgcatatggtggagtaccggcgtaatcagaagcaactacgcgaaacgccggcgttgcccagcaatctgacttccaataccgcagaagcgcatcttctgttgcaacaggcgattgccgaaggggctacgtcgctcgatacccatgaagttcagcccatcctgcaagcgtatggcatgaacacgctccctacctggattgccagcgatagcaccgaagcggtgcatattgccgaacagattggttatccggtggcgctgaaattgcgttcgccggatattccacataaatcggaagttcagggcgtcatgctgtacttgcgtacagccaatgaagtccagcaagcggcaaacgccattttcgatcgcgtaaaaatggcctggccgcaggcgcggatccacggcctgttggtgcaaagtatggctaaccgtgctggcgctcaggagttgcgggttgtggttgggcacgatccggttttcgggccgttgatcatgctgggtgaaggcggtgtggagtggcgtcctgaagatcaagccgtcgtcgcactgccgccgctgaacatgaacctggcccgctatctggttattcaggggatcaaaagtaaaaagattcgtgcgcgcagtgcgctacgcccattggatgttgcaggcttgagccagcttctggtgcaggtttccaacttgattgtcgattgcccggaaattcagcgtctggatattcatcctttgctggcttctggcagtgaatttaccgcgctggatgtcacgctggatatctcgccgtttgaaggcgataacgagagtcggctggcagtgcgcccttatccgcatcagctggaagaatgggtagaattgaaaaacggtgaacgctgcttgttccgcccgattttgccagaagatgagtcacaacttcagcaattcatttcgcgagtcaccaaagaagatctttattaccgctactttagcgagatcaacgaatttacccatgaagatttagccaacatgacacagatcgactacgatcgggaaatggcgtttgtagcggtacgacgtattgatcaaacggaagagatcctcggcgtcacgcgtgcgatttccgatcctgataacatcgatgccgaatttgctgtgctggttcgctcggatctcaaagggttaggcttaggtcgacgcttaatggaaaagttgattacctatacgcgagatcacggactacaacgtctgaatggtattacgatgccaaacaatcgtggcatggtggcgctagcccgcaagctcgggtttaacgttgatatccagctcgaagaggggatcgttgggcttacgctaaatcttgcccaacgcgaggaatcatga

SEQ ID NO: 460523 - DNA, 1356 bp, Shigella boydii
atgttgtcaaaatttaagcgtaataaacatcaacaacaccttgcccaactacccaagatttctcaatcagttgatgatgtcgatttcttttacgctcccgccgacttccgggagacgctgctggaaaaaatagccagcgcgaagcagcgcatttgcattgtcgccctgtatctcgaacaggatgacggtggcaaaggcattctgaacgcgttgtatgaagctaaaaggcagcgtccggaactggatgtgcgggtgctggtcgactggcatcgtgcacaacgtggacgcattggcgctgcggcatctaacactaacgctgactggtactgccgcatggcgcaggaaaattcgggcgtagatgttccggtttatggcgttccaatcaatacccgtgaagcccttggtgttctgcactttaaaggctttatcatcgacgatagcgtactttatagcggtgccagcctgaacgatatttacctgcatcagcacgataaatatcgctacgaccgttatcatcttatccgtaaccgtaagatgtcagacattatgtttgaatgggttacacagaatattatgaatggccgcggcgttaatcgtctggatgatgttaatcggccaaaaagcccggaaatcaagaacgatattcgtctgttccgccaggagctgcgtgatgccgcttatcatttccagggcgatgccgacaacgatcagctttccgtaacgccgctagtggggctggggaaatcgagtctgttgaacaagaccattttccatcttatgccttgtgccgagcagaaactaaccatctgtacgccatacttcaacctgccagcaatccttgtgcgcaatattatccagttgctgcgcgaagggaaaaaggtcgaaattattgttggtgataaaaccgcgaacgacttctacattccggaagatgaacctttcaagataattggcgcattgccttatctctatgagatcaatctgcgtcttttcctgagccgtttgcagtattacgtcaatactgaccagctagtggttcggttatggaaagatgacgacaacacctatcacctgaaagggatgtgggttgatgataagtggatgttgatcaccggtaataacctgaacccgcgcgcctggcgtctggatctggaaaacgccattttgatccacgatccacaactggagcttgcgccgcagcgagagaaagaactggagctgatccgcgagcataccaccatcgttaagcactatcgcgatctgcaaagtattgccgattatccggtgaaggttcgtaaactcatccgccgtttgcgccgtatccgcatcgaccgattaattagccgcatcctgtaa

SEQ ID NO: 460524 - DNA, 273 bp, Shigella boydii
atggctaacgatagctggagcgggcaggataaagctcaacactttatcgcctcggcgatgctttccgccgccggaaatgaatattcacagcatcaggggatgagccgggatcgcagtgccatgtttggattgatgttctctgtcagtttgggggcgtcaaaagagctttgggatagccgccccgaagggagcggctggagctggaaggatttggcctgggatgtcgccggtgcaagcaccggctataccgtctggcaactgacccgtcactaa

SEQ ID NO: 460525 - DNA, 435 bp, Shigella boydii
ttgtctaattcgtcagattctgaccagacggttcaggctgtacgcttacagattggtcgccgtacctcaatgttatgtttcggttcgctggcagccatttttaccgttcctattctctcagcattgcaaaacgtttcctcgccttatgccgcttttggtctggtgatgtgtgccctgctgatagtgagtttttatacatcaatcagtggaatactgaaggctgagatgttcccggcacaggttcgcgcattaggcgttggtctgtcatatgcggtcgctaatgctatatttggtggttcggcggagtacgtagcgttgtcgctgaaatcaataggaatggaaactgccttcttctggtatgtgaccttgatggccgtggtggcgtttctggtttctttgatgctacatcgcaaagggaaggggatgcgtctttag

SEQ ID NO: 460526 - DNA, 330 bp, Shigella boydii
atgtttaaccgaccgaaccgcaacgacgttgatgatggcgtgcaggatatccagaatgatgtcaatcaattagctgacagcctcgaatctgtattgaagtcctggggcagcgacgccaaaggggaagctgaagccgcacgcagtaaagctcaggcgttgctgaaagaaaccagggcgcgaatgcatggtcgtactcgcgtccagcaagccgcgcgcgatgccgttggctgcgcggattcttttgttcgtgaaagaccctggtgtagcgtgggtacagcagctgcggtaggtatttttatcggcgcactgttaagcatgcgcaaatcgtag

SEQ ID NO: 460527 - DNA, 246 bp, Shigella boydii
atgcgcataactatttatactcgtaacgattgcgttcagtgccacgccaccaaacgggcgatggaaaaccgggggtttgattttgaaatgattaatgtcgatcgcgttcctgaagcagcggaagcgttgcgtgctcagggctttcgtcagttgccggtagtgattgctggcgatcttagctggtctggtttccgtccggacatgattaaccgtctgcatccagcgccacacgcggccagtgcatga

SEQ ID NO: 460528 - DNA, 411 bp, Shigella boydii
atgagccagctcgtctacttctccagcagctccgaaaacacgcagcgttttatcgaacgtttaggtctgcccgcggtgcgcatcccgctcaatgaacgggaacggattcaggtagacgagccttacatcctgatcgtgccctcttacggcggcggcggtacggctggcgcggtgccacgacaggtaattcgctttttaaacgacgagcacaaccgggcgttgcttcgcggcgttattgcttctggtaatcgcaactttggtgaggcgtatggccgcgccggagatgtgattgcccggaaatgcggcgtgccgtggctgtaccgttttgaactcatgggtacgcaaagcgatatcgaaaacgttcgtaaaggagtaaccgaattttggcaacgacaaccgcagaatgcctga

SEQ ID NO: 460529 - DNA, 2145 bp, Shigella boydii
ttggcaacgacaaccgcagaatgcctgacgcaggaaacgatggattaccacgcgctgaatgcgatgcttaacctctacgatagcgcaggtcgcattcagttcgataaagaccgccaggccgttgacgcctttatggcgacgcatgtgcgtccgaacagtgtgaccttcagtagccagcagcagcgcctgaactggctggtcaacgaaggttactatgatgaaagcgttcttaatcgctactctcgcgactttgtcattacgctgtttgcccacgcacacaccagcggttttcgtttccagacattcctcggggcatggaagttttacaccagctatacgttgaagacattcgacggtaaacgttatctggaagattttgccgatcgagtcacgatggtggcgctgacgctggcacaaggcgatgcgacgctggcgttgcaactgaccgatgaaatgctgtcaggacgctttcagccagccacgccgacattcctcaactgcggtaagcagcagcgcggcgaactggtttcctgttttctgctgcgtattgaagacaatatggagtcgattggccgggcggtaaattccgcactgcaactgtcgaaacgcggcggcggcgtggcatttttgctgtcgaatctgcgagaagcgggcgcgccaattaaacgtattgaaaatcaatcttctggcgtaattccggtgatgaaaatgctggaagacgcattttcctatgccaaccaactcggcgcgcgtcagggggcaggtgcagtctatttacatgctcatcatcccgatattctgcgttttctcgatacaaaacgggaaaatgccgacgaaaaaatccgcattaaaacactgtcgctgggcgtggtgatcccggatatcactttccatctggcaaaagagaatgcgcagatggcgctgttttcgccctatgacgttgagcgagtttatggcaagccgtttgccgatatcgccatcagcgaacactatgacgaactggttgccgatgaacgcatccgcaaaaaatacctcaacgcccgtgatttcttccagcggctggcagaaatccagtttgagtccggctatccctacatcatgtatgaagacacggtaaaccgtgctaaccctgtcgccgggcgcataaatatgagtaatctctgctcagagattttgcaggtcaactgtgcctcagagtatgacgagaatctcgactatgcccgcacaggccatgatatctcctgcaatttaggttcgttgaatattgcgcacaccatggattcccccgattttgcccgcacggtagagactgccgtgcgcggtttaacggcggtgtcagatatgagtcatatccgcagcgtgccgtccatcgaagccggaaatgccgcctcacacgccatcggactggggcagatgaatttacacggctatctggcgcgagaaggcatcgcttatggttcgccggaagcactggatttcaccaatctctatttctatgccatcacctggcacgcactgcgtacctcgatgttgctggcgcgcgaacgcggtgaaaccttcgccgggttcaaacagtcacgttatgccagtggtgaatattttagccaatatctgcaaggtaactggcagccgaaaacggcgaaagttggcgaactgtttgcccgcagcggtattacgttacctacccgtgagatgtgggcgcaactgcgcgacgacgtgatgcgctacggcatttataaccagaatcttcaggcggtgccgccaaccggttctatctcttatatcaaccatgctacgtcgagtattcatccgattgtggcgaaagtagagatacgcaaagagggcaaaacaggacgcgtttactaccctgccccgtttatgactaacgagaatctggcgctgtatcaggatgcttacgaaatcggcgcagaaaagatcatcgacacctacgccgaagcgactcgccatgtcgatcaggggctgtcgctgacgctgtttttccccgataccgccaccactcgcgatatcaacaaagcgcagatttacgcctggcgcaagggtatcaaaacgctctattacattcgcctgcgtcagatggcgctggaaggcactgaaattgaaggctgcgtctcctgtgcactttaa

SEQ ID NO: 460530 - DNA, 960 bp, Shigella boydii
atgaaactctcacgtatcagcgccatcaactggaacaagatatctgacgataaagatctggaggtgtggaatcgcctgaccagcaatttctggctaccagaaaaggtgccgctgtcgaacgatattcctgcttggcagacattaactgtcgtagaacaacaactgacgatgcgcgtttttactggcctgacgctgctcgacacgctgcaaaatgttatcggcgcgccttcgctgatgcccgatgcactcacgcctcatgaagaagcggtattatcgaatatcagctttatggaagcggttcatgcccgctcttacagttcgattttctcgacgctgtgtcagaccaaagatgtcgatgccgcctacgcctggagtgaagaaaacgcaccgttgcagcgaaaagctcagattattcagcaacattatcgcggtgatgatccgctgaaaaagaaaatcgccagtgtgtttcttgaatcttttttgttctattccggtttctggctgccgatgtatttttccagccgcggaaagctgaccaataccgcagatctgatccgtctgattatccgcgatgaagcagtccacggttactacataggctataaatatcagaaaaacatggaaaagatatctctgggacaacgtgaagagttgaagagtttcgccttcgatttgttgctggaactctacgacaacgagttgcaatacaccgatgagctgtacgccgaaaccccgtgggctgacgatgtgaaagcgtttctctgttacaacgccaataaggctttgatgaatctgggctacgaaccgttatttcccgcagaaatggcggaagtgaatccggcaatcctcgccgcgctttcgccgaatgccgatgaaaatcacgatttcttttccggttcaggctcctcttatgtgatggggaaagcggttgaaacagaagatgaagactggaatttctga

SEQ ID NO: 460531 - DNA, 1203 bp, Shigella boydii
atggcaattaaattagaaattaaaaatctttataaaatatttggcgagcatccacagcgagcgttcaaatatatcgaacaaggactttcgaaagaacaaattctggaaaaaactgggctatcgcttggcgtaaaagacgccagtctggccattgaagaaggcgagatatttgtcatcatgggattatccggctcgggtaaatccacaatggtacgccttctcaatcgcctgattgaacccacccgcgggcaagtgctgattgatggtgtggatattgccaaaatatccgatgccgaactccgtgaggtgcgcagaaaaaagattgcgatggtcttccagtcctttgccttaatgccgcatatgaccgtgctggacaatactgcgttcggtatggaattggccggaattaatgccgaagaacgccgggaaaaagcccttgatgcactgcgtcaggtcgggctggaaaattatgcccacagctacccggatgaactctctggcgggatgcgtcaacgtgtgggattagcccgcgcgttagcgattaatccggatatattattaatggacgaagccttctcggcgctcgatccattaattcgcaccgagatgcaggatgagctggtaaaattacaggcgaaacatcagcgcaccattgtctttatttcccacgatctcgatgaagctatgcgtattggcgaccgaattgccattatgcaaaatggtgaagtggtacaggtcggcacaccggatgaaattctcaataatccggcgaatgattatgtccgtaccttcttccgtggtgttgatattagtcaggtattcagtgcgaaagatattgcccgccggacaccgaatggcttaattcgtaaaacccctggcttcggcccacgttcggcactgaaattattgcaggatgaagatcgcgaatatggctacgttatcgaacgcggtaataagtttgtcggcgcagtttccatcgattcgcttaaaaccgcgttaacgcagcagcaaggtcttgatgcggcgctgattgatgcgccgttagcagtcgatgcacaaacgcctcttagcgagttgctctctcatgtcggacaggcaccctgtgcggtgcccgtggtcgacgaggaccaacagtatgtcggcatcatttcgaaaggaatgctgctgcgcgctttagatcgtgagggggtaaataatggctga

SEQ ID NO: 460532 - DNA, 1065 bp, Shigella boydii
atggctgatcaaaataatccgtgggataccacgccagcggcggacagtgccgtgcaatccgcagacgcctggggtacaccggcgactgcaccgactgacggcggtggtgctgactggctgaccagtacgcctgcgccaaacgtcgagcattttaatattctcgatccgttccataaaacgctgatcccgctcgacagttgggtcactgaagggatcgactgggttgttacccatttccgtcccgtcttccagggcgtgcgcgttccggttgattatatcctcaacggtttccagcaattgctgctgggtatgcccgcaccggtggcgattatcgttttcgctctcatcgcctggcagatttccggggtcggaatgggcgtggcgacgctggtttcgctgattgccatcggcgcaatcggtgcctggtcgcaggccatggttaccctggcgctggtgttaaccgccctgctgttctgtatcgtcattggtttgccgctggggatctggctggcgagaagtccgcgagcggcgaaaattattcgtccactgcttgatgccatgcagaccacgccagcgtttgtttatctggtgccaatcgtcatgctatttggtatcggtaacgtgccgggcgtggtggtgacgatcatctttgctctgccgccgattatccgtctgaccattctggggattaaccaggttccggcggatctgattgaagcctcgcgctcattcggtgccagcccgcgccagatgctgttcaaagttcagttaccgctggcgatgccgaccattatggcgggcgttaaccagacgctgatgctggccctttctatggtggtcattgcctcgatgattgccgtcggcgggctgggtcagatggtacttcgcggtatcggtcgtctggatatggggcttgccaccgttggcggcgtcgggattgtgatcctcgccattatcctcgatcgcctgacgcaggccgttgggcgcgactcacgcagtcgcggcaaccgtcgctggtacaccactggccctgttggtctgctgacccgcccattcattaagtaa

SEQ ID NO: 460533 - DNA, 993 bp, Shigella boydii
atgcgacatagcgtactttttgcgacagcgtttgccacgcttatctctacacaaacttttgctgccgatctgccgggcaaaggtattactgttaatccagttcaaagtaccatcaccgaagaaaccttccagacgctgctggtcagccgtgcgctggagaaattaggctataccgtcaacaaacccagcgaagtagattacaacgttggctacacctcgcttgcttccggcgatgcaaccttcaccgccgtgaactggacgccactgcatgacaacatgtacgaagctgccggtggcgataagaaattttatcgtgaaggggtatttgttaacggcgcggcacagggttacctgatcgataagaaaaccgccgaccagtacaaaatcaccaacatcgcacaactgaaagatccgaagatcgccaaactgttcgataccaacggcgacggtaaagcggatttaaccggttgtaaccctggctggggctgcgaaggtgcgatcaaccaccagcttgccgcgtatgaactgaccaacaccgtgacgcataatcaggggaactacgcagcgatgatggccgacaccatcagtcgctacaaagagggcaaaccggtgttttattacacctggacgccgtactgggtgagtaatgagctgaagccagggaaagatgtggtctggttgcaggtgccgttctccgcactgccgggcgataaaaatgccgataccaaactgccgaatggcgcgaattacggcttcccggtcagcaccatgcatatcgttgccaacaaagcctggaccgagaaaaatccggcggcagccaaactgtttgccattatgcagttgccagtggccgatattaacgcccagaacgccattatgcatgacggcaaagcctcagaaggcgatattcagggccacgttgatggctggatcaaagcccaccagcagcagttcgatggctgggtgaatgaggcgctggcagcgcagaagtaa

SEQ ID NO: 460534 - DNA, 990 bp, Shigella boydii
atgactaaacctaatcatgagcttagcccggcgctgatcgtgctgatgtctatcgccaccggtctggcggtagccagtaactattacgcccagccattgctcgacaccatcgcgcgtaacttttccctttccgccagttcggcaggctttattgttaccgccgcgcaattgggctatgcagcaggtctgctgtttcttgttcccctcggtgatatgtttgaacgccgccgcctgattgtctcgatgaccttactggcggcaggcggcatgttaatcactgccagcagtcagtcgctggcgatgatgatcctcggtacggcattaaccggtttattctctgtcgtggcacaaattctggttccgctggcagcgacgctggcttcaccggacaaacgcggcaaagtggttggcactattatgagcggtctgctgttggggatcttactcgcacggaccgttgccggattgctggcgaatctcggcggctggcgcaccgtcttttgggttgcctcggtgttaatggcactgatggcgctggcattatggcgtggtctgccacaaatgaaatcagaaacccacctcaactacccacagttgttaggttccgttttcagcatgtttatcagcgataagatcctgcgcacccgcgcattgctgggctgcctgacctttgccaacttcagcattctctggacctcaatggcctttttgcttgccgctccaccttttaactacagcgatggtgtcattggtctgtttggacttgcgggagctgccggagcgttgggcgctcgtccggcgggcggttttgccgataagggtaaatcgcaccacaccacaactttcggtctgctgctgctattactttcatggctggcgatctggtttggtcacacttccgtactggcgctgattatcggcatcctggtgctggatctcaccgtacagggcgtgcatatcactaaccaggtgatgctgccaacttactga

SEQ ID NO: 460535 - DNA, 885 bp, Shigella boydii
atgattaagaaaatttttgcccttccggtcatcgaacaaatctcccctgtcctctcccgtcgtaaactggatgaactggacctcattgtggtcgatcatccccaggtaaaagcctcttttgcattacagggcgcacaccttctctcgtggaaacctgcgggtgaagaagaagttctgtggttgagcaacaacacaccgttcaaaaatggcgtcgctattcgcggtggcgtaccggtttgctggccgtggtttggtccggcggcacaacaaggtctgcctgcgcacggttttgcccgcaacctgccgtggacgctgaaatcacatcatgaagatgctgatggcgtagcgctgacttttgaattgacgcaaagcgaagagacgaaaaaattctgtccgcacgactttacgctgttagcgcatttccgcgtgggtaaaacctgtgaaatcgatcttgaatcacatggcgaatttgaaaccacctctgccctgcatacctactttaacgtgggtgatatcgctaaggtaagcgtcagtgggctgggcgatcgcttcattgataaagtgaatgacgcgaaagaagatgtactgaccgacggtattcagaccttccctgaccgtaccgatcgcgtgtatctgaatccgcaagattgcagcgtgattaatgatgaagcgctgaatcgtattatcgccgtaggccaccagcatcatctgaacgttgtaggctggaacccgggaccggcgctttcaattagtatgggcgatatgccggatgatggctacaaaacatttgtttgtgtagaaacggcttacgcttcagaaacgcaaaaagtcaccaaagagaaacctgcacatctggcgcaatccattcgcgttgcgaaacgttaa

SEQ ID NO: 460536 - DNA, 285 bp, Shigella boydii
atggcttacagtccattagcccaggccgggcggttgcgcaatggactgttaaaaaacgcggtagtcaacgaaattgcacatgctcacaatatcagctcggcacaagtattgttggcgagggtaatcagccatcagggtgtgatggcgattccaaaagcggccacgattgcccatgttcaacagaatgcggctgtgcttgaggtcgaactttcgtcagcggaattaaccatgctggataaagcgtatccggcaccaaaaggaaaaactgcgctggatatggtgtga

SEQ ID NO: 460537 - DNA, 492 bp, Shigella boydii
atgcaacaaaaaatgattcaatttagtggcgatgtctcactgccagccatagggcagggaacatggtatatgggcgaagatgccagtcagcgcaaaacagaagttgctgcactacgcgcgggcattgagctcggtttaaccctcattgataccgccgaaatgtatgccgatggcggtgccgaaaaggtggttggggaagcattaaccggtctgcgtgataacgtctttctcgtctctaaagtctatccgtggaatgctggcaggcaaaaagcgataaatgcatgcgaagccagtttatgccgtctcaatactgattatctcgatctctacttattacactggtctggcagtttcgcttttgaagagactgttgcagcgatggaaaaattgatcgcccagagaaaaatccgccgctggggcgtttctaaccttgattatgctgatatgcaggaactctggcagctgccgggggggaaatcagtgtgccactaa

SEQ ID NO: 460538 - DNA, 747 bp, Shigella boydii
gtgaccaaactcaaacttctggcacttggagtgcttatcgcaacgtctgcaggcgtagcgcacgctgaaggtaaattttccttgggcgcaggcgtaggtgtcgttgagcacccatataaagattacgataccgatgtttacccagtaccggtaatcaactatgaaggcgataacttctggttccgtggcttaggtggtggttactacctgtggaatgacgcaacagataaactttcaattaccgcttactggtcgccgctttacttcaaagcgaaagacagtggcgatcaccaaatgcgtcacctggatgaccgtaagagcaccatgatggctggtctgtcttatgctcactttacccagtacggttacctgcgtaccaccctggctggcgataccctggataacagcaacggcattgtctgggatatggcctggttgtatcgttacaccaacggtggcctgaccgtgactccgggtattggtgtgcagtggaacagcgaaaaccagaacgaatactattatggcgtatcgcgcaaagagtccgctcgcagcggtctgcgtggctataacccgaacgacagctggagcccttacctggagctgagcgccagctacaacttcctcggcgactggagtgtttacggtaccgcgcgctatacccgtctgtctgatgaagttactgacagcccgatggtggataaatcctggactggcctgatttctaccgggatcacctacaaattctga

SEQ ID NO: 460539 - DNA, 369 bp, Shigella boydii
atgaatatattcgatcactatcgccagcgatatgaagctgccaaggacgaagagttcacactgcaggagtttcttaccacttgtcggcaagatcgcagtgcttatgccaacgcggctgagcggctattgatggctatcggtgagcctgtcatggtcgatacagcccaggaacccagactttctcgactcttttctaaccgggtcattgcacgttatccggcgtttgaagagttttacggcatggaagacgcgattgaacagattgtctcttatctgaaacacgcggctcaggggctggaagagaagaaacaaatcctgtatctgctggggcctgtgggtggggtaaatcatcgcttgctgagcgactga

SEQ ID NO: 460540 - DNA, 1284 bp, Shigella boydii
atgacctggtttattgaccggcgtctgaacggcaaaaacaaaagcatggtgaatcgccagcgttttttacgccgttataaagcgcaaattaaacagtcgatctccgaggccatgaataagcgttcggtgactgacgtagacagcggcgaatccgtatccattcccacggaagatattagcgaaccgatgtttcatcaggggcgtggcggcctgcgccaccgcgtacatccgggcaatgaccatttcgtccagaacgaccgaattgaacgtccccagggtggcggcggaggttccggcagtggtcagggccaggccagccaggatggtgaaggtcaggatgaatttgtctttcagatttcgaaagatgagtatcttgatctgctctttgaagatttggccttaccgaatctgaaacaaaaccaacaacgccagctgaccgaatataaaacgcatcgggcgggttataccgctaacggcgttccagccaatatcagcgttgtgcgttccttgcagaactcactggcgcgacgcacagccatgacgtcgggcaagcgacgggaacttcatgcgctggaagagaatttggccatcatcagcaacagtgaacctgcgcaactgctggaagaggaacgtctgcgcaaagaaattgcagaattacgtgccaaaattgaacgcgtcccttttattgacaccttcgatttacgttacaagaactacgagaagcggcccgatccctccagccaggcagtgatgttttgcctgatggacgtttccggttcaatggatcaatccactaaagatatggctaagcgtttttatattctgctgtatctgttcctcagcagaacgtataagaacgtggaagtcgtatacatccgccatcatacccaagcgaaagaagtcgatgaacatgagtttttctactcgcaggaaacaggcggcaccattgtttccagcgccctgaaactgatggatgaggtagtgaaagagcgttataacccggcacagtggaatatttacgctgcacaagcatcggacggcgataactgggccgatgactctccgctttgccatgaaatcctggcgaaaaaattattacctgttgttcgttattacagctatatcgaaattacccgtcgtgcacatcagacattgtggcgagaatatgagcatctgcaatctactttcgacaactttgcgatgcagcacatccgcgaccaggatgatatttatccggtgttccgtgaactgtttcataaacaaaatgcaacagctaaagactaa

SEQ ID NO: 460541 - DNA, 1476 bp, Shigella boydii
atgattcagtcaacacgtatttccatggggttattctttaaatattttttatcgttgacgaaaattgatcctggtcaaaactatatatctctgccatcaataaaatccagcactcacattgctctcctttttatggtttctatgggtacacaaaaattaaaagctcaaagcttttttattttcagtttattgctgacattaattttattttgcattactaccttatataacgaaaacacaaatgtaaaactcatcccacagatgaattacctgatggttgttgtggctttgtttttccttaacgccgtcatttttcttttcatgttaatgaaatatttcactaacaaacaaattttaccaacactcattttaagccttgcattcttaagtggccttatctatttagttgaaaccattgtaattatccataaaccaattaacggcagtacactgatccagacaaagtcgaatgatgtttctattttctatattttccgccaactcagttttatttgtttaacctcgctggcactcttttgttatggaaaagacaacatccttgacaacaataagaaaaaaacgggaatcctgttgctggcgttgattccttttttagtttttccccttctggcacacaatctgagcagttataacgctgactattctttgtatgtcgtcgactactgtccggacaaccatactgcgaccaggggaatcaactatacaaaaatattggtttgtctgtgggcatttttactgttctttattatcatgcgtacacgattagccagcgaactatggccgttaatagcattattatgtctggcatcgctatgctgcaacttacttctactgactctggatgagtataattacaccatctggtatatcagtcgcgggattgaagtttccagtaaactgtttgttgtgtcttttctgatttataacatttttcaggagctgcaactctccagcaaactggcagttcatgatgtgctgaccaatatttataatcggcgctactttttcaacagcgtagagtcattattgtcgcgacctgttgttaaggacttctgtgtcatgctggttgatattaatcagttcaaacgcatcaatgcccaatggggacatcgtgtgggtgataaagtgctggtttcaattgtcgatattatccagcaaagcatccgccctgatgatattttagcgcgactggagggtgaggtgtttggcttgctatttaccgaactcaatagtgcccaggcaaaaatcattgcggatcgtatacgtaaaaatgtcgaactcctgaccggctttagtaacagatatgatgttcctgaacaaatgaccatcagtattggcacggttttttcaacgggtgacacgcgtaatatctcgcttgtcatgacggaagcagataaagccttacgcgaagcgaaaagcgaggggggcaacaaagtgattattcatcatatttaa

SEQ ID NO: 460542 - DNA, 420 bp, Shigella boydii
atgaaattgcaccatagaatgctccggcattttatcgccgcaagtgtcattgtgctgacatcttccttccttatttttgaacttgtcgccagcgacagagcaatgagtgcctatctgcgctatatcgtgcagaaagcagactcctcctttctttatgataagtatcagaatcagagtattgccgcgcatgtgatgcgcgctctcgctgctgagctgtcggaagtgtcgccagaacagcggcgcgccatctgcgaggcttttgagtctgccaataatacccatggcttaaacctgactgctcataaatacccgggcttacgcggcacactacaaaccgcatccactgactgcgacacaattgtggaagctgcagcactattacccgcttttgatcaggcagtggaaggcaaccgccactag

SEQ ID NO: 460543 - DNA, 396 bp, Shigella boydii
atggccgaagagaaatttcactattatctcgatctcaatgaccgctatgtctatttttatgagccggttaatgttgaatactttgcgatgaataactggtccttcctgcagtcaggaagtattggtatcgatcgcaaagatattgaaaaggtatttaccgggcgtaccgtattgtcgagcatttaccaggatcagcgtactaaacagaacgtgatgagtttgctgacgccggtgtatgttgcagggcagctaaaagggattgtgctgctggatattaacaaaaacaatttgcggaatatcttttacacttggatttgcccctatatttccagacatctgttatcacttaacccattacaagcccgctgccgcagatattcccgtggcgagcgataa

SEQ ID NO: 460544 - DNA, 2334 bp, Shigella boydii
atgaatggtaccgcagaatactcagtattaaatgacggttatcaaattgttcaaatgggtggcgcggcaaaccagactaccctcaataatggtgtgctacaggtttatggcgcagcgaatgatcccacgattaaaggcgggcgcttaatcgttgaaaaagatgggattaccgtccttgccgctatcgaaaagggaggattactggaggttaaagaggggggattagcgattgcggtagatcagaaagcaggcggtgctattaaagcaagcacgcgggtcatggaggcattcggaacaaaccgtctcggtcagttcgaaatcaagaatggtattgctaacaatatgctgttggaaaacggcggaagtttgcgagttgaagaaaatgacttcgcttataatactactgtagatagtggcggcttactggaggttatggatggcgggactgcaactggcgttgataaaaaagcaggcggaaaattaattgtctcaacgaatgcgctggaagtgagtggtacaaacagtaaaggccaatttagtataaaagatggtgtgtcaaaaaattatgaactggatgatggttccgggctcattgttatggaggacacgcaggccattgatactatccttgatgagcatgccactatgcaatcgctgggaaaggatactggtacgaaagtgcaggcaaatgcggtatatgatctcggtcgatcagaccagaatggaagtatcacgtattcctctaaagccatctctgaaaatatggttatcaacaatggccgcgctaatgtctgggctggcacaatggttaacgtgtcagtcagagggaatgatggcattcttgaggtcatgaagccgcaaataaattatgcacccgctatgttggtgggtaaggtagtggtttctgagggcgcttcttttagaacgcatggtgccgtggataccagcaaagcggacgtttcgctcgaaaatagcgtatgggccatcattgccgatatcactacgacgaaccaaaacaccctcctcaacttagccaaccttgcgatgtctgacgcaaatgtgattatgatggatgagccagtgactcgttcatcagtgacggcaagtgcggaaaatttcattacgttgaccaccaataccctgtcgggaaacggcaatttttatatgcgtaccgatatggctaatcatcagagcgatcagctcaacgtcaccggtcaggcaacaggtgatttcaaaatattcgtgacggacaccggtgccagcccggcagcaggagatagccttacactggtaacaacgggcggcggtgatgctgcatttacgttgggcaatgccggaggcgttgttgatatcggtacgtatgaatataccttgctggataatggcaaccatagctggagtttggcagagaatcgcgcgcaaattaccccttcaaccactgatgtgctgaatatggcggccgcacaaccgctggtatttgatgcagaactggacaccgtgcgtgagcgtcttggtagcgtaaaaagcgttagttacgatacggcgatgtggagttcggcaattaacacccgcaacaacgtgaccactgatgcgggagctggttttgagcaaacattgacgggcctgacgctcggtatcgatagccgtttctcccgtgaagaaagcagtacaattcgcggcttgttctttggttactctcattctgatattggttttgatcgcggcggaaaaggtaatatcgatagctataccctgggggcttatgccggttgggagcatcagaacggtgcctatgttgatggggtggtgaaagttgaccgttttgccaacaccatccatggcaagatgagtaatggggcaacagcgtttggcgattacaatagtaacggcgcgggtgctcatgttgagagcgggttccgttgggttgacggattgtggagtgttagaccctatctggcctttaccggctttaccacagatggtcaggactacacgttatcaaacggcatgcgcgctgatgtgggaaatacccggatattacgcgctgaagcgggaacggcggtaagctatcacatggacctgcaaaatggtacgacgctggaaccctggctgaaagccgccgtacgtcaggaatacgccgattctaaccatgtgaaagttaatgacgatggcaaatttaataatgatgtggctggaacccctggcgtttatcaggctgggataaggtcatcgtttaccccgacgttaagcggtcatttgtcagtcagctatggcaatggcgcaggggtagaatcgccgtggaatactcaggcgggagtggtctggacgttctga

SEQ ID NO: 460545 - DNA, 201 bp, Shigella boydii; identical to SEQ ID NO: 29496

SEQ ID NO: 460546 - DNA, 285 bp, Shigella boydii; identical to SEQ ID NO: 29497

SEQ ID NO: 460547 - DNA, 534 bp, Shigella boydii; identical to SEQ ID NO: 29498

SEQ ID NO: 460548 - DNA, 426 bp, Shigella boydii
atgacggcacaaatatcagcttacgggcggctggtagctgacccgcagttaaagaccaccagcaagggaacaccaatggcgctggtgagtatggctgttcccattccgtgcaatcaggcagatgacggacaggcgacgatgtggttatccgtcctggcatttggcagacaggccgacgcactggcaaatcaccacaaaggcgaactggtgagcgtggcgggtaacatgcagataagccagtggacagaccagaacggggaaatgcggcaaggctggcaggtcatcgcagacagcgtaatcagtgcgcgaaccgtgcgaccaggaggcaggaaaggacagcaagggcaggctactgacgcactgaacagggcaaagcagcatacgggccagcaagatgacccgtatgaggacgaaataccattttaa

SEQ ID NO: 460549 - DNA, 2136 bp, Shigella boydii
atgaaacgtgcaccgaatttaaagcatcagccagccgacaaaatgacggaggttatcatttttgcgggtagtgatgcctgggcacatgcgaagcagtggcaggagatggacgggcgacttgctggcgataacgtgcctcctgtctggcttggagatcagcaactggcagaactggaaaatctgaacatcattgacgacgggcgctattgtgtccggctgtacaaggcagggcacatcaagccatcaaacatcaataccattgcgcaaaagctggcggcggcaggcatacgggatgcgaattattaccccgacgggatgcacagccagaagcgggagaactggcgcgaatatctggaacgtgagcgccaaaacatcgatgacgggctggctatccggcttccgacaaaagaaaacgccaccggaagtcatggcgatgatgaattaaagccccgcgttgaaagccgcgcagatggtgttttctgggtaacacccaaagtggacaagcagacaggcgagataatcagacctgaaacgtggttatgttccccgcttgaactactgggaacggggacgatcggcagggagcatcaccgcgtgatgcgctggaaaaaaacggcaaatcatgaagtcatcacgatggcggttccgtgcggtggcattggcgaccgtgacggctggcggttgttgaaagaccacggccttaacgtgacaaccaacggcaaatacagagcaatactggctgactggatgcagttaagcggaaaccatgaggaatggcagttaagcacaacaacggggtggcattttggcgcgtacatcatgccggacggttcagtcattggtgagtctgaaaaaccgatcctgtttaccggaaaaacggctgccgttaatggttattccgtagcaggaacgacggagggctggcgcgatacagtggcgcggttggctggtggcaatccgtccatgatgctgggggtggcggtatcgttatcagcgccattaatcgggctggtgggcgctgacggtttcggtgtgcatcttttcgaacaatcatcggcaggtaagaccaccacgcagaacatcgcatccagtttgtggggagagccggacgcacaacggctgacctggtacggaacggcgttaggtatcgccaacgaggccgaagcacacaatgacgggctgttacccctggatgaaataggccaagccggaaacgcacgggaggtgtccacgtcggcttatacgctgtttaacggttcgggaaaattacagggggcgaaggacggcggcaacagggagataaaacactggcgaacagtggcaatcagtaccggagaaatggacgttgaaacattcctcaaaagtgaggggataaaagtcaaagcggggcagcttgtccggttgcttaacgtgccgatggagaagtccacgcagtttcacgaatacagcacaggaaaggcgcacgcagacgcgttaaaggatgcctggacagcaaatcacggggcggcaggtcgtgagtggattaaatggctagcagcccaccagcagaaggctaaggacacggtaagggcatgccgtgaacggtggcgcaacctgataccggagagctacggcgaacaggttcaccgtgtaggggaacgattcgccatactggaggccgcgcttgtgctgtcaggcaatgttacgggctgggatgttcaggcgtgccgtgatgccattcagcataactttaatgcctgggtgaaggagttcggcacgggtaacaaggaacacaggcagattattgaacaggcagaggcgtttcttgctgcctacggcatgagcaggtttgcgcctgtcaattatgaccctgcaagcctgccgatttcagaactgtacggctacagggaaagcgacgggcgttacggtgagtctgttttgttttacgtcctgccggagccatttaaatcgcatgtggcgaagggatttaacaaggatgccgtagcaagagtccttcacgaagctggaatgctgaaaaagccagccagcggggaaggatggcaaatcagaacaccacgccttaaacacatgaagggggcacgactaagggtgtacggccttttacttgcacaggatcatgatgatgaaggtggttaa

SEQ ID NO: 460550 - DNA, 300 bp, Shigella boydii
atgaaagtaaaaaattctggctttactgccagcggccccgttcggcctgaaatccacaccggcgatattttcttcgataaatacggctggatggtaaaggtaataagcgtggaggaacggcgcatcacctgccgtcgtgaaggatataactacgactgtgtaacgcctgtatatcagttccggcgtgatttctccctgatgaaggccgcgccccgcagtaaacctactagcagggaaaaagagcggggaaatatccagaaaatgaaaagcatgattaacacattcaggggcaagaaatga

SEQ ID NO: 460551 - DNA, 186 bp, Shigella boydii
atgcttaagcgattccagataaccgcacgcgctgtaaatcatcaaggccacgttattgatattcggcaaaacgtgaacgccaccagcgttaatgcagctatagcaatattgaaagaagagttaatcggctgtgggttcacgcaggtgatgatccgtgccgtagttgaagtgtcgactgttcattaa

SEQ ID NO: 460552 - DNA, 189 bp, Shigella boydii; identical to SEQ ID NO: 29503

SEQ ID NO: 460553 - DNA, 192 bp, Shigella boydii; identical to SEQ ID NO: 29504

SEQ ID NO: 460554 - DNA, 666 bp, Shigella boydii
gtgcaaattggtctgtggttaagctcgactacttcttatatggcagaaattgccgctacttccggttatgactggttgctgattgacggggagcacgcgccaaacaccattcaggatctttatcaccagctacaggcggtagcgccctatgccagccaacccgtgatccgtccggtggaaggcagtaaatcgctgattaaacaagttctggatattggcgcgcaaactctattgatcccgatggtcgatactgccgatcaggctcgtcaggtggcgtctgccacgcgctatcctccctacggtgagcgtggtgttggggccagtgtggcacgggctgcgcgctggggacgcattgagaattacatggcgcaagtcaacgattcgctttgtctgttagtgcaggtggaaagtaaaacggcactggataacctggacgagatcctcgacgtcgaagggattgatggcgtgtttattggaccagcggatctttctgcgtcgttgggctacccggataacgccgggcacccggaagtgcagcgaattattgaaaccagcattcggcggatccgtgctgcgggtaaagcggctggttttctggctgtggctcctgatatggcgcagcaatgcctggcgtggggagcgaactttgtcgctgttggcggttga

SEQ ID NO: 460555 - DNA, 903 bp, Shigella boydii
atgaccgaatcaacaacctcctccccgcatgatgcggtatttaaaacctttatgttcacacccgaaaccgcacgggattttctcgaaatacatttaccagaaccactgcgcaagctttgcaacctgcaaaccttacgcctggaacccactagttttattgaaaaaagtttacgcgcttactactcggatgttttgtggtccgtggaaaccagcgacggtgacggctatatctactgcgtgattgaacatcaaagctctgcagaaaagaatatggcttttcggctaatgcgctatgccactgccgccatgcagcgtcacctggataaaggctatgacagagttccgctggtggtgccattgctgttttatcatggcgaaacatcgccctacccgtactcacttaactggctggatgagtttgacgatccgcaacttgcccggcagttgtacaccgaagcttttccgttggtggatatcaccatcgtacctgacgatgagatcatgcaacatcggcgtatagctctgctggaactgattcaaaagcatattcgcgaccgcgatttaatcggcatggtcgacaggatcaccacgcttttggttagaggcttcactaatgacagccagctacaaacactgtttaattatctgctgcaatgcggcgatacctcccgtttcacccgttttattgaggagattgccgaacgttcaccactacaaaaggagagattaatgactattgctgaacggctacggcaggaagggcatcaaattggctggcaggaaggtatgcatgaacaagccattaaaattgctttgcgcatgctggaacagggcattgatcgtgaccaggtgctcgcggccacccagctaagcgaagccgatctggcagcgaataaccactaa

SEQ ID NO: 460556 - DNA, 1191 bp, Shigella boydii
atgaacgacaccagcttcgaaaactgcattaagtgcaccgtctgcaccaccgcctgcccggtgagccgggtgaatcccggttatccagggccaaaacaagccgggccggatggcgagcgtctgcgtttgaaagatggcgcactgtatgacgaggcgctgaaatattgcatcaactgcaaacgttgtgaagtcgcctgcccgtccgatgtgaagattggcgatattatccagcgcgcgcgggcaaaatatgacaccacgcgcccgtcgctgcgtaattttgtgttgagtcataccgacctgatgggtagcgtttccacgccgttcgcaccaatcgtcaacaccgctacctcgctgaaaccggtgcggcagctgcttgatgcggcgttaaaaatcgatcatcgtcgcacgctaccgaaatactccttcggcacgttccgtcgctggtatcgcagcatagcggctcagcaagcacaatataaagaccaggtcgctttctttcacggctgcttcgttaactacaaccatccgcagttaggtaaagatttaattaaagtgctcaacgcaatgggtaccggtgtacaactgctcagcaaagaaaaatgctgcggcgtaccgctaatcgccaacggctttaccgataaagcacgcaaacaggcaattacgaatgtagagtcgatccgcgaagctgtgggagtaaaaggcattccggtgattgccacctcctcaacctgtacatttgccctgcgcgacgaatacccggaagtgctgaatgtcgacaacaaaggcttgcgcgatcatatcgaactggcaacccgctggctgtggcgcaagctggacgaaggcaaaacgttaccgctgaaaccgctgccgctgaaagtggtttatcacactccgtgccatatggaaaaaatgggctggacgctctacaccctggagctgttgcgtaaaatcccggggcttgagttaacggtgctggattcccagtgctgcggtattgcgggtacttacggtttcaaaaaagagaactaccccacctcacaagccatcggcgcaccactgttccgccagatagaagaaagcggcgcagatctggtggtcaccgactgcgaaacctgtaaatggcagattgagatgtccacaagtcttcgctgcgaacatccgattacgctactggcccaggcgctggcttaa

SEQ ID NO: 460557 - DNA, 1260 bp, Shigella boydii
atgcgctttgatactgtcattatgggcggcggcctcgccggattactctgtggcctgcaactgcaaaaacacggcctgcgctgtgccattgtcacgcgtggtcaaagcgcgttgcatttctcatccggttcgctggatttgctgagccatctgccagatggtcaacccgtggcagacattcacagtggactggaatctttgcgtcagcaggcacctgcacatccttactctcttctcgggccacaacgcgtgctcgatctcgcttgccaggcgcaggcattaatcgctgaaagcggtgcgcaattgcagggcagcgtagaactggctcaccagcggattacgccgctcggcactctgcgctctacctggctaagttcgccagaagtccccgtctggccgttgcccgcgaagaaaatatgtgtggtcgggataagcggcctgatggattttcaggcgcatcttgcggcggcttcgttgcgcgaactggatctttcggttgaaaccgcagaaatagagctgccggaactggatgtcctgcgcaataacgccaccgaatttcgcgctgtgaatatcgcccgtttccttgataatgaagaaaactggccgctgttacttgatgcgcttattcctgtcgccaatacctgcgaaatgatcctgatgcctgcctgcttcggcctggccgatgacaaactgtggcgttggttgaatgaaaaactaccttgttcactgatgcttttgccaacgctgccgccttccgtgctgggcattcgtctgcaaaaccagttacagcgccagtttgtgcgccagggtggcgtgtggatgccgggcgatgaagtgaaaaaagtgacctgtaaaaatggcgtagtgaatgaaatctggacccgcaatcacgccgatattccgctacgtccacatttcgcggttctcgccagcggcagtttctttagtggcggactggtagcggaacgtaacggcattcgcgagccgattctcggccttgatgtgctacaaaccgccacgcggggtgaatggtataagggcgatttttttgcgccgcaaccgtggcagcagttcggtgtaaccactgatgagacgctacgcccgtcgcaggcagggcaaaccattgagaacctgtttgccatcggttcggtgctgggcggatttgatcccatcgcccagggatgcggcggcggtgtttgtgccgtcagtgctttacatgccgctcaacagattgcccaacgcgcaggaggccaacaatga

SEQ ID NO: 460558 - DNA, 1629 bp, Shigella boydii
atgaaaactcgcgactcgcaatcaagtgacgtgattatcattggcggcggcgcaacgggagccgggattgcccgcgactgtgccctgcgcgggctgcgcgtgattttggttgagcgccacgacatcgcaaccggtgccaccgggcgtaaccacggcctgctgcacagcggtgcgcgctatgcggtaaccgatgcggaatcggcccgcgaatgcattagtgaaaaccagatcctgaaacgcattgcacgtcactgcgttgaaccaaccaacggcctgtttatcaccctgccggaagatgacctctcattccaggccacttttattcgcgcctgcgaagaagcagggatcagcgcagaagctatagacccgcagcaagcgcgcattatcgaacctgccgttaacccggcactgattggcgcggtgaaagttccggatggcaccgttgatccatttcgtctgaccgcagcaaacatgctggatgccaaagaacacggtgccgttatccttaccgctcatgaagtcacggggctgattcgtgaaggcgcgacggtgtgcggtgttcgtgtacgtaaccatctcaccggcgaaactcaggcccttcatgcacctgtcgtggttaatgccgctgggatctgggggcaacacattgccgaatatgccgatctgcgcattcgcatgttcccggcgaaaggatcgctgctgatcatggatcaccgcattaaccagcatgtgatcaaccgctgccgtaaaccttccgacgccgatattctggtgcctggcgataccatttcgctgattggtaccacctctttacgtattgattacaacgagattgacgataatcgagtgacggcagaagaggttgatattctgctgcgtgaaggggaaaaactggcccccgtgatggcgaaaacgcgcattttgcgggcctattctggcgtgcgcccgctggttgccagcgatgacgatccgagcggacgtaacgtcagccgtggcatcgtgctgctcgaccatgctgaacgcgatggtctggacggatttatcaccatcaccggtggcaaactgatgacctatcggctgatggctgaatgggctaccgacgcggtatgccgcaaactgggcaacacgcgcccctgtacgactgccgatctggcactgcctggttcacaagaacccgctgaagttaccttgcgtaaagtcatctccctgcctgccccgctgcgcggttctgcggtttatcgtcatggcgatcgcacgcctgcctggctgagcgaaggccgtctgcaccgtagcctggtatgtgagtgcgaagcggtaactgcgggtgaagtgcagtacgcggtagaaaatttaaacgttaatagcctgctggatttacgccgtcgtacccgtgtggggatgggcacctgccagggcgaactctgcgcctgccgcgctgccggactgctgcaacggtttaacgtcacgacgtccgcgcaatctatcgagcaactttccaccttccttaacgaacgctggaaaggcgtgcaacccatcgcctggggagacgcactgcgcgaaagcgaatttacccgctgggtttatcagggactgtgtggtctggagaaggagcagaaagatgcgctttga

SEQ ID NO: 460559 - DNA, 1359 bp, Shigella boydii
atgttgagtatttttaaaccagcgccacacaaagcgcgcttacctgctgcggagatcgatccgacttatcgtcgattgcgctggcaaattttcttggggatattctttggctatgcggcttactatttggttcgtaagaactttgcgcttgctatgccttatctggtcgagcagggattctctcgcggtgatttaggtttcgcgctttcggggatctcgatcgcttatggattttcgaaattcataatgggttcggtatcagatcgctcgaatccgcgcgttttcctccccgcaggtttgattctggcggcggcagtgatgttgtttatgggctttgtgccatgggcgacgtcgagcattgcggtgatgtttgtacttttgttcctctgcggttggttccaggggatggggtggccgccgtgtggtcgtactatggtgcactggtggtcgcagaaagaacgtggcggcattgtgtcagtgtggaactgtgcgcacaacgttggtggtggtattccgccgctgctgttcctgctggggatggcctggttcaatgactggcatgcggcgctctatatgcctgctttctgcgccattctggtggcattattcgcctttgcgatgatgcgcgataccccgcaatcctgtggcttgccgccgatcgaagagtacaaaaatgattatccggacgactataacgaaaaagcggaacaggagctgacggcgaagcaaatcttcatgcagtacgtactgccgaacaaactgctgtggtatatcgccatcgccaacgtgttcgtttatctgctgcgttacggcatcctcgactggtcaccgacttatctgaaagaggttaagcatttcgcgctggataaatcctcctgggcctacttcctttatgaatatgcaggtattccgggcactctgctgtgcggctggatgtcggataaagtcttccgtggcaaccgtggggcaaccggcgttttctttatgacactggtgactatcgcgactatcgtttactggatgaatccggcaggtaacccaaccgtcgatatgatttgtatgattgttatcggcttcctgatctacggtcctgtgatgctgatcggtctgcatgcgctggaactggcaccgaaaaaagcggcaggtacggcagcgggctttaccgggctgtttggttacctgggcggttcggtggcggcgagcgcgattgttggctacaccgtggacttcttcggctgggatggcggctttatggtaatgattggcggcagcattctggcggttatcttgttgattgttgtgatgattggcgaaaaacgtcgccatgaacaattactacaaaaacgcaacggaggctaa

SEQ ID NO: 460560 - DNA, 1077 bp, Shigella boydii
atgaaattgacgctgaaaaaccttagcatggcgatcatgatgagcactatagtcatgggaagcagtgcaatggcggcggacagcaacgaaaaaatagtcatcgcccatcgcggtgccagtggatatttgccggagcatacgctgccagcaaaagcgatggcgtatgcgcagggagcggattatctggaacaggatttggtgatgaccaaagacgaccatctggttgttctgcatgaccattatctcgatcgtgttactgatgttgccgatcgtttcccggatcgggcgcgcaaagacggtcgttactacgcgatagatttcacgctggatgaaattaagtcgttgaaatttaccgaaggtttcgatattgaaaacggtaaaaaagtgcagacttatccggggcgtttcccaatgggtaagtccgacttccgggtgcacacctttgaagaagagattgaatttgttcaggggttaaatcactctaccgggaaaaatatcggtatttatccagaaatcaaagcgccgtggttccatcatcaggaagggaaggatattgcggcaaaaacgctggaagtgctgaagaaatatggttacaccggtaaagacgataaagtttatttgcaatgttttgatgctgatgagctgaagcgtattaagaatgagctggaacccaaaatgggcatggagctcaatctggtacagctgattgcctataccgactggaatgaaacgcagcagaaacagccggatggaagctgggttaattacaactacgactggatgtttaagccgggtgccatgaaacaggtggcggaatatgcagatggtattggtccggattaccatatgttgattgaggagacatcgcagccgggtaatatcaaactcactggcatggtgcaagatgctcagcagaataaactggtagtgcatccttataccgtgcggtcagataaactgcctgaatacactcctgatgtgaatcagttatatgatgctctgtataacaaagcgggtgtaaatgggctgtttactgatttccctgataaggcagtaaaatttcttaataaagagtaa

SEQ ID NO: 460561 - DNA, 207 bp, Shigella boydii
atgaattttattcgacagggattaggcatcgccttacaaccagagttaacgctgaaaagcattgcaggtgaattgtgttccgttcctctcgaaccaactttctatcgacagatttcgttgctggctaaagaaaagccggtagaaggcagtccactgtttttactacaaatgtgcatggaacaattagtggcgattggaaaaatttga

SEQ ID NO: 460562 - DNA, 327 bp, Shigella boydii
atgagtgattccaacagccgtctggtctactcaacggaaaccggacgtattgatgagccaaaagcggccccagtacgccctaaaggcgatggtgtggtgcgtattcagcgtcagaccagtggacgtaaaggtaagggcgtttgcctgattaccggtatcgatctcgatgatgccgaactgacaaaacttgcagcggaactgaagaaaaaatgcggctgcggcggagcagttaaagatggagttattgaaatccagggcgataagcgtgatttattaaaatcactacttgaagcgaaagggatgaaggtaaaactcgcaggcggttaa

SEQ ID NO: 460563 - DNA, 798 bp, Shigella boydii
atgctcgccgtttacctgtttcgcgccacttccggtgcccatcatcaagaaggtctggtcatgacgttaactgcttcatctttttcccgcgctgttacgaattctcctgtggttgttgcccttgattatcataatcgtgatgacgcgctgtcctttgtcgacaagatcgacccacgcgattgtcgtctgaaggtcggcaaagagatgtttacattgtttgggccacagtttgtgcgcgaacttcaacagcgtggttttgatatctttcttgacctgaaattccacgatattcctaacactgcagcgcacgctgtcgctgctgcagctgacttaggcgtgtggatggtgaatgttcatgcctctggtggggcgcgtatgatgaccgcagcgcgtgaggcactggttccgtttggcaaagatgcaccgcttttgattgctgtaacagtgttgaccagcatggaagctagcgacctggccgatcttggcgtgacactgtcacctgcagattatgcagaacgtctggcggcactgacgcaaaaatgtggccttgatggtgtggtgtgttctgctcaggaagctgtgcgctttaaacaggtattcggtcaggagttcaaactggttacaccgggcattcgtccgcaggggagtgatgctggtgaccagcgccgcattatgacgccagaacaggcgttggcggctggtgttgattatatggcgattggtcgcccggtaacgcaatcggtagatccagcgcaaacactgaaagcgatcaacgcctctttacagcggagtgcatga

SEQ ID NO: 460564 - DNA, 1170 bp, Shigella boydii
atgctggagttgttgtttctgcttttgcctgtagccgctgcctatggctggtatatgggccgcagaagtgcgcaacaaaacaagcaagatgaagccaaccgcttgtcgcgtgattacgtagcgggggttaacttcctgcttagtaatcaacaggataaagcggtagacctgtttctcgatatgcttaaagaggatacaggcaccgttgaagcccaccttacgctcggaaacctgttccgttcgcgtggcgaagttgatcgcgctattcgcatccatcagaccctaatggaaagcgcctcgctgacctatgaacagcgtctgttggcgattcaacaactagggcgtgattacatggccgccgggttatacgaccgcgcggaagacatgttcaatcagctgaccgatgaaactgacttccgcattggcgctctgcaacagttgctacaaatctaccaggctaccagtgagtggcagaaagcaattgatgttgccgaacgcctggtgaagctgggtaaagataaacagcgcgtcgaaattgcccatttctactgtgagttagccctgcagcatatggccagcgacgatctcgatcgtgccatgaccttgctaaaaaaaggggcggcggcagataaaaacagcgcccgcgtatccatcatgatgggacgcgtgtttatggcgaaaggagaatacgccaaagccgtcgaaagtttgcaacgcgtgatatcccaggacagagaactggtcagcgaaacgctggaaatgttgcaaacctgctatcagcagttgggtaaaactgccgaatgggcagaattcctgcaacgcgcggtggaagagaacaccggtgccgatgctgaattgatgcttgctgatatcatcgaagcgcgcgacggtagtgaggccgcacaggtctatattacgcgccagcttcagcgtcatccgaccatgcgtgtgttccataagttaatggattaccacttaaatgaagcggaagaagggcgtgccaaagagagcctgatggtgctgcgtgacatggttggcgaaaaggtacgtagtaagcctcgttatcgctgccagaaatgtggttttaccgcatacaccctctactggcattgtccgtcttgtcgggcctggtcaaccattaaaccgattcgcggtcttgatggcctgtaa

SEQ ID NO: 460565 - DNA, 309 bp, Shigella boydii
gtgaaatatttactcattttcttactggtgttagcgatcttcgtgatttcggtcacgttgggtgcgcagaacgatcaacaggtgacgtttaattatctgttagcgcaaggggagtaccgtatttccacattgctggcggtattgtttgctgcggggtttgctatcggttggttgatttgtggcctgttctggctgcgagttcgtgtttccctggcgcgcgctgaacgtaaaataaagcgactggaaaaccagctttcacccgcgactgacgtggctgtagtgccgcactcgtcagcggcgaaggaataa

SEQ ID NO: 460566 - DNA, 765 bp, Shigella boydii
atgcgttcgattgccagacgtaccgcagtgggagctgcactattgcttgtcatgccagtagccgtatggatttctggctggcgttggcaacctggagaacaaagttggctactaaaagcggctttttgggttactgaaactgtcacccagccctggggcgtcattacacatttgattttattcggctggtttctctggtgtctgcgttttcgcattaaggctgcctttgtattatttgccattctggcggccgcaatccttgtgggacaaggcgttaaatcctggatcaaagacaaagtccaggaaccacgaccttttgttatctggctggaaaaaacacatcatattccggttgatgagttctacactttaaagcgagcagaacgcggaaatctagtgaaagaacagttggctgaagagaaaaatatcccacaatatttgcgttcacactggcagaaagagacggggtttgcctttccttccggtcacacgatgtttgctgccagttgggcactgctggccgttggtttgctgtggccgcgtcggcgaacgttaaccattgctatcttgctggtctgggcaacgggagtcatgggaagccgcctgctgctcgggatgcattggccacgcgatctggtagtagctacgttgatttcgtgggcgctggtggcggtggcaacgtggcttgcgcaacgaatttgtgggccattaacaccacctgcggaagaaaatcgcgaaatagcgcaacgagaacaagaaagttaa

SEQ ID NO: 460567 - DNA, 591 bp, Shigella boydii
atgcagcttaaacgtgtggcagaagccaaactgccaaccccatggggcgatttcctgatggtgggatttgaagaactggcaaccggacacgatcatgtcgcgctagtctatggcgatatttccgggcataccccggtacttgcgcgcgtccattccgaatgtctgaccggtgacgccctgttcagcttgcgctgcgattgtggcttccagctcgaagcggcattgacgcaaattgccgaggaaggccgtggtattttgctgtatcaccgtcaggaaggtcgtaacattggtctgctgaataaaatccgcgcttacgcactgcaggatcaaggttacgataccgtagaggctaaccaccagttaggcttcgccgctgatgagcgcgacttcactctttgcgctgatatgttcaaactccttggcgtcaatgaagtccgcttgttaaccaataacccgaaaaaagtcgaaattctgaccgaagcagggattaatattgttgaacgcgtaccattgattgtaggtcgtaaccccaataacgaacattatctcgataccaaagccgagaaaatgggtcatttgctgaacaaataa

SEQ ID NO: 460568 - DNA, 1092 bp, Shigella boydii
gtgctgtccggcaaccgtaactttgaaggccgtatccatccgctggttaaaactaactggctggcctcgccgccgctggtggttgcctatgcgctggcgggaaatatgaatatcaacctggctgctgagcctattggtcatgatcgtaaaggcgacccggtttatctgaaagatatctggccatcggcacaagaaattgcccgtgcggtagaacaagtctccacagaaatgttccgtaaagagtacgcagaagtttttgaaggcacagcagagtggaaggaaattaacgtcacacgatccgatacctacggttggcaggaggattcaacctatattcgcttatcgcctttctttgatgaaatgcaggcaacaccagcacctgtggaagatattcacggtgcgcggatcctcgcaatgctgggggattcagtcaccactgaccatatctctccggcgggcagtattaagcccgacagcccggcgggtcgatatctacaaggtcggggtgttgagcgaaaagactttaactcctacggttcgcggcgtggtaaccatgaagtgatgatgcgcggcaccttcgccaatattcgcatccgtaatgaaatggtgcctggcgttgaaggggggatgacgcggcatttacctgacagcgatgttgtctctatctatgatgccgcgatgcgctataagcaggagcaaacgccgctggcggtgattgccgggaaagagtatggatcaggctccagccgtgactggacggcaaaaggtccgcgtctgcttggtattcgtgtggtgattgccgaatcgtttgaacgaattcaccgttcgaatttaattggcatgggcatcttgccgctggaatttccgcaaggcgtgacgcgtaaaacgttagggctaaccggggaagagaagattgatattggcgacctgcaaaatctacaacccggcgcgacggttccggtgacgcttacgcgcgcggatggtagccaggaagtcgtaccctgccgttgtcgtatcgacaccgcgacggagttgacctactaccagaacgacggcattttgcattatgtcattcgtaatatgctgaagtaa

SEQ ID NO: 460569 - DNA, 168 bp, Shigella boydii; identical to SEQ ID NO: 261839

SEQ ID NO: 460570 - DNA, 129 bp, Shigella boydii; identical to SEQ ID NO: 261840

SEQ ID NO: 460571 - DNA, 975 bp, Shigella boydii
atgaaattacaacaacttcgctatattgttgaggtggtcaatcataacctgaatgtctcatcaacagcggaaggactttacacatcacaacccgggatcagtaaacaagtcagaatgctggaagacgagctaggcattcaaattttttcccgaagcggcaagcacctgacgcaggtaacgccagcagggcaagaaataattcgtatcgctcgcgaagtcctgtcgaaagtcgatgccataaaatcggttgccggagagcacacctggccggataaaggctcactgtatatcgccaccacgcatacccaggcacgctacgcattaccaaacgtcatcaaaggctttattgagcgttatcctcgcgtttctttgcatatgcaccagggctcgccgacacaaattgctgatgccgtctctaaaggcaatgccgatttcgctatcgccacagaagcgctgcatctgtatgaagatttagtgatgttaccgtgctaccactggaatcgggctattgtagtcactccggatcacccgctggcaggcaaaaaagccattaccattgaagaactggcgcaatatccgttggtgacatataccttcggctttaccggacgttcagaactggatactgcctttaaccgcgcagggttaacgccgcgtatcgttttcacggcaacggatgctgacgtcattaaaacttacgtccggttagggctgggggtaggggtcattgccagcatggcggtggatccggtcgccgatccggaccttgtgcgcgttgatgctcacgatatcttcagccacagtacaaccaaaattggttttcgccgtagtacttttttgcgcagttatatgtatgatttcattcagcgttttgcaccgcatttaacgcgtgatgtcgttgatgcggctgtcgcattgcgctctaatgaagaaattgaggtcatgtttaaagatataaaactgccggaaaaataa

SEQ ID NO: 460572 - DNA, 5703 bp, Shigella boydii
atggtagccgttcaggcacctacgttaagccagaaagattcctcggtatcgttaagtacccagacgttgagcgcggattcccattcaaccgccacactgacttttattgcgcatgatgcagcaggtaatcctgttatcgggctggtgctctcgacgcgtcacgaaggtgttcaggacatcaccctttctgactggaaagataatggtgacggaagctatacccagatcctgaccacaggtgcgatgtctggcacgctgacgcttatgccacagctgaacggtgtggatgcggctaaagcccccgccgtggtgaatatcatttctgtttcgtcatctcggactcactcgtcaattaagattgataaggaccgttatctctccggcaatcctatcgaggtaacggtagaactgagagatgaaaatgacaaacctgttaaggagcaaaaacagcaactgaataccgcagtcagcatcgacaatgtgaaacctggtgtcactacagactggaaagaaaccgcagatggcgtctataaggcaacctataccgcctataccaaaggcagtgggcttactgcgaagctattaatgcaaaactggaatgaagatttacataccgctggatttatcatcgacgccaacccgcagtcagcgaaaattgcgacattatctgccagcaataatggtgtgctcgccaatgagaatgcagcaaacaccgtctcggtcaatgtcgctgatgaaggaagcaacccaatcaatgatcataccgtcacgtttgcggtattaagcggatcggcaacttcctttaacaatcaaaacaccgcaaaaacggatgttaatggcctggcgactattgatctgaaaagtagtaagcaggaagacaacacggttgaagtcacccttgaaaatggcgtgaaacaaacgttaatcgtcagttttgtcggcgactcgagtaccgcacaggttgatctgcagaagtcgaaaaatgaagtggtcgctgacggcaatgacagcgccacaatgaccgcgacagttcgggatgcaaaaggcaacctgctcaatgacgtcaaggtcaccttcaatgttaattcagcagcagcgaaactgagccaaaccgaagtgaatagccacgacgggatcgccacagctacgctgaccagtttgaaaaatggtgattatacggttacggcctctgtgagctctggttctcaggctaatcaacaggtgaattttatcggtgatcaaagtactgcagccctgaccctcagtgtgccttcaggtgatatcaccgtcaccaacacagctccgcaacatatgactgcaaccttgcaggataaaaatggcaacccactaaaagataaagaaatcaccttctctatgccaaacgacgtcgcaagtcggttctcgattagcaacggcggaaaaggcatgacggatagtaacggggttgcaatcgcctccctgaccggcacgttagcgggcacgcatatgatcacggctcgtctggctaacagcaatgtcagcgatgcacagccaatgacgtttgtggcggataaagacagagcggttgtcgttctacaaacatcgaaagcggaaatcattgggaatggcgtggatgagacgaccctgacagcaacagtgaaagatccttttgataacgtggttaaaaatctgtcagtagtcttccgcacctcccccgcagacacgcaactgagtctgaacgcgcgtaatactaatgagaacggtattgctgaagttacccttaagggcacggttttgggtgttcatacagccgaagccatactgcttaacggcaacagagatacgaagatagtcaatattgcgcccgatgccagcaacgcgcaggtcaccctgaacatccctgcacaacaggtggtgacgaataacagcgacagcgtgcagctgacggcgacggtgaaagatccgtcgaatcatccggtggcgggaataacggtgaacttcaccataccacaggacgtggcggcaaactttacccttgaaaataacggtattgccatcactcaggctaatggcgaagcgcatgtcaccctcaaaggcaaaaaagcgggcacgcatacggttaccgcaacgctgggtaacaataatgccagcgatgcgcaaccagtcaccttcgtggcggataaggacagcgcggttgtcgttctgcaaacatcgaaagcggaaatcattgggaatggcgtggatgagacgactctgacggcaacagtgaaagatccttttgataacgcagtaaaagatctacaggtcaccttcagtaccaaccccgcagatactcaacttagtcagagcaaaagcaatactaacgacagtggtgtggccgaagttacctttaagggcacggttttgggtgttcatacagccgaagccacactgcctaacggcaacaacgatacgaagatagtcaatattgcgcccgatgccagcaacgcgcaggttacgctgaacatccctgctcaacaggtggtgacgaataacagcgacagcgtgcagctgacggcgacggtgaaagatccgtcgaatcatccggtggcgggaataacggtgaatttcaccatgccacaggacgtggcggcaaactttaccctcgaaaataacggtattgccatcacccaggccaatggggaagcgcatgtcacgctcaaaggtaaaaaagcgggtacgcatacggttaccgcaacgctgagtaataacaataccagtgattcacagccggtaacgtttgtggcggacaaaacctcggctctggttgttcttcagatatcaaaaaatgagatcacaggtaatggcgtagatagcgcaacgctaactgcaacagtcaaagatcagttcgacaatgaggtgaacaatcttccggtaacattcagcacagcttcttcaggcctcaccctgaccccaggggaaagtaataccaatgagtctggcatcgcgcaggccactctcgcaggcgttgcctttggtgagcagacggttactgcatcactggctaatactggtgccagcgacaacaaaactgtgcactttattggcgacacaacggcggcaaaaattatcgagttgacgcctgacccaggcagcataatcgccggtaccccacagaacagcaccggtagcgtaatcaccgctacagtcattgataataatggctttccggtgaaaggtgtgactgtgaacttcaccagcaacgcagcgacagccgaaatgacgaatggcggccaagccgtaacgaacgaacagggtaaggctaccgtcacttataccaatacccgctcctcgatagaatcaggagcgagaccggataccgttgaggccagtctggaaaatggtagctccacgcttagcacatcaattaatgtcaacgctgatgcgtctacggcacatctcaccttgttacagtcacttcttgatacagtctccgcaggcgacactaccaatctgtatattgaggtgaaggataattacggcaacggtgtaccccagcaggaggtaaccctcagcgtttcaccaagtgaaggcgtgactcccagtaataacgctatatatacgaccaatcacgacggtaatttttacgcaagctttaccgctacaaaagccggggtttatcaagtgacggcaaccctcgaaaatggcgattcgatacaacaaacagtgacctatgtgccgaacgtcgcgaatgccgaaatcacgctggcagcctcgaaggatccggtgattgccgacaataacgatctcacgacactaacagcaacagtcgctgatacagagggcaatgcgatagccaacactgaagtaacatttactctgccggaagatgtgaaggcgaacttcacgctgagcgatggcggtaaagcgattactgatgctgaaggcaaagcgaaagtcacgctgaaaggtacaaaagcaggcgctcatactgttacagcatcgatgactggcggtaagagtgagcagttggtggtgaactttattgcggatacgctcagtgcgcaggttaatcttaacgttaccgaggacaactttatcgccaataacgttgggatgaccacacttcaggcaacagtgactgatggaaacggcaacccgttagccaatgaggcggtgacattcacgctaccggcagacgtgagcgcaagcttcactctcggacaaggcggttccgccattactgatatcaacggcaaggctgaagttacactgagcggtacaaaatccggtacctaccccgtgacagttagcgtgaacaattatggtgtcagtgatacgaaacaggtgactttgattgccgatgctggtaccgcaacactagcctccttaacctctgtatactcattcgtcgtcagcacgaccgagggcgcgaccatgactgcaagcgtcactgacgctaacggcaacccggtagaaggcataaaagttaatttccgcggaacctccgtcacgctaagcagcaccagcgttgaaacggatgatcagggtttcgctgaaattcttgtgacaagcaccgaagtcggactgaaaacagtttcagcctctctgacagataaacctactgaagtcatatcgcgattactgaatgcaaaagcagatattaattctgcaacgattaccagtctggagatacctgaaggtcagctaatggtcgcacaagacgtagcagttaaagctcacgtcaacgaccagtttggcaacccgattcttaatgaatctgtaacattcagtgcagagccaccagagcacatgaccatcagccaaaatattgtctctactgatacgcatggtatagccgaggtctccatgacgcccgaaagaaacggttcgtatatggtgaaagcatccctggcgaatggagcctcacttgagaaacaactggaggctattgatgaaaaactgacactcacggcgtccagtccgcttatcggtgtctatgcccctacaggcactactctgacggcaacgctaacctctgcaaatggcactccagtggagggtcaggtcatcaactttagcgtaacgccagaaggggcgacgttaagtggcggaaaagtgagaactaactcttcaggtcaggctccggtcgttctgaccagcaataaagtcggtacatatacggtgactgcatcgttccataacggcgtaacaatacagacacagacaaccgtgaaagtcactggcaactcaagcaccgcacatgttgctagctttatcgctgatccatcgactatcgccgccaccaacagtgatttaagtaccttaaaggcaacggttgaggatggcagtggtaacctgatcgaaggtctcactgtgtacttcgccttaaaaagcggctctgccacattaacgtcattaacagcggtgaccgatcaaaacggaatcgcgacaacaagcgtgaaaggagcgatgacaggtagcgtcacggtaagcgcagtcacgaccgctggtggaatgcaaacagtagatataacgctggtggcaggcccggcagacgcctcgcagtccgtccttaagaaaaatcggtcctcactgaaaggggactttaccgatagtgctgagctacatcttgttttgcacgatatatcaggcaatccgatcaaagtttctgaagggatggaatttgtgcaatctgaaccgccccgggaatcctggagactaaactccctgagaaagaggtaa

SEQ ID NO: 460573 - DNA, 1584 bp, Shigella boydii
atgttagctcgttcagggaaggtaagcatggctacgaagaagagaagtggagaagaaataaatgaccgacaaatattatgcgggatgggaattaaactacgccgcttaactgcgggtatctgtctgataactcaacttgcgttccctatggctgcggcagcacaaggtgtggtaaacgccgcaacccaacaaccagttcctgcacaaattgccattgcaaatgccaatacggtgccctacacccttggagcgctggaatcggcccaaagcgttaccgaacgtttcggtatttcggtggctgagttacgcaaactcaaccagtttcgtacgtttgctcgaggttttaataatgtccgccagggtgatgaactggatgtcccggcacaagttagtgaaaaaaaattaaccccgccgccgggtaatagcagtgacaacctcgagcaacagatagccagtacttcacagcaaatcgggtctctgctcgccgaagatatgaacagcgagcaagcggcaaatatggcgcgtggatgggcctcttctcaggcttcaggcgcaatgacagactggttaagccgcttcggtaccgcaagaatcacgctgggcgtggatgaagattttagcctgaagaactcccagttcgattttctccatccgtggtatgaaacgcctgataatctctttttcagtcagcatactctccatcgtactgacgagcgtacgcagattaacaacggcttaggttggcgtcatttcactcccacatggatgtcaggcatcaacttctttttcgaccacgatcttagccgttaccactcccgcgccggcattggcgcggagtactggcgcgactatctaaaattaagcagtaacggctatttgcgactgaccaactggcgcagcgcacctgaactggacaacgattatgaagcacgcccggccaatggctgggatgtacgcgcagaaagctggctacccgcctggccgcaccttggcggtaaactggtctatgaacagtattatggcgatgaagtggccctgttcgataaagacgatcggcaaagtaatcctcatgccataaccgctggacttaactatacccccttcccgctgatgaccttcagcgcggagcaacgccagggtaaacagggcgaaaatgacacccgttttgccgtcgattttacctggcaacctggcagcgcaatgcagaaacagcttgacccgaatgaagtcgctgcacggcgtagccttgcaggcagccgttatgatctggtggatcgcaacaacaatatcgttctggaatatcgcaaaaaagaactggttcgcctgaccctgacagaccccgtgacagggaagtcaggagaagtgaaatcactggtttcgtcgctacaaaccaaatatgccctgaaaggctataacgtcgaagccaccgcactggaagctgccggtggcaaagtggtcacaacgggtaaagatattctggttaccctgccggcttaccggttcaccagtacgccagaaaccgataacacctggccgattgaagtcaccgctgaagatgtcaaaggcaatttgttcgaatcgtga

SEQ ID NO: 460574 - DNA, 798 bp, Shigella boydii
atgattaagtggccctggaaagtacaagaatcagcacatcaaactgcccttccctggcaggaagcactatcgatcccccttttaacgtgtctgacggaacaggaacaaagcaaattagtcactcttgccgaacgttttttacagcaaaagcggcttgttcctttacagggctttgaactggattcattaagaagctgccggatagcacttctattttgcctacccgttctggagttaggactggaatggctggatggttttcatgaagtcttaatttatcctgcgccatttgtggtcgatgatgaatgggaagacgatatcggtctggtgcataaccaacgtattgttcagtcaggtcagagctggcagcaagggcctatcgttttgaactggttggatatacaagattcttttgatgcttctggttttaacctgattattcatgaagtcgctcataagctggacacccgtaacggcgatcgcgccagcggagttccctttattccgttgcgtgaggttgctggctgggaacacgatcttcatgctgcaatgaacaacattcaggaagaaatcgaattggttggcgagaatgcggcgagcattgatgcttatgcagccagcgatcctgctgaatgttttgccgtactttctgaatatttctttagcgccccagaactttttgctcctcgtttcccttcattgtggcaacgtttctgccaattttatcaacaagatcctttgcagagactgcatcacgctaatgatacagactcgttttcggcgacgaatgttcattaa

SEQ ID NO: 460575 - DNA, 444 bp, Shigella boydii
gtgttatcgctgaaatgggagcagattggaaacgacgggatctttatccagcaagggaaaacaggaaaaaaacagataaaagcatggagtccacgattacaggcggcgatcgaaaaagcaaaacagttaccaacatccgcctatgtaatcagcaatcaatacggcaaccgatatatgtacaaaggctttaacgaaatgtgggtagaagcaagaaatcgcgcaggcaaaatttcaggtattttaaccgacttcacctttcatgatctgaaggcgaaaggaatttcagactatgaaggaagcagtcgggataagcaacttttctctggtcacaaaaccgaggggcaagtgctaatctatgacaggaaggttaaagtttcaccgacacttgatgtcccgttacctgaaaatattccaagtaattccacgtgtgatttttgtcactga

SEQ ID NO: 460576 - DNA, 207 bp, Shigella boydii; identical to SEQ ID NO: 33299

SEQ ID NO: 460577 - DNA, 987 bp, Shigella boydii
atgaccatgacaaaagacgctttacagtttggcattgagccagttcgcattactgatactgacaacatgcaggtaaacgaaggtctcccgactaacgccgaccctcaggtctatgccttccagttagctaagctggtgaagaccatgctcaattctgtacttaaagacgctcaggataacattccgttccctgtagaagtcctgccgacccgtaacagcttaccgactccaatcattgctcacactctggctgaccgctctgtgctggtccctgtccgtggtggtaagcgacctgaagttgtgaccgctccgtctggcactgaaatcaccgttgagccgattgaacaggctatcctcgtgtctcaccagacaaagctttgggaccagaagtcgaccactggtttcactcaggggacgctccagcaggacgcactgaacatctgcgataacgtggttcgtaccattaactctaagatggttgacgtgctggagtcctcaaagctgctgaagaccgtagaacttccggccctgactggtagcctgaccgctaaggctgacgctatcatggatgccctgtacgagaacacggagtcttctttcggttctgaggtttctgactacggcatcatcgcccatgagtcacacctcaaggctctctcccgtctggctgctaagcagggcttcggtggtgaagacgctatcgtcgatatgctgggaacagacatcgcctattacaacggtgaagaccgtggcgtcttcatgatggctaagcgctttacggctctgagcttcggctgcttccgtcacgatggcgagaacgttacggtggtcctttcacgtgatggtgactcccagtctcacgaccttgagattctcggcaaggtgtttgttgtagctgaagctgctacgaccatcaagatgggtactggctcggctactgctgtcctgcctgtagtcaaacgcctgagcttcactaaagacagctag

SEQ ID NO: 460578 - DNA, 492 bp, Shigella boydii
atgttattcaacaacaacgaatggaaactgtcagtcaccgacatcgacctttacgcaaatacttgcaagctggacggtcagtcctatccgttgtcgctcgctatcaagaccctcattccgggctatctgtcaggcctgccgtctaccagccgcgaggcaatggagttactggaagctctggctgaagctggtgtagctattggcaacttcttcagtaatgacctgctgaccgcctaccaacgccgccagatgaataagcgtgtcgaggctgagcgtatcgctaaagagctggcgtctcagaaagagcgtacccgcgaaatgttcatgaccgaagacgaatggcagaaagagctacagcgccgcgaacaggtcaaagctgaacgccggacatatggtgagaacctccgcagtgctacccattccgctggtcgctcacgtgcatcaattatggctgacctcgatagtggcgctaactggatggacagcttgtaa

SEQ ID NO: 460579 - DNA, 192 bp, Shigella boydii
atgattgacccgcgcacacctgagggccgcatgactctccgttaccgtggctaccggactgaagtcctcctcagagagcttggtctagacccggaagatgagacccgccagcaccaatcacgagacgagctgatagtgcaactggtcgctatgaaactgccgtcagctagcaagctagcgcctaaccgttag

SEQ ID NO: 460580 - DNA, 888 bp, Shigella boydii
atgactaaaaatactcgtttttcccccgaagtccgtcagagggcgattcgtatggttctggaaagtcagggcgaatatgactcacagtgggcggcaatttgttccattgccccaaagattggctgtacaccggagactctgcgtgtctgggtacgccagcatgagcgggataccggaggcggttcaaacctcgaccagcttgtctccatgacctcaattgaaattgctgagctgacaggcaaggagcaccgaaatgtcctgcgtgatattcgcaatatggctgaggagcttaacgcgctcaaaactgagcagtgctcaaaactgagcagtcatatcggggtgactaaagatgtttatctaaacgcgcaggggaaacagcagcctctgtaccgtctcgaccgtaagcatacttttattctggtcgctggctattccgttcacctccgcgccaagtgttacgaccatattcagacgttagagcgtcgagtccttcaactggaagaccagaagaagcgagcagccattcagtctgctaaccgtcgaggcgtgacttggggcgactactgcaaaacctatgatctacccgctcagaagctaatgaccgcacttctccagcatcgtggcctctttcgtaagaacccaatcagtaacgagtggtctgtaaatccgaagtattccgactgcttccgtatcattaagccgtctgaccagaagttctcagcaggtggttataactttcgcttcaacgctaagggattggaggtcttcggtaagcctgcgatagtcgataaactgcgaggcatccttattgccttcactggcaccgaccagcagaagcaagagcatctcctgaagcaggcccaatccggcaagctggagggactctaa

SEQ ID NO: 460581 - DNA, 183 bp, Shigella boydii
atgagtttatcttgttatggattgtgttatcacaattccaataagaagaactttaagtccagcctccactcccgccaacccgaagtaaactatggtcgctatgatgtggtctccatgcttcgggtcttactggaagtactgaacactttcgcgtcaagttctccgaagttcattcctgtttga

SEQ ID NO: 460582 - DNA, 660 bp, Shigella boydii
atggctgagtattatccggcggtgtttgaagcagaagcttttaattgccctcactgcggtgtatatgcccgtcagttctggcgtagtatgtatggtaattcgaatgtgcttgcggtcaaatcaactgagttccgaatgtcaacatgctctcattgtggtgaagatgcctattggtatcagggcaacatgttgatccctgcggctggcaatgttgaactcccaaacccagacatgcccgatgactgcaagtcagactatatggaagctagaagcatcattaatctgtctcctaaaggcgcagcagcactccttcgtctttgcctccaaaagctaatggtccacttaggcgaaccgggaaacaacattaatgctgacattcggtcactcgtccagaaaggactacctgtacgcattcagcaggcagcagacatctgtcgtatcgttggcaatcaggcggtccatccaggagagattagccttgatgacgacccacagttggcacatggtctctttaagctgttgaacattattgtcactgagcagattaccagaccgaaagaaattgaggctatgttccagagtatgcctgaaggtccacgccaaggtattgagaatcaggacagacaggcgagggaacagcagcaggctgctaatgaataa

SEQ ID NO: 460583 - DNA, 1608 bp, Shigella boydii
atgctcaactcaagaacctacctttatcagtgtaacggtgtcttttacatccgtcttagaatgaagagcactggtcgcctgaccgcttcgcttccctctcataaccgttataaactagcgtcagtatcactacggactaaggacagacgcaccgctatggctcactcacggcacatcaagtcagcacttaaagcaatccacgcagataaccctaacgcctcttatgaggagctacgggagcacctgaagaccattgtcgagtgggagcttagtgtcagccgtgatgacctgaacgacccagagtcctaccagctttacgttgaccagtacgatgacattaagtccaaccttcgggaagctgtagcgactgagcgtctgactgtagaccagcatcgctatatcaatgacgttatcggtgtgcttaaggcctgtcaggacagactcaggggtgatagctctggcctgttgtcttaccttgagcctgagaccagtagtctaagaccgtccgtctccctatctgtattggcagatcctgaagtccccgaacctaaagctcttaccctcgcgtctctcattgagcagtacgagcaggagaacgcccagaactggaagccagcgaccctaagcgagaaccgagcgtcgcactccacgctaatcgagatattcgactatctggatattcaggatgtcggcaaggcgacccgttcagatatgctcagggtccgtgaagtcctccagcagataccgaagaaccgcaagcaacgctttaagtctatgccgctgtctgacctgctgaaccgggagtctaagactgactgtttggatgtcgttaccatcaacaataaatatcttatcaagatggctgctgtgtttaagtgggcggtacgcaacgacttgatagctaagaacctgaccgaaggtcttgagctgaaagtcccgcagcgtaaagcctccgacgctcgtgatgcgttcagtcctgagcaggtagggcaactactggtcgccgctaaagcgtactctcagaagaccgcaggtaagccataccattattacgtcaccgctctggctgcgatcactggagcaagacttaacgaggtggcccaacttcaggtcaaagacgtcagggtcactgaggccgggaccgtgtatatccacattaacgaagacgatagcagcctgccgggtaagagcgttaagaatgcgcatagcgaccgctgtgtcccgctggtcgatggcgcttatggttttgtattggctgactttgtgtcgcttgtggaagaccgtagaaaggctgagggtgataatgctatggtattcgatggcctcaagctgatgaagaacggctacggtgagcaggtgagcaaatggtttaaccgaacgttgctacctaaagtccttgctgaccgtagcggcttagcgtttcactcgtttagacatactgttgcgacccagttaaaacaacatggggtcgagttagcgtatgctcaggcgattatgggccattcgagcgggtccataacttacgaccgttacgcgaaagaggttgaggtagatagattggttaatgtgatggctggtgtttataaggagactggagtaaatggctga

SEQ ID NO: 460584 - DNA, 756 bp, Shigella boydii
ttgagtgcgggacgcctgaataaaaaatctctgggtatcgtgatgttgttatcggttggactgcttttggcgggctgttcgggtagcaaatcatccgatacaggaacgtattccggctccgtttacaccgtgaaacggggggatacgctatatcgtatttcgcgcaccacgggaaccagcgtaaaagaactggcgcgactgaacggcatttcccccccttacaccattgaagttggtcagaaactaaaactgggtggggcgaaaagtagcagtagtacacgtaaatcaaccgccaaatcaacgaccaaaaccgcatcggttacaccgtcatcagcggtaccgaaatcttcctggccgccagtagggcaacgttgttggttatggccaacgacagggaaagttatcatgccgtattcgacagcagatggcggcaataaagggattgatatctcagctccacggggtacacctatttacgccgcgggtgcaggaaaggtggtgtatgtgggcaaccagctgcgtggctacggtaatctcatcatgattaaacacagtgaagattacattacggcttacgcccataatgacacgatgctggtaaataatgggcaaagcgtgaaggctgggcaaaaaatcgccactatggggagcacggatgcggcatctgttcgcctgcatttccagattcgttaccgagcaacggcaattgatccgctacgttacttgccgccgcagggcagcaagccaaaatgctga

SEQ ID NO: 460585 - DNA, 552 bp, Shigella boydii
atgagtacgcaacccatcattattgagttcggcagctatcgctggcccagacatcttgcaatacatgaagcaggtcatgcgatagccgcatggtttttcggcatacaggaggtagaaattgcgttatcgggtaataaccgagtggcaaaaacctaccttagcggcgatgttgatgaatgtggagctgtcgcggtatggcacgccaactatccacggaatgtggctgaggttaagtcttacaccctctcgaatgatgacaccaggttacgtctgatagaccaggtatgccgggctatggttatctctctggctggtatcgtcgcgcaatcacgctatacgggggatgatattaacgcactgatggaaacgtccgggaaagcagacatgaaaaatgttcgtgatttatcagaggtataccgggtggctggtggggaggatgctgatatacagagaatatccctttcccgtgctgaggcgctgattgccctgaaatggtgggatgtagactggccccctgaatctccagacaaccagtatcacttaaataagtga

SEQ ID NO: 460586 - DNA, 435 bp, Shigella boydii
atgacagcacaaatttcagcatacgggcggctggtggcagatccccagacccgcaccacaacgaacggtaacaacatggctatggcgcggctggcggtgtctctcccctgtaatgcggcagaggcgggagagtcaaccttctggctgggcgttattgcttttgggaagcaggccgatgcgctggcaaagcaccagaaaggcgaccttgtgagcgtggcaggcaatatgcaactcaaccagtggacagggcaggacggcggtacacagcaggggtatcaggtagtagccgacagtgtgatcagcgccagaacggtacgccccggcgggaaggcaggacagcggggacaggcaacggacgcgctgagacgtgcgcagcagccatcccgtgatgaatacgaccaacgcccaccattcgacgatgaaacgccattctga

SEQ ID NO: 460587 - DNA, 2760 bp, Shigella boydii
atgcgtaatatcgaccttatccgcgaagtgaccagcgccgcagcagggcgctggccttatgtgctggctgaattgtctatcgacgtgcctgattcatcgcgccgccattctccatgccctgcatgtggtggaaaagaccgtttcagattcgacgacaacgggcgcggtagctttatctgcaaccagtgtggcgctggtgacgggctggatttaatcaagcgggtaaacaactgcgacaccacggaggcggcacagcttgccgctgacgtgctgggtattgattaccgggcagcgcaaaccgacccggcggcagcgagccatagaagagagcaactggaagctgaccgccagcagcgtgagcaggagcgccagaaacaggcagcagaggacgcagagcagcgaagggctacgtttgcccatctgtatgccggaatgcgccagagtgccacacagggcgaatctgattacctgcaatcaaaagggctgaccgggtttaactatccggttatgccggatggttcgttattgctggagctggtggacgaatccggcgcagtggcagcagcgcaaaccattacaccgcagggagagaagcgactcctgacaggttcagcaaagcgcggggcatatcacgccgtaaacgcgccagaatcgccgcagagcgttttaattgccgaggggctggcgacggccctttcagttcacctgatgcgcccggacgcgctggcagtggcagcaattgacgcgggcaacctgctacccgttgccgaagtgatgcgccggatatatcccgccacgcagattatcattgccgcagataacgaccaccagcaggacgaccaggcgaacacgggcaaagatgccgcagagaaagccgccttatccgtggctggctgggtggcgctgccgccgacagactacaaagccgactgggacgactaccgccagcaaaacgggctggaagtcgctacggctgcgtttaacgattcgatgtaccagattcaaggggaagccgtgaaaccgcgattgcaagccattgagggcggtaaaactgaccatccagagaaagatccactaaaaccccacattgagagccgcaaagatagcgttttctgggtaacgccgaaggtggacaaggaaagcggggagatcgtcaacgctgaaagctggttatgttccccgttggaggttatcggcacgggacgcgacgacaaagatcagtatcttattatctcatggctggcattcggtgcaggcataccgacaacagcggctatcccgctggctgatattggcgagcgtgaaggctggcgcaccctgaaagctggtggggttaacgtcacgaccaaaagcagtttacgggcgatccttgccgactggctacagcggagcggctcgcgtgaattgtggcgcgttgctcatgctacaggctggcagtgcggggcatacatcatgccggacggggaaatcatcggcacacctgagcggcctgttttgttcagcgggcgcagttcagccgctgccgggtataccgtagcaggaacgccggaaagctggcgcaacagtgtcgcgcggctggcatacggcaactacgcgatgatgacaggcattgccgcagcactggcagcgccattaatcggggtggcagagcgtgacggattcgggattcatttttatgagcaatcgagcgccgggaaaacaaccacgcagaacgtggctagcagtctatacgggaaccctgatgccttgcgcctgacgtggtacgggacggcgctggggatgataaacgaggccgccgcccacaatgacggactgatgccgctggatgaagtcggacagggcgcagacccgataagcgtttctcagtctgcctatgccctgtttaacggcgtagggaaattgcagggcgcgaaagaaggcggaaatcgggatctaaaacgctggcgtaccgtggcaatcagcaccggggaaatggatttagaaacgttcattgcctccgcaggacgcaagacaaaagcggggcaactggtgcgcctgctgaatatcccgttaagtaaggcggtgcgctttcatgagcaccagacagggaaagaccatgcagacgcattaaaatccgcgtggcagagcaatcacggcgctgccgggcgggagtggatcagatggcttgcaggccaccagcagcaggccattgataccgttcgtgactgtgaagcccgctggcgcagtcttattcctgccgactatggggaacaggttcaccgtgtaggggcaaggttcgccattctggaggctgctttactgctgggtggcgtggttactggctgggatgatcaaacgtgccgtgatgcgatacagcacagctacaatgcgtggttgcgtgagttcggcacggggaacaaagagcaccagcagattattgagcagacggaggcgtttttgaatgcctatgggctgagtcgattcgcgccgctgggttatgacccgcgcgatttacccatccgtgatttagccgggtacaggaagaaggggaaccacgacggcgacccgataattttctacaccttcccggcagcgtttgagcaggagattgcaaagggcttcaataccaaacagtttgccgaagttctaaagaatgcaggaatgcttacaccaccaacgagcgggcgaggctatcaggggcgagtaagggaggatgggcgacagattcgcgtctatgtactcaatttcatggcagaggaaagcagccagccagaagaataa

SEQ ID NO: 460588 - DNA, 342 bp, Shigella boydii
atgattactaaaaatttccgactgaatgcgctggcgaataagtatgcggcagcactgtataaccacattacttccaccagcggcggggactatttcatgattgatgcggacggcctcgccgtccgtgtggaaatcgtcaatggagtaaaaggcgttcgcagcctgattgatagctacgcactggcagccatgaaagtgcgctacccgcagtgggaaatcgtggggatcgagcttcttgatcgttgcgtcactaaggacggattgactgacatcgggcgcgagatatggcaaagcatgattaatgatatgggcgcgaccgtggcaggaggcaaccatgcgtaa

SEQ ID NO: 460589 - DNA, 603 bp, Shigella boydii
atgaataatttcttaacgttccatgcagaagcaacgcctggcggcgtaaacatcatgtaccgcagcaacgatggcatgacagaacgcgttgagaccgtctcatatattgatgccgtaaatcgtctggatgccggggattatgacgataaaccagatgaaggcatgtttatacatctcgctattgccagtggcggcaaccagggatatttcgattacacatcacagcatcacgtgattatgtggcgctggctgatcgcaacagtattcatgctggaaatgagagaggaaaacggcactgtcagcatcattgatgatactggcaatccttccgaagtggctgtttattccaacggcatcgtcgccatgccgctgtatccagtagcagagcgcctcgctatggcaaacaacattgagggcgcgatgatagaacgttttggcatcgagtctggcacagaacgcgccatcattttctacagagccatgatggatgtggaacaaggagcactgactccatttggtcgtgaaacgcttgctgaacttcacaacagctttatagctgaactgaatgaaaacggctggcctgaaatggcgctggcgcactga

SEQ ID NO: 460590 - DNA, 222 bp, Shigella boydii
atgaccaacatccagctcattgaagcgcaatgtcgcatcgaacaggttcagactgttttagggttctggcttgaaggggccagccccagcaacagagacaagttaatgattggcgcggttatgtcactgctcaatggcgtaccagaagctattcaggaagctgacgaattgttgggcaaatatgagttacagaatcattcaggcgaggcgaaacatgaataa

SEQ ID NO: 460591 - DNA, 264 bp, Shigella boydii
atgaatatcaacttaatttatcgtcatccgtgtgagctggaaattgaatcattgctggggcgcgaagagccatatccagacacattcactcccgcagattgcgcgactgaacggcttaccagagcgcgcacaggtctggttcatgtgatgaatgagattgttccctcggtgggaggggaacaggcgacagtaatcaatagctggctacaaaaagttacctccctgatagatatcagtttaatcgatgtggagagtgcgaaatga

SEQ ID NO: 460592 - DNA, 195 bp, Shigella boydii
atgaataactcaattaatacccctcgccttacgtccgcacttcaattaatcgagcaaacagcggctgtcctggttgctgtcagtctttcggctgaagaaatggacgctgctgatgtcgtggatgcgattaaagcgtgctcatctttggttaacgatgcccgtgcagagctggtaattcttgggggtgaaaaatga

SEQ ID NO: 460593 - DNA, 219 bp, Shigella boydii
atgattaaaacctacgatgtgcatatggatcccctcgaacgcacaagccagatcatcacactgacagaagtgattaatgacattctggtgagcaactctccctcacgagacgaaaaactgaaggcgttactcgcgatattggatctcgccgttcgtgacgttcatttcctgctggaaggtggcgaaatgtcaggaaaacggggggcaaccaatgaataa

SEQ ID NO: 460594 - DNA, 708 bp, Shigella boydii
gtgatactgaatgaacctgccgcccagaaagaagcctttaatctggctggcctgttaacaaatgttaacccttacaaccttataaaacctgatattgataccgcagcgcccggagttccgttaccagtacgcgaggcgcttaccctcaacaaaaagatggtgagccgtgcacaggaaaaactcttaaagggttacggttttatctggtatgaccacctagcagagaaaagctgttatagttcaagcgttgctgcaaaatcagcaaccgggcgtggaaacccgaacacactcagggcgacacagacgccgaaagcgtctttttttgtgtccgatcactacgcacatcaaatcagcggcctagtccgtactgtatcaatggtggcgttagtggggctacgttcgcgtaggccggtttcctttgtgtccggtatttccacccctgctaacgtcaccgccatttcagagcgtggaaactcaggcggtgactccttaaacacaaaggaggctgccgctatgctggctactacccctacccaaaaaccgcaatttatctggattatcgccgcagttcgccgcgattgcccgacaattaccgccaaaattcatcatattgctgccgagtctgaacgcgatgctcgccgttctctggtgcgcgatcacgtctgcttttttgctggtcgtatccgcatggaggtggcacatgattaa

SEQ ID NO: 460595 - DNA, 183 bp, Shigella boydii
atgcgtaaccacaatccgatgccgggaagccgttacaaggattcgcacggggctgtagtgaccgttgagcgcgtcgagcataaccgagtgaccttttaccgcgagggctatcagtcgccatgtgttcagcctttggagagattcgttaatgagttcgtggaggtgcgccgtgatactgaatga

SEQ ID NO: 460596 - DNA, 153 bp, Shigella boydii
atgaacgcagcacagcttgaacacctcgcctatctcgaaagcaccaatatcacgttaattgatatgggcatggaatatgagcagcgcaaaggagaactcacccgcctgtcgcaacgctggctcgctaaacgtctggaggtaaaccatgcgtaa

SEQ ID NO: 460597 - DNA, 618 bp, Shigella boydii
atgactatcgaaaaaagccgattcagttcgggggccgccccgcaacccaacgttaacacgggagtaattaacggcaacgactttgccgctattgttcccgttattgccggacgcattggcgggcgtgaagccaatattgtgagcgctaaggcgttgcataaagcgctgggggtgggccgcgactttactaactggattaaaggccgaattgaccagtacggttttattgccggaaccgattttatccgtgttgaaaatttgagcacgccaaaacgggcgagcgcaaaaactcgccagcaaatagagcatgattacctgctatcgctggatatggctaaagaagtggcaatggttgaacgcaacgagcagggccgcgctatccgccgttatttcatccagtgcgaggaagaattacagcgtagcgtgcctgaaatcgccgcccgctatcgtcgccagctaaaagcccgtctcagtgccgcaaacaactttaagccaatgtgcgatgcgctgaatatggcccgtgccgagatgggcaaaacgacgcagcagcgccactacagcaacgagagcaacatgatcgcccgtatcgtgctgggtggcatgacggcgaagcagtga

SEQ ID NO: 460598 - DNA, 432 bp, Shigella boydii
atggaaaagaaaaaccgcccattacaggcggctaattcagatattcgcgtatctgatgttacgccccttacaaaatcccttcaagcaccaaagcgcacaccgaaaaagcatcgtgccagagtctatatgctgcgtactggtatagagggatggacagaaaatgacattctgcgttattgccgcctttcgtctggaaggaactacgccagcgagttagagcgcaggcttgatattcagcttgagcgtatagacgaaaagaaccccgacgggatagggccacatttacgctatcgctttaccgggcgcggtgacgttctaaaagttattcggcttgtgaaccataacgccgacgctggcggctatcagggactttctcagcctgaaattgccgacattctcaatctatacccggacaatctcaccgccgcataa

SEQ ID NO: 460599 - DNA, 204 bp, Shigella boydii
atgaacatcgacactatccctacaaaaggctatatcagacgcttccgcctggctgaattgctgggcgttagtgtatccaccatcgaccgtaaagtaagaaacggttcactaccacgtccggtaaagctgggagaaaaaataactgcgtttgatgcggttgagattcacaactggctggcagaacgccgcgggaaggtggcctga

SEQ ID NO: 460600 - DNA, 699 bp, Shigella boydii
atgtccggcagtgcttttgccgttacgcaccacgccttcagtagcggagcaggaaggacatctgatggaaatggaagccacgcaagcaccttaaaatcaccatcatacactaaatcagtaagttggcagcattacctgcttgggctatggcatgttaacgcctcctatatactcgacatcgcagggcttgattctattgacactcccgcacgcatattcagccccgcacacagaaaaagagaactagacgtaagtgcgaattattatttttttctcgattatacaaaacatgccttccacgaaatatccgtagaggatttgtacataacaaggccgtgggttgaatatatcggcgaatgcatggacaaaaaccagcccatatacagccccgaaactcgcataaacttacaagctctttatgaggatgttaaaaacgttgagcacggaaacagagagcgccacaggcaaaagcgcgaaatttgcctcttggcgttgatttatgtgaagcggcactacccagaagagtgtaaagggaagaacgggaaggaaaccaacgaagcatgggcgaacgccacaataaaccactgggcgcttttggggggcggctatgatgagccatccatagattacctgaagaaactcatagccgacgcagacagaacaccggaagaacgcaccacggcagggaaaaaaaggtga

SEQ ID NO: 460601 - DNA, 1065 bp, Shigella boydii
atggtaacgtcctgtactggacatgttttagataatcaacgcgccaccactcgcggagttttctcctccggtagtcatctcgtcactttgcattttcaacctcatcctttcttttcatgtgttaccgacgccgtaaacggtgcgcgtagccgtttttcggcattttatccaaaagcaaactatggcttacaaggaagccaaccctctgatgttcgtgcgcataatcgcgctgccaacggcgcgtgtgatgaatacaaacaactcaaggtgctctccatgggaagacaaaaagcagtgatcaaagctcgtcgcgaggcaaaacgtgtgctgagacgggattcgcgcagccataagcagcgtgaagaagaatcggtcacctcgcttgtgcagatgagcggcgtagaagccattggtatggcccgcgacagtcgcgatacctcgcccatcctcgcgcgaaatgaagcgcaattgcactatctgaaggctattgagagtaagcagctgatattcgccacgggcgaagccgggtgcggaaaaacctggatcagcgcagcaaaagcggcagaggccctgatacataaggatgtcgacaggattatcgtcacccgtccagttctgcaagccgatgaagatcttggcttcttacctggtgatatcgcagaaaagtttgctccctattttcgcccggtctacgacgtgctggtccggcgcttaggggcttcctttatgcagtactgcctgcgaccggaaatagggaaggtggaaatcgcgccgttcgcctatatgcgtggacgtacctttgaaaatgcagtcgtcattcttgacgaggcgcagaatgtgactgccgcgcaaatgaaaatgtttttaacccgcctcggggagaacgtgacggttatcgtcaacggtgatatcacgcaatgcgatttgcctcgcggcgtgtgctccggattaagtgacgcgctggaacgtttcgaagaagatgaaatggttgggatcgtccggttcggaaaagaggattgcgtacgttcggcactttgccaacgtacgctgcatgcatacagttaa

SEQ ID NO: 460602 - DNA, 1509 bp, Shigella boydii
atggctattagcacaccgatgttggtgacattttgtgtctatatctttggcatgatattgattgggtttatcgcctggcgatcaacgaaaaactttgacgactatattctgggcggtcgtagtcttgggccatttgtgacggcattatcggcgggtgcgtcggatatgagcggctggctgttaatggggttgcctggcgcggtttttctttccgggatttccgaaagctggatcgccattggcctgacattaggcgcgtggatcaactggaagctggtggccgggcggttgcgtgtgcataccgaatacaataataacgccttaacattgccggattatttcaccgggcgttttgaagataaaagccgcattttgcgcattatctccgcgctggttattttgctgttcttcaccatttattgcgcttcgggcattgtggcaggcgcgcgtctgtttgaaagtacctttggcatgagctacgaaacggctctgtgggcgggagctgcggcgacgatcctttacacctttattggcggtttcctcgcggtgagctggactgacactgtacaggccagcctgatgatttttgccctgatcctgacaccggttatcgtcattatctgtgtcggtggctttggtgactcgctggaagtgatcaaacaaaagagcatcgaaaacgttgatatgctcaaaggtctgaactttgttgccattatctcactgatgggttgggggctgggttacttcgggcagccgcacattctggcgcgttttatggcggcggattctcaccacagcattgtccatgcgcgtcgtatcagtatgacctggatgatcctctgcctggcaggggcggtggctgtcggcttctttgggattgcttactttaatgagcacccggcggtagcaggcgcggtaaaccagaacgccgagcgcgtgtttatcgaactggcgcaaattctgtttaacccgtggattgccgggattctgctgtcggcaattctggcggcggtaatgtcaaccttaagttgccaactgctggtgtgctccagtgcgattaccgaagatttatacaaagtgtttctgcgtaaacatgccagccagaaagagctggtgtgggtagggcgtgtgatggtgctggtggtggcgctggtggcgattgcgctggcggcaaacccggaaaaccgcgtgctgggcttagtgagctacgcgtgggcaggctttggcgcggcgtttggtccggtggtgctgttctcggtgatgtggtcacgcatgacgcgtaacggtgcactggcggggatgatcatcggtgcgctgacggttatcgtctggaagcagttcggctggctgggactgtacgaaattattccgggcttcatcttcggcagtatcgggattgtagtgtttagtttgctgggtaaagcgccgtcagcggcgatgcaaaaacgctttgccgaggccgatgcgcactatcattcggctccgccgtcacggttgcaggaaagctaa

SEQ ID NO: 460603 - DNA, 207 bp, Shigella boydii
atgttgcaactttgtgcaaccatgttaaatgtgacctgcgtagcaagcttaaaaatgaatgaaatgttaataaaagaaattgatatgacagggattaaaaaaataactcagactttttctctgcggcagttaacatttttgaaaggtgcaaccgcaaaaaatgtgagagagtgcaacctgatgaaaaatagtgtcgctgagcactaa

SEQ ID NO: 460604 - DNA, 3963 bp, Shigella boydii
atgggaaccaccaccatgggggttaagctggacgacgcgacgcgtgagcgtattaagtctgccgcgacacgtatcgatcgcacgccacactggttaattaagcaggcgattttttcttatctcgaacaactggaaaacagcgatactctgccagagctacctgcgctgctttctggtgctgccaatgagagcgatgaagcaccgactccggcagaggaaccacaccagccattcctcgactttgccgagcaaattttgccccagtcggtttcccgcgccgcgatcaccgcggcctatcgtcgcccggaaaccgaagcggtttctatgctgctggaacaagcccgcctgccgcagccagttgctgaacaggcgcataaactggcatatcaactggccgataaactgcgtaatcaaaaaaatgccagtggtcgcgcaggtatggtccaggggttattgcaggagttttcgctgtcatcgcaggaaggcgtggcgctgatgtgtctggcggaagcgttgttgcgtattcccgacaaagccacccgcgacgcgttaattcgcgacaaaatcagcaacggtaactggcagtcacacattggtcgtagcccgtcactgtttgttaatgccgctacctgggggctgttgtttactggcaaactggtttccacccataacgaagccagcctctcccgctcgctgaaccgcattatcggtaaaagcggtgaaccgctgatccgcaaaggtgtggatatggcgatgcgcctgatgggcgagcagttcgtcacgggtgaaaccatcgcggaagcgttagtcaatgcccgcaagctggaagagaaaggtttccgttactcttacgatatgctgggcgaagctgcactgactgccgcagacgcacaggcgtatatggtttcctatcagcaggcgattcacgccattggtaaagcgtctaacggtcgtggcatctatgaaggtccgggcatttcaatcaagctgtcggcgctgcatccgcgctacagccgcgcccagtatgaccgggtaatggaagagctttacccgcgtctgaaatcactcaccctgctggcgcgtcagtatgatattggtattaacatcgatgccgaagaggccgatcgtctggagatctccctcgatctgctggaaaatctctgtttcgagccggaactggcaggctggaacggcatcggttttgttattcaggcttatcaaaaacgctgcccgttggtgatcgattacctggttgatctcgccacccgtagccgtcgccgtctgatgattcgcctggtgaaaggcgcgtactgggatagtgaaatcaagcgtgcgcagatggacggccttgaaggctatccggtttatacccgcaaggtgtataccgacgtttcttatctcgcctgtgcgaaaaagctgctggcggtgccgaatctaatctacccgcagttcgcgacgcacaacgcccatacgctggcagcgatttatcaactggcaggtcagaactactatccgggtcagtacgagttccagtgcctgcatggtatgggcgagccactgtacgagcaggtcacagggaaagttgccgacggtaaacttaaccgaccgtgtcgtatttatgccccggttggcacacatgaaacgctgctggcgtatctggtgcgtcgcctgctggaaaacggtgctaacacctcgtttgttaaccgtattgccgacacctctttgccactggatgaactggtcgccgatccggtcactgctgtagaaaaactggcgcaacaggaagggcaaactggattaccgcatccgaaaattcccctgccgcgcgatctttacggtcacgggcgcgacaactcggcagggctggatctcgctaacgaacaccgtctggcctcgctctcctctgccctgctcaatagtgcactgcaaaaatggcaggccttgccaatgctggaacaaccggtagcggcaggtgagatgtcgcccgttattaaccctgcggaaccgaaagatattgtgggctttgtgcgtgaagccacgccgcgtgaagtagaacaggcgctggaaagtgcggttaataacgcgccaatctggtttgccacgcctccggctgaacgcgcggcgattttgcatcgcgctgccgtgctaatggaaagccagatgcagcaactgattggtattctggtgcgtgaagccggaaaaaccttcagtaacgctattgccgaagtgcgcgaagcggtcgattttctccactactacgccggacaggtgcgggatgatttcgctaacgaaacccaccgtccattagggcctgtggtgtgtatcagtccgtggaacttcccgctggctattttcaccgggcagatcgctgccgcactggcggcaggtaacagcgtgctggcaaaaccggcagaacaaacgccgctgattgccgcgcaagggatcgccattttgctggaagcgggtgtaccccctggcgtggtgcaattgctgccaggtcagggggaaaccgtgggcgcgcaactgacgggtgatgatcgcgtgcgcggggtgatgtttaccggttcaaccgaagtcgctacgttactgcagtgcaatatcgccagccgcctggacgctcagggtcgccctattccgctcatcgctgaaaccggcggcatgaacgcgatgattgtcgattcttcagcactgaccgaacaagtcgtcgtggatgtgctggcctcggcgttcgacagtgcgggtcagcgttgttcggcactgcgcgtgctgtgcctgcaagatgagattgccgaccacacgttgaaaatgctgcgcggtgcaatggccgaatgccggatgggtaatccgggtcgcctgaccaccgatatcggtccggtgattgatagcgaagcgaaagccaatattgagcgccatattcagaccatgcgtagcaaaggccgtccggtgttccaggcggtgcgggaaaacagcgaagatgcccgtgaatggcaaagcggcacctttgtcgccccgacgctgatcgaactggatgactttgccgaattgcacaaagaggtctttggtccggtgctgcatgtggtgcgttacaaccgtaaccagctaccagagctgatcgagcagattaacgcttccggctatggtctgacgcttggtgtccatacgcgtattgatgaaaccatcgcccaggtcactggctcggcccatgttggtaacctgtatgttaaccgtaatatggtgggcgcagtggttggtgtgcagccgttcggcggcgaagggttgtccggtaccgggccgaaagcaggcggtccgctctatctctaccgtctgctggcgaatcgcccggaaagtgcgctggcagtgacgctcgcgcgtcaggatgcagagtatccggtcgatgcacagttgaaagccgcattgactcagccgctaaatgcactgcgggaatgggcagcaaatcgtccagaattgcaggcgttatgtacgcaatatggcgagctggcgcaggcaggaatacaacgattgctgccggggccgacgggtgaacgcaacacctggacgctgctgccgcgtgagcgcgtgttgtgtattgccgatgatgagcaggatgcgctgactcagctcgccgccgtgctggcggtgggcagccaggtactgtggccggatgacgcgctgcatcgtcagctagtaaaggcattgccatcggcagtcagcgaacgtattcaactggcgaaagcggaaaatataaccgctcaaccctttgatgcggtgatcttccacggtgattcggatcagcttcgcgcattgtgtgaagccgttgctgcgcgggatggcgcaattgtttcggtgcagggttttgcccgtggcgaaagcaatatccttctggaacggctgtatatcgaacgttcgctgagtgtgaataccgctgccgctggcggtaacgccagtttaatgacgatcggttaa

SEQ ID NO: 460605 - DNA, 639 bp, Shigella boydii
atgacgcaaggcgcagtgaaaacaacgggtaaacgttcgcgcgcagtaagcgcgaagaaaaaagcgattcttagcgcagcactggacactttttcacaattcggttttcacggcacaaggctggagcagatcgcagagttggcgggtgtttcaaaaaccaatctgctgtattactttccgtcaaaagaggcgctgtatattgccgtgctgcggcagattctcgatatctggctggcaccgttaaaagcgtttcgtgaagatttcgccccgctggcggcgatcaaagagtacatccgtctgaagctggaagtctcacgcgattatccgcaggcttcgcgcctgttctgtatggagatgctggcaggcgcgccgctgttaatggatgaactgacgggcgatttgaaggcattaattgatgagaaatcggcgctgattgccggttgggtcaaaagcggcaaactcgcgccgattgatccgcagcatttgatttttatgatttgggcttccactcaacattacgccgatttcgcccctcaggtggaggcggtgacaggcgcaacgttgcgcgatgaggtatttttcaatcaaacggttgaaaacgtgcagcggattattattgaggggattcgaccacgttaa

SEQ ID NO: 460606 - DNA, 1035 bp, Shigella boydii
atggatatggatctggtgccgaaatatgccgatgaagagagttctgcgtctggtgtgcgcattgacccgactcagacgcagaatctgggggtgaaaacggctaccgtcacgcgcggaccgctgacttttgcccagagtttcccggcgaatgtcagttacaacgagtatcagtatgccattgtgcaggctcgcgctgccgggtttatcgacaaggtgtatccgcttaccgtgggcgataaagtacaaaagggcacaccgcttctcgacctgaccattcctgactgggtggaagcgcagagtgagtatttactgctgcgcgaaaccggcggtacggcgacccagactgaaggcattcttgagcggctgcgactggcgggaatgccggaggcggatattcgccgcctgatcgccacgcaaaaaatccagactcgctttacgctcaaagcgcccattgatggcgtgatcaccgcgtttgatctgcgcgcgggaatgaatatcgccaaagataacgtggtagcgaaaattcagggtatggacccggtgtgggtcactgctgcgatcccggagtctatcgcctggctggtgaaagatgcctcgcagtttacgctcaccgttccggcacgaccggataaaacactcaccatccgcaaatggacgctgctacccggcgtggatgccgcgacctgcacgctgcagctgcgtctggaagtcgacaacgccgacgaggcgctaaaaccgggcatgaacgcctggttgcaactcaataccgccagcgaaccgatgctgctcattccgtcacaagggctgattgataccggtagcgaacagcgggtgattaccattgatgccgacgggcgctttgtaccgaaacgcgttgccgttttccaggcatcgcaaggtgtcaccgcattacgctctggtctggcggaaggtgaaaaggtggtttccagcggccttttcctgattgattccgaagccaatatttctggcgcactggagcggatgcgctctgaaagtgctacccatgcgcattga

SEQ ID NO: 460607 - DNA, 645 bp, Shigella boydii
atgattgaatggattattcgtcgctcggtggcgaaccgttttttggtgctgatgggcgcgttgtttcttagcatctggggcacctggaccatcattaatacgccagtggatgcgctgccggatctctccgatgtgcaggtgattattaaaaccagctatcccgggcaggcaccgcaaatcgttgaaaatcaggtgacttatccgctaaccaccaccatgttgtcggtgcctggcgcgaagactgtgcgtggtttctcgcagtttggcgactcttatgtgtatgtcattttcgaagatggtaccgatccgtactgggcgcgttcgcgggtgctggagtacctcaaccaggtacagggtaagctgcctgcgggagtcagcgccgagctggggccagatgccacgggtgttggctggatctatgaatatgcactggtggatcgcagcggtaagcacgatctggccgatttacgctcattacaggactggtttctcaaatatgagctgaaaaccatccctgacgttgcggaagtggcgtcggtgggcggtgtggtgaaagagtatcaggtggttatcgatccccagcgcctggcgcagtatggcatcagtctcgccgaagtaaaaagcgcgctggatgcttcaaactag

SEQ ID NO: 460608 - DNA, 2457 bp, Shigella boydii
atggtgcgcgccagcggctatctgcaaacgctcgacgactttaatcacatcgttttaaaagccagtgaaaatggcgtgcccgtttatctgcgcgatgttgcgaaggtccaggttggcccggagatgcgccggggcattgccgaactgaacggcgaaggcgaagtggcgggcggggtggtgatcctgcgctccggcaaaaacgcccgagaagtgatcgccgccgtgaaggacaaactggaaacgctgaaaagtagtctgccggaaggcgtggagatagttacaacatacgatcgcagccagctcattgaccgcgccatcgacaacctcagcggcaagttgctggaagagtttattgtggtggcggtagtctgtgcgctgtttctctggcatgtgcgctcggcgctggtggcgattatttcgttgccgctggggttgtgtattgcttttattgtcatgcacttccagggactgaatgccaatattatgtcgttgggtggcattgcgattgccgtcggggcgatggtcgatgctgctatcgtcatgatcgagaatgcgcataaacggctggaagagtggcagcaccagcatcctgacgccacgctggataataaaacgcgctggcaggtgattaccgatgcatctgttgaagtggggccggcgctgtttatcagtctgctgattatcacgctgtcgtttattccaatcttcaccctggaagggcaagaagggcgtctgtttggcccgctggcgttcaccaaaacgtatgcgatggcgggtgcggcgctgctggcgatcgtagtgatcccgatcctgatgggttactggatccgtggcaaaattccgccggaaagcagtaacccgctcaatcgctttttgattcgtgtttatcatcctctattgctgaaagtactgcactggccgaaaaccacgctgttggtggcagcgctttcggtgctgacggttctctggccgctcaataaagttggcggggaatttttaccgcagatcaatgaaggcgacttgttgtatatgccatcgacgctgccggggatttccgcagcagaggcggcgagtatgctgcaaaaaaccgacaagctaattatgagcgtacctgaagtggcgcgggtatttggcaaaaccgggaaagcggaaaccgccaccgattctgctccgctcgagatggttgaaacgaccatccagcttaagccgcaggatcagtggcggcctggcatgacgatggacaaaatcattgaggaactggataacaccgtgcggctgccggggctggcgaatctgtgggtgccgccaattcgtaaccgtatcgatatgctctcaaccggcattaaaagccccatcggcattaaagtttccggcactgtgctggcggatatcgacgcgatggctgagcaaattgaagaagtagcgcgaacggtgccaggcgtggcttctgcgcttgccgagcgtctggaaggtgggcgctatatcaacgttgagattaaccgtgaaaaagccgcgcgttacggtatgacggtggcggatgtgcagttgtttgtgacttctgcggtgggcggggcgatggttggcgaaacggtggaagggattgcccgttatcccattaatctgcgttatccgcaaagctggcgcgatagcccgcaggcactgcgccagctaccgatcctgacgccgatgaagcagcaaatcaccctggcagacgtggccgacgttaaagtctctaccggaccgtcgatgctgaaaaccgagaatgcgcgcccgacgagctggatttatatcgatgcccgcgatcgtgacatggtgtcggtggttcacgatttgcaaaaagcgatagttgaaaaagtgcagttaaaaccgggcaccagcgtggcattctccgggcagttcgagctactggagcgcgccaaccataagctgaaactcatggtgccgatgacactgatgatcatcttcgtgctgttgtatctggcattccgtcgggtgggcgaagcgttgctgattatcagcagcgtaccgtttgcgctggtgggcggcatctggttgctgtggtggatgggctttcatctttctgtggcaacgggcaccggttttattgcccttgccgggggcgccgccgaatttggcgtggtgatgctgatgtatttacgtcacgccatagaggccgagccgtcgttgaataatccgcaaacattcagtgagcagaagctggatgaggcgttgtatcacggcgcggtactgcgcgtgcgcccgaaagcgatgacggtggcggtgattatcgccggtctgctgccgattctgtggggaacgggggctggttcagaggtgatgagccggattgccgcaccgatgattggcggcatgatcaccgcgcctttgctgtcgctgtttattatcccggcggcgtataagctgatgtggctgcaccgacatcgggtacggaaataa

SEQ ID NO: 460609 - DNA, 1377 bp, Shigella boydii
gtgaaaaacgcgtcaaccgtatcggaagatactgcgtcgaatcaagagccgacgcttcatcgcggattacataaccgtcatattcaactgattgcgctgggtggcgcaattggtactggtctgtttcttggcattggcccggcgattcagatggcgggtccggctgtattgctgggctacggcgtcgccgggatcatcgctttcctgattatgcgccagctcggcgagatggtggtcgaagagccggtatccggttcatttgcccactttgcctataaatactggggaccgtttgcgggcttcctctctggctggaactactgggtaatgttcgtgctggtgggaatggcagagctgaccgctgcgggcatctatatgcagtactggttcccggatgttccaacgtggatttgggctgccgccttctttattatcatcaacgccgttaacctggtgaacgtgcgcttatatggcgaaaccgagttctggtttgcgttgattaaagtgctggcaatcatcggtatgatcggctttggcctgtggctgctgttttctggtcacggcggcgagaaagccagtatcgacaacctctggtgctacggtggtttcttcgccaccggctggaatgggctgattttgtcgctggcggtaattatgttctccttcggcggtctggagctgattgggattactgccgctgaagcgcgcgatccggaaaaaagcattccaaaagcggtaaatcaggtggtgtatcgcatcctgctgttttacatcggttcactggtggttttactggcgctctatccgtgggtggaagtgaaatccaacagtagcccgtttgtgatgattttccataatctcgacagcaacgaggtagcttctgcgctgaacttcgtcattctggtagcatcgctgtcagtgtataacagcggggtttactctaacagccgcatgctgtttggcctttctgtgcagggtaatgcgccgaagtttttgactcgcgtcagccatcgcggcgtgccgattaactcgctgatgctttccggagcgatcacttcgctggtggtgttaatcaactatctgctgccgcaaaaagcgtttggtctgctgatggcgctggtggtagcaacgctgctgttgaactggattatgatctgcctggcgcatctgcgttttcgcgcggcgatgcgacgtcagcgacgtgaaacacagtttaaggcgctgctttatccgttcggcaactatctttgcattgccttcctcggcatgattttgctgctgatgtgcacgatggatgatatgcgcttgtcagcgatcctgctgccggtgtggattgtattcctgtttgtggcatttaaaacgctgcgtcggaaataa

SEQ ID NO: 460610 - DNA, 1248 bp, Shigella boydii
atgcaggatttaatatcccaggttggggatttagcgggtattgagatcgatcacaccacctcgatggtgatgattttcggtattatttttctgaccgccgtcgtggtgcatattattttgcattgggtggtactgcggaccttcgaaaaacgtgccatcgccagttcacggctttggttgcaaatcattacccagaataaactcttccaccgtttagcttttaccctgcaggggattatcgtcaatattcaggcggtattctggctgcaaaaaggcaccgaagcggcagatattctgactacctgcgcgcagttgtggatcatgatgtatgcgctgctttcagtcttctcgttgctggatgttattttgaatctggcgcagaaattcccggcggcatctcagttaccgctgaaagggatatttcaggggattaaactgatcggcgcaatcctggtcggcattttgatgatctcgctgctgattggtcagtcgccagcgattctgatcagcggtcttggtgcaatggctgccgtgctgatgttggtatttaaagatccgattcttggtctggtggcaggtattcagctttccgcgaacgatatgctgaaactgggcgactggctggagatgccgaaatacggcgcggatggcgcggtgatcgatattgggttaaccaccgtcaaagtgcgtaactgggacaataccattaccactattcccacctggtctctggtttctgactcctttaaaaactggagcgggatgtcagcatctggcgggcgacgtattaagcgcagtatcagtattgatgtcaccagtattcgttttcttgatgaagacgaaatgcaacgtctgaataaagcgcacttgttaaaaccttatttaaccagccgccatcaggaaattaatgagtggaatcgccagcaaggttctacggagtcgatattaaacctgcgccgaatgaccaatattggaacctttcgtgcctatctgaacgaatatctgcgtaaccatccgcggattcgtaaagatatgaccttaatggtacgccaactggctccaggtgataacggtttaccgctcgagatctacgcgtttaccaacaccgtggtgtggctggaatatgaaagcattcaggctgatatattcgatcacatatttgcgattgtcgaagagtttggtctgcgacttcatcagtcgccagccggcaatgatattcgctctctggcgggtgcatttaagcagtaa

SEQ ID NO: 460611 - DNA, 654 bp, Shigella boydii
atggatatcatttctgtcgccttaaagcgtcattccactaaggcatttgatgccagtaaaaaacttaccccggaacaggccgagcagatcaaaactctcctgcaatacagcccatccagcaccaactcccagccgtggcattttattgttgccagcacggaagaaggtaaagcgcgtgttgccaaatccgctgccggtaattatatgttcaacgaacgtaaaatacttgatgcctcgcacgtcgtggtgttctgtgcaaaaaccgcgatggtcgatgcctggctgaagctggttgttgaccaggaagatgctgatggccgctttgccacgccggaagcgaaagccgcgaacgataaaggtcgcaagttcttcgctgatatgcaccgtaaagatctgcatgatgatgcagagtggatggcaaaacaggtttatctcaacgtcggtaacttcctgctcggcgtggcggctctgggtctggacgcggtacccatcgaaggttttgacgccgccatcctcgatgcagaatttggtctgaaagagaaaggctacaccagtctggtggttgttccggtaggtcatcacagcgttgaagattttaacgctacgctgccgaaatctcgtctgccgcaaaacatcaccttaaccgaagtgtaa

SEQ ID NO: 460612 - DNA, 369 bp, Shigella boydii
atggataagcaatcactgcacgaaacggcgaaacgcctggcccttgagttaccctttgtcgagctttgctggccttttggcccggagttcgatgtttttaaaattggcggcaaaatttttatgctgtcgtcggagctgcgcggcgtcccctttatcaatctgaagtccgatccacaaaaatccctgttaaatcagcagatatacccgagcattaagccagggtatcacatgaataaaaagcactggatttcggtgtatcccggcgaggaaatctccgaagcgttacttcgcgatctgatcaacgattcgtggaatctggtggttgatggtctggctaaacgcgatcaaaaaagagtgcgtctaggctaa

SEQ ID NO: 460613 - DNA, 249 bp, Shigella boydii
atgaaacaccctttagaaaccttgactaccgcagcaggcattttgctgatggctttcctctcttgcctgctgctgcccgcccccgcactggggctgacgctggcacaaaaactggtgaccatgttccatctgatggatcttagccagctttacactttattgttttgtctgtggtttttagtgctgggcgctattgagtattttgttctgcgctttatctggcgacgctggttctcgctggcggattaa

SEQ ID NO: 460614 - DNA, 207 bp, Shigella boydii
atggaactctacagagaatatcctgcatggcttatctttttacgccgtacatatgcggttgcagcgggcgttctggcgctgcctttcatgcttttctggaaagaccgcgcccgcttttacagctacctgcaccgcgtctggtcgaaaaccagcgataaaccggtttggatggaacaggccgaaaaggcaaccggtgatttttactga

SEQ ID NO: 460615 - DNA, 1674 bp, Shigella boydii
atggctgcgcaagggttcttactgattgccacgtttttactggtattaatggtgctggcgcgtcctttaggcagcgggctggcgcggctgattaatgacattcctcttccaggtacagcgggcgttgaacgtatactctttcgtttacctggcgtctctgaccatgagatgaactggaagcaatatctttgtgccattctcggcctgaacatgctggggctggcggtgctgttttttatgttgctcggtcagcactatctgccgcttaatccacagcagttgccggggctgtcgtgggatctggcgctgaataccgccgtcaactttgtcacgaataccaactggcaatcttatagcggtgaaaccacgttgagctatttcagccagatggcaggcttaacggtacaaaactttctttctgccgccagcgggattgcggtgatttttgccttcatccgtgcgtttactcgccagagcatgagcacactcgggaatgcctgggtcgatctgctacgcatcacgttatgggtgctagtccctgtggcgttgttgatcgcactgtttcttattcaacaaggtgcgctgcaaaactttctgccctatcaggcagtgaataccgttgaaggagcgcaacagctgttacccatgggaccagtagcttctcaggaagcgatcaagatgctcggtactaacggcggtggcttctttaatgccaactcgtcgcatccgtttgaaaacccaaccgcactgaccaacttcgtgcagatgctggcgatcttcttgatcccaacagctctgtgctttgcctttggtgaagtgacgggcgatcgccgccaggggcgcatgttgctgtgggcgatgtcagtgatttttgtcatctgcgtaggcgtggttatgtgggcagaagttcagggtaatcctcatctgctggcgctcggcgcagacagcagcatcaatatggaaggtaaagagagccgtttcggcgtgctggtcagtagcctgtttgcggtcgtgactacggcggcgtcctgtggcgcggtgattgcgatgcatgattcgtttaccgctctcggcggcatggtgccgatgtggctaatgcaaattggtgaagtggtgttcggcggtgtcggttctggtctttacggcatgatgctgtttgtcctgctggcggtgtttattgccgggctgatgattggtcgtacaccggaatatctgggtaaaaaaatcgacgtacgcgagatgaaactgactgcactggcgattctggttactccaacactggtactgatgggcgcggcgttggcgatgatgaccgacgccggacgtagcgccatgcttaaccctggcccgcatggttttagcgaagtgctgtacgccgtgtcgtccgccgctaacaacaacggcagcgcctttgccggattaagcgccaactctccgttctggaactgtttactggcgttctgcatgtttgtcggtcgcttcggggtgattatcccggtgatggcaattgccggttcgctggtgagtaaaaagagccaacccgccagctccggcacgctgccaacgcacggcccgctgtttgttggcctgttaatcggcaccgtgttgctggttggcgcactgacctttatccctgccctggcgcttggtccggtggcggaatatctctcctga

SEQ ID NO: 460616 - DNA, 2049 bp, Shigella boydii
atgagtcgtaaacaactggcgctattcgaaccaacacttgtcgttcaggcgctgaaagaagcggtgaaaaaattaaacccgcaggcgcaatggcgcaatccggtgatgtttatcgtctggatcggcagtctgctgaccacctgtattagcatcgcgatggcaagcggtgcgatgcctggcaatgcgctgtttagcgcggcaattagcggctggctgtgggtcaccgtactgttcgctaatttcgccgaggcgctggcagaaggccgcagtaaagcgcaggccaacagtcttaaaggggtgaaaaaaactgcctttgcccgcaagctgcgtgagccgaaatatggcgctgcggcggacaaagttcctgccgatcaactgcgtaaaggtgacatcgtgctggtagaagctggcgatattatcccctgcgatggtgaagtcattgaaggcggcgcatcggtcgatgaaagcgccatcaccggggaatcggcaccggtgatccgtgaatccggcggcgattttgcctccgtcaccggcggcacgcgtattctttctgactggctggtgattgagtgtagcgttaaccccggtgagacatttctggatcggatgatcgcgatggtggaaggcgcacagcgacgcaaaacaccgaacgagattgccctgactatcctgctgattgctctgaccatcgtctttttactggcaaccgccacgctgtggccgttttccgcgtggggcggtaatgcagtgagtgtaacggtactggtggcgctgctggtctgtctgatcccaaccactattggcggcctgttgtcagcgatcggcgtcgccgggatgagtcggatgctgggcgcgaatgtgattgccaccagcggacgtgcagttgaagcggcaggtgacgttgacgttctgctactggataaaaccggcaccatcacactcggtaaccgtcaggcgtcggagtttatccctgcgcagggcgtggatgaaaaaacgctggctgacgccgcacaactggcttcgctggctgatgaaacgccggaaggccgcagtattgtgatcctcgccaagcaacgttttaacctgcgcgagcgcgatgtgcagtcgctccatgccacctttgtaccgtttactgcgcaaagccggatgagcgggatcaacatcgacaaccgcatgatccgtaaaggttctgtcgatgccattcgccgccatgttgaggctaacggcggtcacttccctgccgatgttgatcaaaaagtcgatcaggttgcgcgtcagggggccacgccgctggtggtggtggaaggttcccgtgtgctgggcgttattgcgctgaaagatatcgtcaaaggcggtattaaagagcgcttcgcccagctgcgcaaaatggacattaaaacggtgatgattaccggcgataaccgtctgactgccgccgccattgctgcggaagcgggcgtcgatgattttctcgccgaagcgacaccggaggccaagctggcattgattcgtcagtatcaggcggaaagccgtttggtggcgatgaccggcgacggcaccaacgatgctccggcgctggcgcaagcagatgtcgcggtggcgatgaactccggcacccaggcggcgaaagaggcgggcaatatggtcgctctcgactctaacccgaccaagttgatcgaggtggtgcatattggcaaacagatgctgatgacccgtggctcgctgaccaccttcagcattgccaacgatgtggcgaaatacttcgccattattccggcggcgttcgcggcaacgtatccgcagttaaatgcgctgaacatcatgcgcctgcattcgcccgactccgccattctcagtgcagtcattttcaacgccttgattatcgtctttttgattcctctggcgttaaaaggcgtgagttataaaccgcttaccgcttctgccatgttgcgccgtaacttatggatttacggtctgggtgggctgctggtgccgtttattggtatcaaagtcattgatttactgctgaccgtttgcggtctggtgtga

SEQ ID NO: 460617 - DNA, 204 bp, Shigella boydii
atgcgtggcttacgtccggcattatcgacatttatctttctgttattgattactggcggcgtttacccgctgctgaccaccgtgctggggcaatggtggtttccctggcaggccaacggttcgttgattcgtgaaggtgatacggtgcggggttcggcattaatcgggcagaattttaccagcaacggcagaaatgccctataa

SEQ ID NO: 460618 - DNA, 351 bp, Shigella boydii
atgccctataatccacaggcttctggcgggagcaatctggcggtcagtaaccctgagctggataaacaaatagccgcacgcgttgctgcattacgggccgctaacccggatgccagtacgaacgttccggttgaactggtgacggcatcggcaagcgggctggacaataatatcaccccgcaagcggcggcctggcagatcccacgcatcgcgaaagcgcgtaatctcagcgttgaacagctcacgcagctgatcgcaaaatacagccaacaaccgctggtgaaatatatcggccagccggtcgtcaacattgtcgaactcaatctggcgctggataagcttgatgaataa

SEQ ID NO: 460619 - DNA, 2685 bp, Shigella boydii
atgaataacgaacccttacgtcccgaccccgatcgtctgctggaacaaactgccgcgccgcatcgggggaagctgaaagttttcttcggtgcctgtgcaggcgtcgggaagacctgggcgatgctggcagaagcccagcgactgcgggcgcaagggctggatattgtggttggcgtggtagaaacccacgggcgaaaagataccgccgcaatgctggaagggctggctgttctgccgccaaaacgcctggcgtaccgtgggcggcacatctgcgagtttgacctcgatgccgccctcgcccgccgtccggcgctgatcttaatggacgaactggcgcacagtaatgcgctaggttctcgtcaccctaaacgctggcaggacatcgaagagctgcaggaagcaggcattgatgttttcactaccgtcaacgttcagcatctggaaagtctgaatgatgtggtcagcggcgtcaccggaattcaggtacgggaaaccgtgcccgatccttttttcgatgccgccgacgacgtggttctggtggacttgcccccggacgatctgcgccagcggctgaaagaaggcaaagcctatattgccgggcaggcggagcgcgccattgaacattttttccgcaaaggcaatctgatcgccctgcgcgaactggcactgcgccgtactgccgatcgcgttgatgagcaaatgcgcgcctggcgggggcatcctggcgaagagaaagtctggcacacgcgcgacgcgatccttttatgcatcggccataacaccggtagtgagaagctggtccgcgcggcggcgcggctggcgtcacggctgggtagagtctggcacgcggtgtatgttgaaacccctgccctgcaccgcttaccggaaaaaaaacgtcgggcaattctcagcgccttacgtctggcgcaggagctgggcgcggagacggcaacactttctgatccagcggaagaaaaagcagtagtgcgttatgcccgtgaacataatctcggcaagattattctcggtcgcccggcctcgcgccgctggtggcgtcgggaaacgtttgctgaccgactggcgcgcatcgcccccgatctcgatcaggtgctggtcgcgcttgatgaaccacccgcccgcacgattaacaacgcgccggatagccgctcttttaaagacaagtggcgggtacagattcagggatgcgtggttgccgccgcgttatgcgccgttatcactttaattgccatgcagtggctgatggcgtttgatgccgccaacctggtgatgctgtatctgcttggcgtggtggtggtggcgctattttatggacgctggccttcggtggttgctaccgtcattaatgtggtgagtttcgatctcttttttatcgccccacgcggcacgctcgccgtctctgatgtgcaatatctgctgaccttcgcagtgatgttaaccgtcgggctggtgatcgggaaccttactgctggcgtgcgttatcaggcgcgggtagcccgttaccgcgagcaacgcacacggcacttatatgaaatgtcgaaagctctggcggtgggccgcagtccgcaggacatcgccgccaccatcgaacaatttattgcctccacgtttcatgcccgcagtcaggtgttgttgcccgatgacaacggtaaattgcagccgttaacacatccgcaaggaatgacgccatgggacgataccatcgcgcagtggagttttgataaaggcctgcctgcgggcgcgggcaccgacacgttacccggtgtaccgtaccagattttgccgctaaaaagcggcgagaaaacctacgggctggtggtggtggagccggggaatctgcgccagttgatgatcccggaacagcagcgcctgctggagacgtttacgctgttagtcgccaatgcccttgagcggctgacgctaaccgccagcgaagaacaggcgcggatggcaagcgaacgtgaacagatccgcaacgccctgctggcagcgctttcgcatgatttacgcacgccgctcacggtgctgttcggtcaggcagaaatcttaacgctcgatctggcaagcgaaggatcgccccacgcccgccaggccagcgagattcgtcagcatgtgctgaacactacccgactggtgaataatctactggatatggcgcgaattcagtccggcggctttaatttgaagaaagagtggttaacgctggaagaagtggtcggtagcgcgctgcaaatgctggaaccgggtttatcgtcgcccatcaatctttctctgccagaaccgctgaccttaatccacgttgacgggccactctttgaacgggtgctgattaatctgctggagaacgcggtgaaatatgcgggtgcgcaggccgaaattggtatcgatgcccacgttgagggcgaaaatctacaactggatgtctgggataacggccccggtcttccgccaggccaggagcagacgatatttgataagtttgctcgcgggaataaagagtcggcagtaccgggggtagggcttggactggcaatttgtcgggcgatagtggatgtacacgggggcactattaccgcgttcaaccgaccggaaggtggtgcctgttttcgtgttacacttccccagcaaactgcccctgaacttgaagaatttcatgaggatatgtga

SEQ ID NO: 460620 - DNA, 678 bp, Shigella boydii
gtgacaaacgttctgattgttgaagatgaacaggctattcgtcgctttctgcgcacggcgctggagggcgacgggatgcgcgtctatgaggccgaaacgctgcaacgcggcttgctggaagcggctacccgtaagccagatttgattattctcgatctcggcctgcccgatggtgatgggattgagtttatccgcgacctgcgccagtggagcgcggtgccggtgattgtgctttccgcacgcagcgaagagagcgacaaaatcgccgcgctggatgccggagcggatgattatctgagtaagccgtttggcattggcgaattgcaggcccgtctgcgcgtcgctttacgccgccactccgccaccgccgcgcccgatccgctggtgaaatattccgatgttaccgtcgatttagccgcccgcgtgattcaccggggtgaggaagaggtgcatctcacaccaattgagttccacctgctggcggtgctgctcaacaatgccggaaaagtactcacccagcgccagctccttaaccaggtgtgggggccaaacgcggtcgaacacagtcactatttgcgtatttatatgggacatctgcgacaaaaactggaacaggatcccgcccgcccacgccatttcattactgaaaccagtattggctatcggtttatgctttga

SEQ ID NO: 460621 - DNA, 1176 bp, Shigella boydii
gtggtgtcgattggctacctggtgagtaaaatcgatagctggcgggctgagtttttattaccgatggcaggtgtgtttgtcgtgctgttagggattctgatgttgctgtcgtggttcctggccgcgcatatccgtcggcagatgatgggcatggagccaaagcaaatcgcacgcgtggtccgtcagcaagaggcgctgtttagttcggtttatgaagggctgattgcggtggatccgcacggttacattaccgccatcaatcgtaacgcaagaaagatgctggggctgagttcccccggacggcaatggttgggtaaacccattgctgaagtggtcaggcccgccgatttctttaccgaacagattgatgaaaaacgtcaggatgtggtggctaactttaacggtctgagcgttattgccaatcgggaagctattcgttcaggtgatgatttgctgggggccattatcagctttcgcagtaaagacgaaatttccaccctcaatgcgcaactgacgcaaataaaacaatacgttgagagccttcgtacattgcgacacgagcatctcaattggatgtcgacgctcaatggtctgttgcagatgaaagagtatgatcgcgtgctggcgatggtgcagggggagtctcaggcccagcaacagcttattgacagcctgcgcgaggcgtttgccgatcgccaggtggcggggctgctttttggtaaagtgcagcgcgcccgggaactggggctaaaaatgatcattgtccccggtagccagctttcgcaactgccgccaggactggatagcaccgagtttgcagccattgtgggcaatttacttgataacgccttcgaagccagcctgcgtagcgatgaaggaaacaagatcgttgaattattcctcagcgatgaaggcgatgatgtggtgattgaagtcgccgatcagggctgcggcgttccagagtctctacgagacaaaatatttgagcagggggtcagtacgcgtgctgacgagcccggtgaacatggcattgggttgtacttgattgccagctacgtaacgcgctgcggtggtgttatcactctcgaagataatgatccctgcggtaccttattttcaatctatattccgaaagtgaaacctaatgacagctccattaaccctattgatcgttga

SEQ ID NO: 460622 - DNA, 681 bp, Shigella boydii
atgacagctccattaaccctattgatcgttgaggacgaaacgccgctggcagagatgcatgcggaatatattcgtcacattcccggattcagtcagatattactggcgggaaacctggcgcaggcccgaatgatgatcgagcgttttaagccggggctaatcttgctcgataactatcttcctgacggcagagggattaatttattgcatgaactggtgcaggcgcattatcccggcgacgtggtgtttaccactgcagccagcgatatggaaacggtgtctgaagccgtacgttgtggtgtatttgattatctcattaagcccattgcctatgaacggctggggcaaacgctaacccgtttccgccagcgtaaacatatgctggaaagtattgatagcgccagccagaagcaaattgatgagatgtttaatgcctatgctcgcggtgaacctaaagacgaactgccgaccggcattgatcccttgacgctaaacgcggtgcgaaaactgtttaaagagcctggtgtgcaacatacggcagaaacggtggcgcaggcactgaccatcagccgcaccactgccagacgttatcttgaatattgcgccagccgccatctgattattgctgaaattgttcacggcaaagttggcagaccacaacgcatataccacagtgggtga

SEQ ID NO: 460623 - DNA, 1386 bp, Shigella boydii
atgctgacattcattgaactccttattggggttgtggttattgtgggtgtagctcgctacatcattaaagggtattccgccactggtgtgttatttgtcggtggcctgttattgctgattatcagtgccattatggggcacaaagtgttaccgtccagccaggcttcaacaggctacagcgccacggatatcgttgaatacgttaaaatattactaatgagccgcggcggcgacctcggcatgatgattatgatgctgtgtggatttgccgcttacatgacccatatcggcgcgaatgatatggtggtcaagctggcgtcaaaaccattgcagtatattaactccccttacctgctgatgattgccgcctattttgtcgcctgtctgatgtctctagccgtctcttccgcaaccggtctgggtgttttgctgatggcaaccctatttccggtgatggtaaacgttggtatcagtcgtggcgcagctgctgccatttgtgcctccccggcggcgattattctcgcaccgacttcaggggatgtggtgctggcggcgcaagcttccgaaatgtcgctgattgacttcgccttcaaaacgacgctgcctatctcaattgctgcaattatcggcatggcgatcgcccacttcttctggcaacgttatctggataaaaaagagcacatctctcatgaaatgttagatgtcagtgaaatcaccaccactgctcctgcgttttatgccattttgccgttcacgccgatcatcggtgtactgatttttgacggtaaatggggtccgcaattacacatcatcactattctggtgatttgtatgctgattgcctccattctggagttcctccgcagctttaatacccagaaagttttctctggtctggaagtggcttatcgcgggatggcagatgcgtttgctaacgtggtgatgctgctggttgccgctggggtattcgctcaggggcttagcaccatcggctttattcaaagtctgatttctatcgctacctcgtttggttcggcgagtatcatcctgatgctggtattggcgattctgacaatgctggcggcagtcacgaccggttcaggcaatgcgccgttttatgcgtttgttgagatgatcccgaaactggcgcactcttccggcattaacccggcgtatttgactatcccgatgctgcaggcgtcaaaccttggccgtaccctttcgcccgtttctggcgtagtcgttgcggttgccgggatggcgaagatctcgccgtttgaagtcgtaaaacgcacctcggtaccggtgcttgttggtttggtgattgttatcgttgctacagagctgatggtgccaggaacggcagcagcggtcacaggcaagtaa

SEQ ID NO: 460624 - DNA, 273 bp, Shigella boydii
atggcatttaaggactcgtggaacaaatgggaaccgattgccggatacggatgggaaagtacctggcgaccgctggcggatgaaaattttcatttaggtctgggattcaccgctggcgtaacggcacgcgataactggaattacatccctctcccggttctactgccattggcctccgtgggttatggcccagtgacttttcagatgacctacattccgggtacctacaacaatggcaatgtgtactttgcctggatgcgctttcagttttga

SEQ ID NO: 460625 - DNA, 210 bp, Shigella boydii; identical to SEQ ID NO: 291

SEQ ID NO: 460626 - DNA, 384 bp, Shigella boydii
gtgttacaacttcttttagcagtttttattggcggtggtacgggaagcgtggcgagatggctgttaagtatgcgatttaacccactgcatcaggcgattccgttggggacgctgacagcaaacctgattggggcattcatcataggaatgggattcgcatggttcagcaggatgacgaacattgatccagtgtggaaagtattaatcaccaccggattttgtggcggtctaacaaccttctcaacattttcggcagaagtggtgtttttgttacaagagggtcgctttggctgggcattactgaacgttttcgtcaaccttctggggtcttttgccatgacagcactggctttctggctgttttcggcctcaaccgcacactaa

SEQ ID NO: 460627 - DNA, 789 bp, Shigella boydii
atgctggttgctgcaggacagtttgctgttacatctgtgtgggaaaagaacgctgagatttgtgcctcgttgatggcgcaggcggcggaaaacgacgtatcgctgtttgtcctgccggaagcattgctggcacgcgatgatcatgatgcagatctatcggttaaatcagcacagctgctggaaggcgaattcctcggacgtttacggcgagaaagtaaacgtaacatgatgacgacaattctgacgattcatgttccttcaacgccggggcgcgcatggaatatgctggtggcacttcaggcaggaaacatcgtcgcccgttatgccaaactgtatctctatgatgcatttgccattcaggaatcacgccgtgttgatgctggtaatgaaatcgctccgttactggaggtggaagggatgaaggtcggtctgatgacctgttatgacttacgctttccagagctggcgctggcacaggcattacagggagctgaaatcctggtacttcctgccgcctgggttcgcgggccgctcaaagagcatcactggtcaacgttgcttgccgctcgtgcgctggataccacctgttatatggtggcggcgggcgagtgcgggaacaaaaatatcgggcaaagccggattatagatccctttggcgtcaccattgcggcagcgtcagaaatgcctgcactcattatggcggaagtgacgcccgaacgtgtgcgtcaggtgcgcgcgcaactgcccgtcttaaacaaccgtcgctttgcgccgccgcaattattatga

SEQ ID NO: 460628 - DNA, 204 bp, Shigella boydii
atgggtgagattagtattaccaaactgctagtagttgcggcgctggtcgttctgctgtttgggactaagaagttacgtacgctgggtggagaccttggagcggccattaaagggttcaagaaggcgatgaatgatgatgatgctgcggcgaaaaaaggcgcagacgttgatcttcaggctgaaaagctctctcataaagagtga

SEQ ID NO: 460629 - DNA, 966 bp, Shigella boydii
atgagtaaacccattgtgatggaacgcggtgttaaataccgcgatgccgataagatggcccttatcccggttaaaaacgtggcaatagagcgcgaagccctgctgcgcaagccggaatggatgaaaatcaagcttccagcggactctacacgtatccagggcatcaaagccgcaatgcgcaaaaatggcctgcattctgtctgcgaggaagcctcctgccctaacctggcggaatgcttcaaccacggcacagcaacgtttatgatcctcggcgctatttgtacccgccgttgtccgttctgtgatgttgcccacggtcgcccggtagctcctgatgccaatgaaccagtgaaactggcgcagaccattgccgatatggcgctgcgttatgtggttatcacctccgttgaccgtgatgacctgcgcgatggcggtgcccagcactttgcggattgcattactgccattcgggaaaaaagcccgcaaatcaaaattgaaactctggtgccggatttccgtggtcgtatggatcgtgctctggatattctgactgcaacgccaccagatgtgttcaaccataacctggaaaacgtaccgcgtatttaccgtcaggtacggcctggtgcagattacaactggtcgctgaagctgctggaacgctttaaagaagcgcatccggaaatcccgaccaagtctggtctgatggtgggactgggtgaaaccaatgaagaaattattgaggtaatgcgcgacctgcgccgtcatggtgtgacgatgttaacgctggggcaatatttgcagccaagccgccatcacctgccggttcaacgttacgttagcccggatgagttcgacgaaatgaaagccgaagcgctggcgatgggctttacccatgctgcatgcggtccgtttgtccgctcttcttaccacgccgatttgcaggcgaaagggatggaagttaagtaa

SEQ ID NO: 460630 - DNA, 441 bp, Shigella boydii
atgttttgcaccaatcgtacggtgcaacatcatgttctgttcaccgacaatatggtgttaatttgccgcgagggaaatccactactctctttagaagatgacagagagactatcgacaacgctgcgcatgtacttctgttaccggaagagcaaaatttcagcggtctgcggcagagagttcaagaaatgtttccggaccggcaaatcaatttcaccagctacaacattttgacaatcgctgcactggttgccaacagtgacatgttagcgattattcccagccgtttttataacctgtttagccgctgctggccgctggaaaaactgccttttccgtccttaaataaggagcaaatagatttctctatccactacaacaaattcagcctgcgtgatcccatcctgcacggagtaatagatgttatccgtaatgcattttga

SEQ ID NO: 460631 - DNA, 243 bp, Shigella boydii
atgaactctctggcaggtatagatatgggcagaattttactcgatttatcgaatgaggtgattaagcaacttgatgatctcgaggtgcagcgtaatcttcctcgtgcggacctattaagggaagcggtagatcaatacctgataaatcaatcgcaaacagcaagaaccagtgttcctggcatctggcaagggtgtgaggaagatggtgtcgaatatcagcgtaagctgcgcgaggaatggtaa

SEQ ID NO: 460632 - DNA, 930 bp, Shigella boydii
atgagtattcgcataatcccgcaagatgagctgggttcgagcgagaaacgtacggcggatatgattccgccgttattgttccctcggctcaagaatttatacaaccgccgcgccgagcgtctgcgcgagctggcagaaaataatccgctggatgattacctgcgctttgctgcgcttatcgcccacgcccaggaagtggtgctgtacgaccatccgctggagatggatctgaccgcgcgcattaaagaagccagcgcacagggcaagcccccgctggatattcacgttctgccgcgtgataagcactggcaaaagctgctgatggcgctgattgctgagctgaaacctgaaatgagcggcccggcgctggcagtgattgagaatctggagaaggcatcgactcaggagctggaagatatggccagcgcactgtttgcctctgatttctcatccgtcagcagcgataaagcgccgtttatctgggctgcactgtcgctctactgggcgcagatggccaatctgatccccggcaaagcccgcgctgaatacggcgagcaacgtcaatattgcccggtttgtggttctatgccggtgtccagcatggtgcaaattggcaccactcagggtctgcgttacctgcactgcaacctgtgtgaaaccgaatggcacgtagtgcgcgtaaaatgcagcaactgtgaacagagcggcaaactgcattactggtcgctggatgacgaacaggccgcgattaaagccgaaagctgcgatgactgcggcacttacctgaagattctttatcaggaaaaagaaccgaaagttgaagccgtggcagatgacctcgcttctctggtactggacgcgcgaatggagcaagaaggctatgcccgcagttccatcaacccgttcctgtttccgggtgaaggggagtaa

SEQ ID NO: 460633 - DNA, 636 bp, Shigella boydii
atgaaacgacgtgacaccatcgtgcgctacaccgcgccggaacgtatcaaccactggatcaccgccttctgcttcatcctggcggcggtgagcgggctgggctttttgttcccgtccttcaactggttgatgcaaatcatgggcacaccgcagctggcgcgaattctgcacccgtttgtcggcgtggttatgtttgcctcgttcatcatcatgtttttccgttactggcatcacaacctaatcaatcgggatgatatcttttgggtgaagaatattcgtaagatcgtcgtcaacgaggaagtaggtgacaccgggcgttataacttcggtcagaaatgcgttttctgggcggcgattattttcctggttctgctgctggtgagcggcgtgattatctggcgtccttattttgcgcctgctttctcaatcccggtgatccgattcgcgttaatgctgcattcatttgccgcagtggcgttaattgtggttatcatggtgcatatctacgccgccctttgggtgaaaggcacgattaccgccatggtggaaggatgggttaccagcgcctgggcgaagaaacatcacccgcgctggtaccgtgaggtccgcaagacaacggaaaagaaagctgaatga

SEQ ID NO: 460634 - DNA, 903 bp, Shigella boydii
atggcttatcaatctcaagatatcattcgtcgttccgcgactaacggtctgacccccgcgcctcaggcgcgggacttccaggaagaagtggcgaaactcatcgacgtcaccacctgtatcggctgtaaagcctgtcaggtggcgtgttcagagtggaacgacattcgcgataccgtcggcaataacattggggtgtacgacaaccccaatgatttaagtgccaaatcgtggacggtgatgcgcttctcggaagtggagcagaacgacaaactggaatggctgatccgcaaagacggctgtatgcactgttccgatccaggctgtctgaaagcgtgcccggcggaaggtgcaattattcagtatgccaacggtatcgtcgacttccagtccgagcagtgcattggctgcggttattgcattgcgggctgtccgttcgacattccgcgcctcaacccggaagacaaccgcgtctacaaatgtacgctgtgcgttgaccgcgtggtggttgggcaagaaccagcctgcgtgaagacctgcccaacgggcgcgattcacttcggtacgaaagagtcgatgaaaacgctggcgagcgagcgcgtggcggagctgaaaacccgcggttacgacaatgcgggcctgtacgatccggcaggcgtcggtggtacacacgttatgtacgtgctgcaccatgctgacaagccaaatctgtatcatggcttgccggagaacccggaaatcagcgaaaccgtgaaattctggaaaggcatctggaaaccgctcgcagctgttggctttgcggctaccttcgcagccagtatcttccactacgtgggtgtcggtccgaaccgtgcggatgaggaagagaataatctgcacgaagagaaagacgaggagcgcaaatga

SEQ ID NO: 460635 - DNA, 2415 bp, Shigella boydii
atgaccaaccactgggtcgacatcaagaacgccaacctcgtcgtggtgatgggcggtaacgccgctgaagctcacccggtcgggttccgctgggcgatggaagccaaaattcacaacggcgcgaagctgattgtgatcgatcctcgctttacgcgtacggcggcggtagctgactactatgcccctattcgttccggtactgacattgctttcctgtcaggcgtattgctgtacctgctgaacaatgaaaaattcaaccgcgaatacaccgaagcctataccaacgccagcctgatcgtgcgtgaggattacggctttgaagatggcctgttcaccggctatgacgcggaaaaacgcaagtacgataaatcctcctggacttacgaactggacgaaaacggcttcgccaaacgcgataccacgctgcaacatccgcgctgcgtgtggaacttgctgaaacagcacgtttcccgctacacgccagatgtggttgaaaacatctgtggtacgccaaaagacgcgttcctgaaagtctgcgaatacatcgcagaaaccagtgctcacgataaaactgcctcgttcctgtatgccctcggctggacgcaacactccgttggtgcgcaaaacattcgtacgatggcgatgatccagctgctgctcggcaatatggggatggcaggcggcggcgttaacgccctgcgcggtcactccaatattcaggggctgacggacctggggctgctgtcgcagagcctgccaggttacatgacgctgccaagcgagaagcagaccgatctgcaaacctaccttaccgccaacacgccaaaaccgctgctggaaggccaggtaaactactggggcaactacccgaaattcttcgtctctatgatgaaggccttctttggtgataaagcgacggcggaaaatagctggggctttgactggttgccgaagtgggataaaggctacgacgtcctgcaatacttcgagatgatgaaagagggcaaggtcaatggctatatctgccagggttttaaccctgttgcctcattcccgaacaaaaacaaagtgatcggttgtctgtcgaaactgaagttcctcgtcaccatcgacccgctgaacactgaaacctctaacttctggcagaaccacggtgagctgaacgaagttgactcgtcgaagatccagaccgaagtgttccgtctgccatcgacctgcttcgcagaagagaacggttcaatcgttaactcaggtcgctggttgcagtggcactggaaaggtgcggacgccccggggattgcgctgactgacggtgagatcctctccggtatcttcctgcgcttgcgcaagatgtatgccgaacagggtggcgcgaacccggatcaggtgctgaacatgacctggaactacgccattccgcatgagccgaagtcggaagaagtagcgatggagagcaacggtaaggcgctggccgatattaccgatccggcaaccggtgcggttatcgtcaagaaaggccaacaacttagctcgttcgcccaattgcgcgatgacggtacaacctcctgtggctgctggattttcgccggtagctggacgccggaaggcaaccagatggcgcgtcgtgataacgccgatccgtctggcctcggtaacacgctgggctgggcatgggcatggccgcttaaccgccgcattctgtataaccgcgcctccgcagatccgcagggtaacccgtgggatccgaagcgtcagttgctgaaatgggacggcactaagtggaccggctgggatattccggactacagcgcagcgcctccgggtagcggcgtcgggccgtttatcatgcagcaggaaggcatggggcgtctgtttgccctcgataagatggcggaaggtccgttcccggaacactacgagccgtttgaaacgccgctgggaactaacccgctgcatccaaacgttatctcgaacccggctgcacgtatctttaaagacgacgccgaagcattgggtaaagccgataagttcccgtatgtcggaaccacctatcgtctgaccgagcacttccactactggaccaaacacgcgctgttgaacgcgattttgcagccagagcagtttgtggaaatcggggagtcgctggcgaataaacttggcattgcccagggcgataccgtgaaagtctcctccaaccgtggctatatcaaagccaaagcggtggtgaccaaacgtattcgcacgctgaaagcgaacggcaaagatatcgataccatcggtattccgattcactggggctatgaaggcgtagctaaaaaaggctttattgccaatactttaacgccattcgttggtgatgcgaacacgcagacgccggagtttaagtccttccttgtgaatgtggaaaaggtgtaa

SEQ ID NO: 460636 - DNA, 588 bp, Shigella boydii
atgcaggtcagcagaaggcagttctttaagatctgcgctggcggtatggcaggcaccacggcagcggcactaggttttgcacccagcgtagcactcgcggaaacccggcagtataaactgctgcgcacccgcgaaacccgtaatacctgcacctattgttccgtaggctgtgggctgttgatgtacagcctcggtgacggagcaaaaaacgccaaagcatctatcttccatatcgaaggcgatccggatcacccggtcaaccgcggtgcactttgtccgaaaggcgctggcctggtggatttcatccactccgaaagccgtctgaagtttccggaataccgtgcgccaggttctgataaatggcagcaaatcagttgggaagaggcgtttgatcgcatcgccaaactgatgaaagaagaccgcgatgctaactacattgcgcaaaacgccgaaggcgtgactgttaaccgctggctctccaccgggatgctgtgtgcttccgcgtcgagtaacgaaaccggctatttaacgcaaaaattctcccgcgcgctgggtatgctcgcggtcgacaaccaggcgcgtgtctga

SEQ ID NO: 460637 - DNA, 834 bp, Shigella boydii
gtgaaaaaaacacagcgaaaagaaatcgaaaatgtgacaaatatcacaggtgttcgtcaaattgagttatgccggcgtgatgatttacaacacccacggttagatgaggtcgcggaagaagttcccgttgcgctggtctacaacggcatttcgcatgtggtgatgatggcgtcgcccaaagaccttgagtactttgcgctcggtttttcgctttccgaggggattatcgaaagtccgcgcgatatcttcggcatggatgtcgttccttcctgtaatggtcttgaagtacaaattgagctttccagccgccgctttatggggttgaaggagcgccgccgggcgctggcgggacgtacgggctgtggcgtatgcggcgtggagcaacttaatgacatcggaaaaccggtgcagccgctaccgttcacccagacgtttgatctcaacaaactggatgatgcattacgtcatctcaacgattttcagccagtggggcaactgactggttgtactcacgccgctgcctggatgttgccatctggcgaactggtcggcgggcatgaagacgtgggtcgccatgtggcgctggacaaactgttaggccgccggtcacaagaaggggaaagctggcagcaaggtgcggtactggtttccagtcgtgccagttatgaaatggtgcaaaagtcggcgatgtgcggcgtagagattttgtttgcggtgtctgccgcgaccacgcttgctgtagaagtggctgagcgctgtaatctgacactggtaggtttttgtaaaccgggtcgggcaacggtttatacccatccgcagcgtttgagcaattaa

SEQ ID NO: 460638 - DNA, 948 bp, Shigella boydii
atgaaaaggaatttattatcttccgctattatagtcgccatcatggccctcggtctgacgggttgtgatgataaaaaagccgaaacagaaacgcccccgcctgccaatagtcaacctgccgcaccagctcctgaagctcccgttgcaaaagcagaagctaaacctgaaacacctgcgcaaccggtggtcgatgaacaagcggttttcgacgaaaaaatggatgtctatatcaagtgctataacaagttacagatccctgtacagcgcagtctggcgcgttatgttgactggctgaaagattttaaacaggggcctaccggtgaagagcgtactgtttatggcatctacggcattagtgaatccaacctcgctgagtgtgaaaaaggcgtaaaaagtgctgtggcgttaacgcctgcgctgcaaccaattgatggcgtggcggtgagttatatcgatgctgccgtggcgttgggtaataccattaacgaaatggataaatattacacccaggaaaattataaagacgatgcgtttgcgaaagggaaaacgctgcaccagacattcttaaaaaatctggaagcctttgaacctgtagcagaatcttatcatgcggcgattcaggaaattaacgataagcgccagcttgcggaactgaaaaatattgaagaaagagaagggaaaatattccactactattctctggcagtcatgatttcagcgaaacaaattaataacctgatatcgcaagagaagtttgatgttgatgcggcaatgaagaaagtgtctgaattggaaacgctggtggcgcaggccaaagaagcggataaaggcggcatgaatttctcgtttattaattcggcaggccagtatcaactcgaggctaaaaaatacgttcgccgcatcagagataaagtcccgtactctgaggtaatgactccaacttactga

SEQ ID NO: 460639 - DNA, 153 bp, Shigella boydii
atgagcagaaaaaaccaacgttactctaaagagttcaaagccgaagctgtcagaacggttcttgaaaatcaactttcgatcagtgaaggcgcttcccgattatcccttcctgaaggcactttaggacaatgggtaatgctgccaacttactga

SEQ ID NO: 460640 - DNA, 312 bp, Shigella boydii
atgttcagaccttttttaaactctcttatgctcggcagtttgttttttccttttattgccatcgcaggaagcaccgcgcaagggggcgtgatccatttttatggccaaattgtggaaccggcatgtgacgtcagcacccagtcatcacccgtagaaatgaactgcccacagaatggttctgttccgggaaaaacctattccagcaaagcgttaatgagcggcaatgtcaaaaacgcgcaagtagcctcagtaaaagtgcagtatattgataaacagaaaaagctggctgtaatgaacatcgaatataactaa

SEQ ID NO: 460641 - DNA, 534 bp, Shigella boydii
atgaaaacgcgtattcatgttgtgcagggtgatattaccaaactggccgttgatgtgattgtgaatgcggctaatccgtcattaatgggaggcggcggcgtcgatggggccattcatcgcgcagcgggtccggccctgctggatgcctgtttaaaagtcaggcaacagcagggcgattgccctacggggcatgccgttattacgcttgcaggcgatcttcccgctaaagccgtagtacacaccgtcgggccagtctggcgtggtggtgaacaaaacgaagaccagcttttgcaggatgcctatctcaatagtctgcgactggtggcggcaaacagctatacgtcagtggcatttcctgcaatcagtactggggtttatggttaccctcgtgcggcagcggctgaaatcgcagtaaaaaccgtttcagaatttattacccgtcacgctttacccgaacaggtatactttgtctgttatgatgaagaaaacgcccacctctacgaaagactccttacccaacaaggagatgaatga

SEQ ID NO: 460642 - DNA, 1482 bp, Shigella boydii
atgatgaagaaaacgcccacctctacgaaagactccttacccaacaaggagatgaatgatttgccccggctggcgagcgcggtgctgccactgtgttcgcaacatcccggtcagtgtggtcttttccctctggagaaaagtctggatgcgtttgccgcccggtatcgtctggccgaaatggcagagcatacgctggatgttcagtattacatctggcaggacgatatgtcgggtcggttactgttttccgccctgttagccgcagcaaagcgtggcgttcgcgtccgtttgttgctggacgacaacaatacgcccggacttgacgatattttacgcttgcttgacagccatccccgcattgaagtccggctttttaatcctttctcgtttcgcttgctgcgtccgcttggttatatcactgacttttcccgtctcaatcgccgtatgcacaataaaagtttcactgtcgatggcgtggttaccttggtgggaggacgaaatattggtgatgcctattttggggcaggggaagagccacttttttcggatttagatgttatggcaataggacccgtggtagaggacgttgccgatgatttcgcccgctactggtattgcaaatcggtttcacccttacagcaggtgctggatgtcccggaaggtgaaatggcggatcgcatcgagttacccgcctcctggcataacgatgccatgacgcatcgttacttacgccaaatggaatccagtccgtttataaatcatctggttgatggaacgttgccgcttatctgggcgaaaacacgtttattaagtgatgatccggcgaaaggggagggcaaggcaaaacggcattcactgttaccgcagcgcctgttcgatatcatgggctcacccagtgaacgcatcgatattatctcttcctattttgtaccgacacgcgcaggtgtggcgcaactcttacggatggtgagaaaaggggtaaagattgcgatcctaaccaattctcttgccgctaacgatgttgctgtcgtccatgccggatacgcgcgctggcgcaaaaaattgctccgctatggcgtggaattatatgaactcaagccgacgcgtgaacaaagtagtacgttacacgatcgcggcataaccggtaattccggtgccagcctgcatgctaaaacctttagcatcgatggtaaaacggtgtttatcggctctttcaatttcgatccacgttcgacattgctcaatactgaaatgggcttcgtgatagagagcgaaacgctggcacagttaattgataaacgctttatacagagccagtatgatgcggcctggcagctccgtctggacaggtggggacggatcaactgggttgatcgtcatgcaaagaaagagatgattctcaaaaaagaacccgccaccagtttctggaagcgggttatggtcagactggcgtcgatattgcccgtggaatggttattgtaa

SEQ ID NO: 460643 - DNA, 1158 bp, Shigella boydii
atgaatccagtacccgcgcaacgtgaatatttcctcgactccatccgcgcctggctgatgttgttagggatcccttttcatatttctttaatctattcgagccatacatggcatgtgaatagcgccgaaccgtcattgtggctgaccctttttaatgacttcatccactcgttccgcatgctggtatttttcgttatatccggctacttttcctacatgctttttttacgctatcccttgaaaaaatggtggaaagtacgtgtcgaacgtgtaggtatcccgatgttaacagccatccccttactgacattgccgcaatttattatgctgcaatacgtcaaagggaaagcggaaagttggcctgggctgtcattgtatgacaaatataatacgttggcctgggaattaatatcacacctgtggtttttactggtgttagtagtcatgacgacgctgtgcgtatggatatttaaacgcatcagaaataatttagaaaattctgataaaacgaataaaaaattctcgatggtaaaactatcggtgatttttttatgcctcggcatcggctatgcggtaataagaagaacgatttttattgtgtatccgcccattctgagtaatggcatgttcaattttattgtcatgcaaacgctattttatttgccgttctttatcctcggtgcactggctttcattttccctcatcttaaagccttgtttaccacgccgtctcgtggctgtacccttgcagcagcattggcatttgtcgcttatttactcaaccaacgctatggcagtggcgatgcctggatgtacgaaaccgagtcggtgatcaccatggtcctcggtctgtggatggtgaatgtggtcttctcctttggccaccgtttgcttaacttccagtcagcgcgggtgacttactttgttaacgcatcgctatttatctatctggttcaccacccgttaacgctgtttttcggcgcatacattacaccgcacatcacctccaactggcttggttttctctgtggcctgatattcgtagtagggattgcgataattctgtatgaaattcatttacgcatcccgttactgaagtttttgttttctggtaaaccggttgttaagcgtgagaacgataaagcaccagcccgttaa

SEQ ID NO: 460644 - DNA, 1503 bp, Shigella boydii
atgttaaccctgtatacatcttcaagctgggctttcagtattgatgatgtcgcaaagcaagctcaatccttagccgggaaaggctatgaggcgcccaaaagcaacttgccctccgttttccgcgatatgaaatacgcggactatcagcagatccagtttaatcatgacaaagcgtactggaacaatctgaagaccccattcaaactcgagttctaccatcagggtatgtacttcgataccccggtcaaaataaatgaagtgactgccaccgcagtcaaacgaatcaaatacagcccggattatttcactttcggcgatgttcagcatgacaaagacacggtaaaagaccttggttttgccggttttaaagtgctttacccgatcaacagcaaagataaaaacgatgaaatcgtcagcatgctcggggccagctatttccgcgtgattggtgcaggtcaggtttatggcctttctgcccgcggcctggcaattgataccgccttgccatcgggtgaagaatttccacgcttcaaagagttctggatcgagcgtccaaaaccgactgataaacgtttaaccatttatgcattgcttgactcgccgcgcgcgacaggtgcttacaaattcgtggttatgccagggcgtgacacggttgtggatgtgcagtcgaaaatctatctgcgcgataaagtcggcaaactgggggttgcaccgttaaccagtatgttcctgtttgggccgaaccaaccgtcgcctgcaaataactatcgtccggagttgcacgactctaacggtctctctatccatgccggtaatggcgaatggatctggcgtccgttgaataacccgaaacatttagcggttagcagcttctcgatggagaacccgcaaggcttcggtctgttgcagcgcggtcgtgatttctcccgctttgaagatctcgatgatcgttacgatcttcgtccaagcgcatgggtgactccgaaaggggagtggggtaaaggcagcgttgagctggtggaaattccaaccaacgatgaaaccaacgataacatcgtcgcttactggacgccggatcagctgccggagccgggtaaagagatgaactttaaatacaccatcaccttcagccgtgatgaagacaaactgcatgcgccagataacgcatgggtgcaacaaacgcgtcgttcaacgggggatgtgaagcagtcgaacctgattcgccagcctgacggtactatcgcctttgtggtcgattttaccggcgcagagatgaaaaaactgccagaggataccccggtcacagcgcaaaccagcattggtgataatggtgagatagttgaaagcacggtgcgctataacccggttaccaaaggctggcgtctggtgatgcgtgtgaaagtgaaagatgccaagaaaaccactgaaatgcgtgctgcgctggtgaatgccgatcagacgttgagtgaaacctggagctaccagttacctgccaatgaataa

SEQ ID NO: 460645 - DNA, 2514 bp, Shigella boydii
atgcccatcgccgcaagcgagaaagcggcattgccgaagagtgatatccgcgccgtacatcaggcgctggatgccgaacaccgcacctgggcgcgggaggatgattccccgcaaggctcggtaaaggcccgtctggaacaagcctggccagattcacttgctgatggacagttaattaaagacgacgaagggcgcgatcagctgaaggcgatgccagaagcaaaacgctcctcgatgtttcccgacccgtggcgtaccaacccggtaggccgtttctgggatcgcctgcgtggacgcgatgtcacgccgcgctatctggctcgtttgaccaaagaagagcaggagagcgagcaaaagtggcgtaccgtcggtaccatccgccgttacattctgttgatcctgacgctcgcgcaaactgtcgtcgcgacctggtatatgaagaccattcttccttatcagggttgggcgctgattaatcctatggatatggttggtcaggatttgtgggtttcctttatgcagcttctgccttatatgctgcaaaccggtatcctgatcctctttgcggtactgttctgttgggtgtccgccggattctggacggcgttaatgggcttcctgcaactgcttattggtcgcgataaatacagtatatctgcgtcaacagttggcgatgaaccattaaacccggagcatcgcacggcgttgatcatgcctatctgtaacgaagacgtgaaccgtgtttttgctggcctgcgtgcaacgtgggaatcagtaaaagccaccgggaatgccaaacactttgatgtctacattcttagtgacagttataacccggatatctgcgtcgcagagcaaaaagcctggatggagcttatcgctgaagtcggtggcgaaggtcagattttctatcgccgccgccgtcgccgcgtgaagcgtaaaagcggtaatatcgatgacttctgccgtcgctggggcagccagtacagctacatggtggtgctggatgctgactcggtaatgaccggtgattgtttgtgcgggctggtgcgcctgatggaagccaacccgaacgccgggatcattcagtcgtcgccgaaagcgtccggtatggatacgctgtatgcgcgctgtcagcagttcgcgacccgcgtgtatgggccactatttacagccggtttgcacttctggcaacttggcgagtcgcactactggggacataacgcgattatccgcgtgaaaccgtttatcgagcactgcgcactggctccgctgccgggcgaaggttcctttgccggttcaatcctgtcacatgactttgtagaagcggcgttgatgcgccgtgcaggttggggggtctggattgcttacgatctcccgggttcttatgaagaattaccgcctaacttgcttgatgagctaaaacgtgaccgccgctggtgccacggtaacctgatgaacttccgtctgttcctggtgaagggtatgcacccggttcaccgtgcggtgttcctgacgggcgtgatgtcttatctctccgctccgctgtggtttatgttcctcgcgctctctactgcattgcaggtagtacatgcgttgaccgaaccgcaatacttcctgcaaccacggcagttgttcccggtgtggccgcagtggcgtcctgagctggcgattgcactttttgcttcgactatggtgctgttgttcctgccgaagttattgagcattttgcttatctggtgcaaaggaacgaaagaatacggcggcttctggcgcgttacattatcgttgctactggaagtgcttttttccgtgctgctggctccggtacgcatgctgttccatacggtcttcgttgtcagcgcgttccttggctgggaagtggtgtggaattcaccgcagcgtgatgatgactccacttcctggggtgaagcgttcaaacgccacggctcacagctgctgttagggttagtgtgggctgttgggatggcgtggctggatctgcgtttcctgttctggctggcaccgattgtcttctcgttgatcctgtcaccgtttgtttcggtgatttccagccgtgccaccgttggtctgcgaaccaaacgctggaaactgttcctgatcccggaagagtattcaccgccgcaggtgctggttgataccgatcgcttccttgagatgaatcgtcaacgctcccttgatgatggttttatgcacgcggtgtttaacccgtcatttaacgctctggcaaccgcaatggcgaccgcgcgtcaccgcgccagtaaggtgctggaaatcgcccgtgaccgccacgttgaacaggcgcttaacgagacgccagagaagctgaatcgcgatcgtcgcctggtgctgctaagcgatccggtgacgatggcccgtctgcatttccgtgtctggaattccccggagagatattcttcatgggtgagttattacgaagggataaagctcaatccactggcattgcgtaaaccggatgcggcttcgcaataa

SEQ ID NO: 460646 - DNA, 177 bp, Shigella boydii
atgagtcagcaagtagcggtggaaaaactggtcgtggacgcctgggaacagcgttcatatcagcacctgtggcaggcgattacgttatcgaaaacggtaccgagcgcctcggtcgccaaagctattctggatgagttgctggaggccaacaaagcgtactggccagagttacgttaa

SEQ ID NO: 460647 - DNA, 948 bp, Shigella boydii
atgaccaaattctcagtggttgtcgcaggcggtggaagcacctttacgccaggtatcgtgttgatgctcctggcgaatcaggaccgtttcccgcttcgtgcactgaaattttatgataacgatggtgcgcggcaggaagtgattgccgaagcctgtaaagtcatccttaaagagaaagcgccggacattgcgtttagttacaccaccgatcctgaagtggcattcagcgacgttgattttgtcatggcgcacatccgcgtcggcaaatacccgatgcgcgaactggatgaaaaaatcccgctgcgccacggcgttgttggtcaggaaacttgcggacccggcggaatagcgtacggcatgcgttccattggcggcgtcctggaactggtggattatatggaaaaatattcaccaaatgcctggatgctcaactactccaacccggcagcaattgtcgcagaagccacgcgtcgtctgcgcccgaatgcgaaaatcctcaacatctgtgacatgccaatcggtattgaaagccggatggcgcaaattgttgggatgcaagatcgcaaacagatgcgcgtgcgctactacggcctgaaccactttggctggtggacatcaattgaagatttgcagggcaacgacctgatgccccagctgcggcaatatgtctctaagcacggttatgttccaccgcagcaagatacacatactgaagcgagctggaacgacacctatgcaaaagcgcgggatgtccaggcactggacccggatacattgccgaacacctatctgaaatattatctcttcccggattatgttgttcagcattccaaccctgaacatacccgcgcgaatgaggtgaatggaacatcgcgagaaacaggttttcgatgcttgccgcgccattacagcggcaggaaattcagcggcggccaagctggagattga

SEQ ID NO: 460648 - DNA, 1617 bp, Shigella boydii
atgctcagtcaaattcaacgctttggcggcgcgatgttcacgccagtgctgctgtttcccttcgccgggattgtggtgggtcttgccatcttgctgcaaaacccgatgtttgtcggggaatcactgaccgatccgaacagtttattcgcgcaaatcgtacacattattgaagagggcggttggacggtattccgtaatatgccgctgatttttgctgtcggtttacccattggccttgctaagcaagcgcaggggcgtgcttgtctggcggtgatggtgagtttcctgacctggaactatttcatcaacgcgatgggaatgacctggggaagctacttcggcgtcgatttcactcaggacgcggtggcaggtagcggtctgacaatgatggccgggattaaaaccctcgataccagcattatcggcgcaattatcatttccggcattgtgacggcgctgcataaccgtctgttcgataaaaaactgccggtttttctcggcattttccaggggacgtcttatgtggtgattatcgccttcctggtgatgatcccctgtgcctggctgacgttgctcggctggccaaaagtacaaatggggattgaatctctgcaagcgttcctgcgttcggcgggtgcacttggggtgtgggtttacaccttcctcgaacgtattctgatcccaaccggtttacaccacttcatctacggacagtttatctttggtccggcagctgttgaaggcggcattcagatgtactgggcgcagcatctgcaagagttcagtctgagcgccgagccgctgaaatcgttgttcccggaaggcggttttgccctgcacggtaactcaaaaatctttggtgccgtgggcatttctttagcgatgtacttcactgccgcaccggaaaatcgggtaaaagtggcgggcttgctgattcccgcaaccttaaccgccatgctggtgggaattaccgaaccgctggaatttaccttcctgttcatttcaccgttgctgtttgcggtacacgccgtgctggcggcctcaatgtcgaccgtgatgtatctctttggtgtggtgggcaacatgggcggaggtctgattgaccaggttttaccgcaaaactggatcccgatgttcagcaaccacgcggatatgatgctgacccaaatcgccattgggttgtgctttaccctgctgtacttcgtggttttccgcacactgattctgcaattcaacatgtgcacgccgggacgtgaagatgcggaagtgaaactctactcaaaagccgaatacaaagcctcgcgaggccaaaccaccgctgcagagccaaaaaaagagctggatcaggctgccggtatcctgcaagccctgggcggggtcggcaatatctccagcattaacaattgcgcgacgcgtttacgtattgcactgcatgacatgtcacaaacgctggatgacgaagtctttaaaaagctgggagcgcacggcgtcttccgtagtggcgatgccattcaggtgatcattggtctgcatgtatcccagctgcgtgaacagctcgatagcttaattaattctcatcaatcagcagaaaatgttgccattacggaggcagtataa

SEQ ID NO: 460649 - DNA, 717 bp, Shigella boydii
atgatctacaaaagcattgcggagcggttaagaattcgacttaattccgcggatttcacgctaaacagccttcttcccggtgaaaaaaagttggcggaagaatttgcagtatcccggatgaccatccgtaaagcgattgacctgctggtagcgtgggggctggtggtccgccgccacggcagcggcacttacctggtgcgcaaagatgtgctgcatcaaaccgccagcctgaccggactggtggaggtgttaaaacggcagggaaaaacggtcaccagccaggtgctgatttttgaaatcatgcctgcgcctccggccattgccagccagttacggattcaaatcaacgagcagatctacttctcccgtcgcgttcgttttgtggaagggaaaccgctgatgctggaagacagctatatgccggttaaactgttccgtaatctttcgctgcaacatctggaagggtcgaagtttgaatatattgaacaagagtgtgggattttgattggcggtaattatgaaagcctgacgccggtgctcgccgatagactgctggcgcggcaaatgaaggtagcggaacacacgccactgctgcggatcacctcgttgtcatatagcgagagcggggagtttttgaattattcagtgatgttcagaaatgccagcgaataccaggtggagtaccatttacggcgactccacccggaaaagagttaa

SEQ ID NO: 460650 - DNA, 1662 bp, Shigella boydii
atgagtgatatagcattaacggtcagtattctggctttggtggcagtcgtcggtttgtttatcggcaacgtcaaatttcgcggcataggattaggtattggcggcgtgctgtttggtgggatcatcgtcggccattttgtttctcaggcggggatgacattaagtagcgatatgctgcatgttattcaggaatttggcctgatcctgttcgtttataccatcgggattcaggtagggccgggcttctttgcctcattgcgcgtctccggattacgcctcaacctgtttgctgttctaatcgtcatcatcggtggtctggttaccgccatcctgcataaactgtttgatattccactgccggtagtgatggggattttctccggtgcggttaccaatacgccagcgctgggggcagggcagcagatcttgcgcgacctgggtacaccaatggaaatggtcgatcagatggggatgagttacgcgatggcgtatccattcggcatttgcgggattttgttcaccatgtggatgttgcgggttattttccgcgtcaatgtcgagacagaagctcagcagcacgagtcttcacgcaccaatggcggcgcgctgatcaagactatcaatattcgcgttgagaaccctaacctgcatgatttagccattaaagatgtaccgattctcaacggcgacaaaattatctgctcgcgtctgaaacgcgaagaaaccctaaaagttccttcgccagataccattatccaactgggcgatttgctgcatctggtggggcagccagcggatttacataatgcgcaactggtgattggtcaggaggtcgatacttcgctgtccacgaaaggcactgatttgcgcgtcgagcgtgtggtggtcaccaatgaaaacgtgctcggaaaacgtattcgcgacctgcactttaaagaacgctatgacgttgttatctcgcgcctgaaccgtgccggggtcgaactggtcgccagtggcgatatcagcctgcagttcggcgatatcctcaatctggtggggcgtccgtccgcaattgatgccgttgccaatgtgctggggaatgcgcagcaaaaactgcaacaggttcagatgctgccagtgtttattggcatcgggcttggcgtattgttaggttctattcccgtctttgtgcctgggttcccggccgcgttgaaactggggctggcgggcggtccgctgattatggcgttgatcctcgggcgtatcggcagtatcggcaagctgtactggtttatgccgccaagtgccaacctcgcgctgcgggagctggggatcgtgctgttcctctcggtcgttggtctgaaatctggtggggattttgtgaataccctggtcaatggcgaagggctaagctggattggttatggtgccctgatcaccgccgttccgctgattactgttggcattctggcgcggatgttagccaaaatgaattacctgaccatgtgcgggatgctggcaggttccatgaccgatcctccggcgctggcgtttgctaataatcttcatccaaccagtggtgcggcggcgctctcttacgccactgtctatccgttagtgatgtttctgcgaattatcaccccccaattactggcggtgctcttctggagtatcggttaa

SEQ ID NO: 460651 - DNA, 429 bp, Shigella boydii
atgcgtaacttcgatttatccccactgatgcgtcaatggatcggttttgacaaactggccaacgcactgcaaaacgccggtgaaggccagagcttcccgccgtacaacattgagaaaagcgacgataaccactaccgcattacccttgcgctggcaggtttccgtcaggaagatttagagattcaactggaaggtacgcgcctgagcgtaaaaggcacgccggagcagccaaaagaagagaaaaaatggctgcatcaagggcttatgaatcagccatttagcctgagctttacgctggctgaaaatatggaagtctctggcgcaaccttcgtaaacggtttactgcatattgatttaattcgtaatgagcctgaacccatcgcagcgcagcgtatcgctatcagcgaacgtcccgcgttaaatagctaa

SEQ ID NO: 460652 - DNA, 414 bp, Shigella boydii
atgcgtaactttgatttatccccgctttaccgttctgctattggatttgaccgtttgtttaaccacttagaaaacaaccagagccagagtaatggcggctaccctccgtataacgttgaactggtagacgaaaaccattaccgcattgctatcgctgtggctggttttgctgagagcgaactggaaattactgcccaggataatctgctggtggtgaaaggtgctcacgccgacgaacaaaaagagcgcacctatctgtaccagggcatcgctgaacgcaactttgaacgcaaattccagttagctgagaacattcatgttcgtggggctaacctggtaaatggtttgctgtatatcgatctcgaacgcgtgattccggaagcgaaaaaaccgcgccgtatcgaaatcaactaa

SEQ ID NO: 460653 - DNA, 261 bp, Shigella boydii
atgtcccataccggagggaaagaaggaacgtatcccggcacccgcgccagcgcaaccatgattggcgacgatgaaaccaactggggcactaagtcgctggcgattctcgatatgccgtttaccgctgtgatggacacgcttttactgccgtgggatgtgttccgcaaagacagctcggtgcgctcacgcgttgaaaaaagcgaagccaacgcgcaagccaccaatgcggttattccaccggccagaatgcctgataactga

SEQ ID NO: 460654 - DNA, 1014 bp, Shigella boydii
gtggttcatccgaagtcagagaaatatgttttcatccatggcccggaaaatcctgatgaaacatggtattacgatttccatcatcgacgcggagtcattgctgaaggcggcaaggtgagcaatctcgatgcaatggatattaccgcgccgtatacgccaggagcgctgcgcggcggcagccatgtgcatgtctttagcccgaacggtgaaagggtgagctttacctataacgaccatgtaatgcatgaactcgatccggcgctggatttgcgaaacgtcggtgttgctgcgccgtttggcccggtcaacgtacaaaagcagcatccgcgtgaatacagcggtagccactggtgcgtgctggtgagtaaaaccacgcccacgccgcagcctggcagcgatgaaatcaatcgtgcttatgaagaaggatgggtaggaaatcacgcgctggcgtttattggcgacacactttcgccaaagggcgagaaagtgccggagctgtttatcgttgagttaccgcaagatgaagctggctggaaagcggcaggtgatgcgccgttaagtggaacggaaaccaccctgcccgcgccaccgcgcggcgtcgtgcagcgacgtttaacctttacccaccatcgggcttatccggggttagtcaacgtcccgcgccactgggtgcgctgtaatccgcagggtacgcaaatcgcgtttttaatgcgtgatgataacggcattgtgcaactgtggcttatctcgccacagggcggcgagccgcgccagttaacccataacaaaacggatattcagtctgcatttaactggcatccgtcaggagaatggttgggctttgtgctggataatcgaattgcttgtgcccatgcgcaaagtggcgaggttgagtatttaaccgaaaaccacgccaatccaccttctgcggacgccgtggtcttctcgccggatggtcaatggctggcgtggatggaaggcggccagctgtggatcaccgaaactgatcgctaa

SEQ ID NO: 460655 - DNA, 189 bp, Shigella boydii
atgttgacccgcaaatgtatagatcccgttctgctctctgttggtgctgagaagctctcacaacgtgaatgggactggatgaagatgctcaaacccatggacccaccacctgcgatggtcgcggcctccatcctggagcgccgtggcgacacagcagcccttacccggctacaggataccgggggttaa

SEQ ID NO: 460656 - DNA, 1806 bp, Shigella boydii
atgattggtgatacgtggacggcgagcgatattttcgacagtacgcaaattcgcggcgcgcgtttgtatactgataacgatatgctacccgccagccagaatggctttgctcctgtggttcgtgggattgcaaagtccaacgccaccgtcatcattcggcagaatggctacgtgatttatcagtctgccgttccagaaggtgcttttgagatcaccgatctcaacaccgccagtacaggtggcgatttggacgtaaccatcaaagaagaagacggtagcgaacaacgattcacccaaccttatgcttcattggcgattcttaaacgtgaaggtcagacagatgttgatgtcagcgtgggtgaattgcgcgatgaagacggatttacaccggacgtccttcaggcgcaaatacttcatggtttttcccacgggatcactttatatggaggtatgcaggctgctgaaaattatggttctgcagctctgggtgtcggtaaagatcttggcgctttgggcgcaatttctttcgatgtgacacatgctcgtgcgaattttagccatgatgatacagaaacgggtcagtcatatcgctttctctattcaaaacgatttgacgacacagacactagcttgcgcctggttggctatcgttactccaccgagggctactataccctcaatgagtgggcatcgcggcgcaacagccctgaagacttttgggaaacaggtaaccgacgtagtcgcgtggagggaacgctaacgcagtcgttggggagagattatggcaatttatacctgacattaagccggcaacaatactggcataccgatgatgtcgaacgattaatgcaatttggctacagcagtagctggaagcgtctctcgtggaacgtctcctggagttattccaatactgccagacaggggacggggaacaaccatgccagtgataacaccagtgagcagatctacatgctctctttatctgttcctttatcgggctggtggggtaatagttacgccacctattctgtttcgcaaaacgataattccggtagctcacatcaactcggactcagcggtacggcgctggaaagaaataacctttcatggaatttaatgcagtcctataacagtcatgatgatgaggttggcggtaatatgtccctgacctatgatggctcttatggcacggtgaacggcagctataactacagccaaaattcccagaggctgaattatggtatcagagggggaattctggcacacagcgaaggggtaacgttaagtcaggagttaggtgaaactattgctcttgttaaagcacctggggccgccgggttagaaatagataatatgcgcggtgctgcgacggactggcgcggctatacggtcaagacacagctaaacccttatgatgaaaatcgggtagcaatcagcgataactatttctcgaagtcgaatatagaacttgataataccgtcgttacgatggttcccacgcgtggtgcagtggttaaagcggagtttgtgactcatgtgggttatcgcgttctcttcagagtgttaaatgcaaatggtaaaccggtaccttttggagccattgctgcgatacaagatgcaagtttggcagattcaggaattgtcggtgaccgtggcgaactttatctttctggtctaccagaaaaaggacaggttacgttatcctggggagaaaacgcctcaacaaaatgcatcttcaattattcactttcgacaccagaaagtgagagcggattaattgaacagggtgtgacatgtcattaa

SEQ ID NO: 460657 - DNA, 1074 bp, Shigella boydii
atgaacaagtatatcaaacagtggtgctttgctgtgtttatgctctcgttaagtagtgtagcacttgcagctcctaaaggtatctgtacccctgataatggcgtatttcacagtacgcttgatttctcgggatatcttattaccgcgaacgaaaataaggttggaacgacatttaacaccactgtaactaatggatcctcatatcctggacgctgtcattgtgatactggtaacgtaggagaattcccctatatctattatacgtcaaaaataaaccaggcattaacttatgctggggttcactctaatattaattattatgatcttaatccgaaccttgatgttgggattgctatagatattcttggggttgggtatgtgaatgcaccttttgaatatcatgctaacaacccgtctggtaatacaaagtacaattgcaaccgcattgaacctttaagtatatctagtggggctaaagcgatagtatatttttatatcaagaagacatttgcaggaaaattgattattcctgaaacaaagatagtgacattgtatggaacaattagccgtgacaccccggtggattactcacagccgatggctgatgtttatattcggggcgatattacagctccgcaaagttgcgaaataaataatttacagccagtttattttgattttaaagaaataccagctgcagatttttcatctgttgttggaagtgcggtaacaacacataaaattactaaaacggtcactattgagtgtgaaaacctggggatactgaataccgatgatatcagtacgtctttttatgctaccgaacccaatacggacaattcaatggtcgtaacttcaaactctaacgtggggataaaaatttacgacaaaaataataaggaaatcaaagtgaacggtggtgagttgccaacagacatgggtaaatcaacagtgtatggtgaaaaatcaggtagtgtaactttttcagctgctcctgcgagccttactggagctcgcccagccccggggcaatttactgcaacagcgacgataactgttgagattgtgcgctaa

SEQ ID NO: 460658 - DNA, 1041 bp, Shigella boydii
atgaaagttatgcgtaccaccgtcgcaactgttgtcgccgcgaccttatcgatgagcgctttctctgtgtttgcagaagcaagcctgacaggtgcaggtgcaaccttccctgcgccggtgtatgccaaatgggctgacacttaccagaaagaaaccggtaataaagttaactaccagggtatcggttcttccggtggcgtaaaacagattatcgctaataccgttgattttggtgcctctgacgcgccgctgtctgacgaaaaactggctcaggaaggtctgttccagttcccgaccgtgattggcggcgtggtgctggcggttaacattccagggctgaagtctggcgaactggtgctggatggtaaaaccctcggcgacatctacctgggcaaaatcaagaagtgggatgatgaagccatcgccaaactgaatccgggtctgaaactgccttcacaaaacattgctgtagtacgccgcgcagatggctccgggacttccttcgtcttcaccagctacctggcgaaagtgaacgaagagtggaaaaacaacgttggtactggctctaccgtaaaatggccgatcggtttgggcggtaaaggtaacgacggtatcgccgcgttcgttcagcgtctgccgggtgcaattggttatgttgaatatgcttacgcgaagcagaacaacctggcgtacaccaaactgatctccgctgatggtaaaccggttagtccgaccgaagaaaacttcgctaatgcagcaaaaggtgcagactggagcaaaaccttcgctcaggatctgaccaaccagaaaggcgaagatgcatggcctattacctctaccacgttcattctgatccacaaagatcagaagaaaccagaacaaggcacagaagtgctgaaattcttcgactgggcgtacaaaaccggggctaaacaggcgaacgacctggattacgccagcctgccggatagtgtagttgaacaggttcgcgctgcgtggaagaccaatattaaagacagtagcggtaagccgctgtactaa

SEQ ID NO: 460659 - DNA, 960 bp, Shigella boydii
atggctgcaaccaagcctgcttttaacccaccgggtaaaaagggcgacataattttcagcgtgctggtaaaactggcggcgctgattgtgctattgatgttgggtggcattattgtctctctgatcatctcctcctggccgagcattcagaaatttggtctggctttcctatggaccaaagagtgggatgcaccgaacgatatctacggggcgctggtgccgatctacggtacgttggtgacttcgtttatcgcgctgctgatcgccgtcccggtgagtttcggtatcgccctgttcctgactgagcttgcgcctggctggctgaaacgcccgctgggtatcgccattgagctgctggcagccattccaagtatcgtttacggcatgtggggcctgtttatctttgcgccgctgttcgccgtttactttcaggagccggtcggcaatatcatgtcgaatatcccgattgttggcgcgctgttctctggccccgcatttggtatcggtatcctcgcggcaggcgtgatcctcgccatcatgattattccgtacattgcggcggtaatgcgtgatgtgttcgaacaaaccccggtgatgatgaaagagtcggcctacggtattggctgcaccacctgggaagttatctggcgtatcgttcttccgttcaccaaaaatggtgttatcggcggcatcatgctggggctgggccgcgcgctcggtgaaaccatggcggtgacctttatcatcggtaacacctaccagctcgacagcgcctcgctgtacatgccgggcaatagtatcacctctgcgttggcgaacgaatttgcggaagcggaatccggtctgcacgttgccgcactgatggaactgggcctgatcctgtttgtgattaccttcatcgtcctcgccgcatcgaagtttatgattatgcgcctggctaagaatgagggggcacgctaa

SEQ ID NO: 460660 - DNA, 891 bp, Shigella boydii
atggctatggttgaaatccaaaccactgcggcgctggctgaatctcgccgcaaaatgcaggcgcgtcgccgcctcaaaaaccgtattgcgctgacgctctcgatggcgacgatggccttcggcctgttctggctgatctggattttaatgtccaccatcactcgcggtatcgacggtatgtcgctggcgctgttcactgaaatgacgccgccgcccaatacggaaggtggtggtctggcgaacgccctggcgggtagcgggctgttaattttgtgggccacggtattcggtacgccgctgggcattatggcggggatttatctggcggaatatggtcgtaaatcctggctggcagaagtgattcgcttcattaacgacattctgctctccgcgccgtcgattgtggttggtctgtttgtttacaccatcgtggtggcgcagatggagcacttctctggctgggcgggcgtgattgccctggcgctgttgcaggtgccgattgttatccgcaccaccgagaacatgctgaaactggtgccggacagcctgcgtgaagcggcttatgcgctgggtacaccgaagtggaagatgatctctgcgattacgctgaaagcgtcggtgtccgggatcatgaccggtatcctgctggcgattgcccgtattgctggtgaaaccgcgccgctgctgtttaccgcgctctccaaccagttctggagcacggacatgatgcagccgatcgccaacctgccggtgacgatctttaagtttgcgatgagcccgtttgcggaatggcaacaactggcctgggccggggtattgattattaccctgtgcgtactgctgctgaacattctagcgcgcgttgtttttgcgaagaataaacacggttaa

SEQ ID NO: 460661 - DNA, 774 bp, Shigella boydii
atgagtatggttgaaactgccccgagtaaaattcaggttcgtaatttgaacttctactacggcaaattccatgccctgaaaaacatcaacctggatatcgctaaaaaccaggttacggcgtttatcgggccgtccggctgcggtaaatcgacgctgctgcgtaccttcaacaaaatgtttgaactgtacccggagcagcgtgcggaaggtgaaattctgcttgatggcgacaacatcctgaccaactctcaggatatcgcactgctgcgtgcgaaagtgggcatggtgttccagaaaccgacgccgtttccgatgtccatctacgacaacatcgcttttggcgttcgtctgtttgagaagctctcccgtgccgacatggacgagcgcgtgcagtgggcattgaccaaagccgcattgtggaacgaaaccaaagataaattgcaccagagcggttactctctctctggtggtcagcaacagcgtctgtgtattgcgcgtggtatcgccattcgcccggaagtgctgctgctcgacgaaccgtgttcggcgctcgaccctatctctaccgggcgtattgaagagctgatcaccgaactgaagcaggattacaccgtggtgatcgtcacccacaacatgcagcaggctgcgcgttgttccgaccacacggcgtttatgtacctgggcgaattgattgagttcagcaacacggacgatctgttcaccaagccagcgaagaaacaaacagaagactacatcaccggtcgttacggttga

SEQ ID NO: 460662 - DNA, 726 bp, Shigella boydii
atggacagtctcaatcttaataaacatatttccggccagttcaacgccgaactggaaagtatccgcacgcaggtgatgaccatgggcggcatggtggagcagcagctttctgatgcaatcaccgcgatgcataaccaggacagcgatctggcgaagcgcgtgatcgaaggcgacaagaacgtcaacatgatggaagtggcgatcgatgaagcctgcgtgcgcattatcgccaaacgtcagccgacggcgagcgacctgcgactggttatggtgatcagtaaaaccattgccgagctggagcgtattggcgacgtggcggacaaaatctgccgtactgcgctggagaaattctcccagcagcatcagccgttgctggtaagtctggagtcgctgggccgtcataccatccagatgctgcacgacgtgctggacgcgttcgcgcggatggacattgacgaagcggtacgtatttatcgtgaagataaaaaagtcgatcaggaatacgaaggtattgttcgtcaactgatgacctacatgatggaagattcgcgtaccattccgagcgtacttactgcgctgttctgcgcgcgttctatcgaacgtattggcgaccgctgccagaatatttgtgagtttatcttctactacgtgaaggggcaggatttccgtcatgtaggcggtgatgagctggataaactgctggcgggaaaagatagcgacaaataa

SEQ ID NO: 460663 - DNA, 495 bp, Shigella boydii
atgaacatgcaaatcaccaaaattctcaacaataatgttgtggtggttattgatgatcaacagcgggaaaaagtcgtcatggggcgaggaattggctttcaaaaacgcgctggcgaaagaattaactcaagtggaatagaaaaagagtatgccttgagcagtcatgaactgaacgggcgattaagcgaactcttaagtcatattcctcttgaggtgatggcaacctgtgatcgtattatctctttagcgcaggagcgcttgggaaaattacaggacagtatttatatctcgctaactgaccattgccagtttgcgattaaacgctttcagcaaaacgtgttgctgcccaacccgttgctgtgggatatccagcggctttacccgaaagagttccagctaggggaagaagcgttaaccattattgataaacggttgggcgtgcagttaccgaaagatgaagtgggctttggtaatgctgccaacttactgatttag

SEQ ID NO: 460664 - DNA, 912 bp, Shigella boydii
atgatgagcgaaagtaataagcaacaggcagtgaataagttgacagagattgtcgctaactttaccgccatgatttctacccgaatgcctgatgacgtggtggataaactaaaacagctaaaggatgccgaaacgtcgtcgatggggaaaattatctaccatacgatgttcgacaacatgcaaaaagcgattgacctgaatcgtcctgcctgtcaggacaccggggagattatgttcttcgttaaagtcggttcccgcttcccactgcttggcgagctgcaaagcatactcaaacaagccgtggaagaggcaaccgtcaaagcgccactacgtcacaatgcggtagaaatttttgacgaagtaaacaccggcaaaaataccggtagcggcgtaccgtgggtcacctgggacatcatccccgacaatgacgatgcggaaatcgaagtttacatggcaggtggcggctgcacgctacctggccgctcgaaagtgttaatgccgtcagaaggctacgaaggcgtggtgaaattcgtcttcgaaaatatctccaccctcgccgtaaacgcctgtccaccggtactggtgggcgtgggcatcgccacctcggtggaaaccgccgccgtactctcgcgtaaagccattttgcgcccgattggcagccgccatcccaatccaaaagcggcagaactggagctacgccaggaagaaggactcaaccgtctggggattggtccacaagggctgactggcaacagttcagtgatgggcgtacatatcgaatctgccgcccgccatccgtcaaccatcggcgttgctgtctctaccggctgctgggcgcatcgtcgcggcacactgctggttcatgccgatctcacctttgaaaatctgtctcacacccggagcgcgttatga

SEQ ID NO: 460665 - DNA, 399 bp, Shigella boydii
atgaaaaagatcctgacaaccccgatcaaagctgaagatctgcaagatattcgcgtcggcgatgtgatctacctgaccggtacgctggtgacctgccgtgacgtttgtcaccgccgcttgatcgaactgaaacgtccgatcccttacgatctcaacggcaaagcgattttccacgctggccccatcgtgcgcaaaaacggcgataaatgggagatggtttccgttggcccgacaaccagtatgcgtatggaaagttttgaacgtgaatttatcgagcagaccggcgtgaggcggaatggggccgctgaccgaagaaggctgccagaaattcaaggcgctacatgtgattttcccggcaggctgcgcggtgctggcggcaacccaggtggaagagattga

SEQ ID NO: 460666 - DNA, 246 bp, Shigella boydii
gtgattttcccggcaggctgcgcggtgctggcggcaacccaggtggaagagattgaagaagtgcactggacagagctcggaatgccggagtcgctgtgggtctgccgggtcaaagagttcggcccgctgattgtctctattgatacccacggcaacaatctgatagccgaaaacaaaaagctgttcgccgaacgccgcgatcccatcgtggaagagatctgcgagcacgtccattacatcaaataa

SEQ ID NO: 460667 - DNA, 1464 bp, Shigella boydii
atgaaaccttccactgaatggtggcgataccttgcgccgctggcggtcatcgccattattgctctaattccggttcccgcagggctggagagtcatacctggctctactttgccgtttttactggcgtgatcgttggactgatcctcgaacccgtgccgggtgccgtggtggcgatggtgggtatctccatcatcgccatactctctccctggctgctgttcagccccgaacagctcgcccagccaggctttaagttcaccgccaaatccctctcctgggcagtttctggtttttctaattcggttatctggctcattttcgccgcctttatgtttggcacaggctatgaaaaaaccgggcttggacgccgcattgcgctgattctggtgaaaaagatgggacatcgcacgctgtttctcggctatgcggtgatgttctccgagctgatcctcgcacctgtaacaccgtccaactcggcgcgtggtgcggggattatctatcccatcatccgtaacctgccaccgctctatcaatcacaaccaaacgacagcagttcgcgcagcattggctcgtacatcatgtggatggggattgttgccgactgcgtgaccagcgccattttcttgacggcgatggcaccaaacttgctgttaattggactgatgaaaagcgcatctcacgccacgctgagttggggcgactggttcctcgggatgttgccgctcagtattttgctggtgctgctggttccctggctggcttatgtgctgtacccgccggtactgaagtctggcgatcaggtgccgcgctgggcagagacggaactgcaggcaatgggcccgctctgttcgcgtgaaaaacggatgctggggctgatggtaggcgcgctggtgctgtggattttcggcggtgattatatcgatgccgcgatggtcggttacagcgtggtggcactgatgctgcttctgcgcattatcagttgggacgacattgtcagtaataaagcggcgtggaacgttttcttctggctggcctcgcttatcaccctcgctaccggactcaacaacactggttttattagctggtttggcaaactgttagcaggcagcttaagcggttattcgccaacgatggtgatggtggcgttgattgtggtgttttatctgctgcgctactttttcgccagcgccacggcgtatacctccgccctcgcaccgatgatgattgccgctgcgctggcgatgccggaaatcccgctgccggtgttctgcctgatggttggcgcggcaattggtctggggagcattcttacaccatacgccaccggacccagtccgatttactacggtagtggttatctgccaacggcggattactggcgactgggggcgatttttgggctgatattcctcgtgttgctggtgattaccggcttactgtggatgcccgtggtgttgctttag

SEQ ID NO: 460668 - DNA, 1014 bp, Shigella boydii
atgcgtgtactgggtattgaaacttcctgcgatgaaaccggcatcgccatttacgacgatgaaaaaggtttgttagccaaccaattgtatagtcaggtgaaattgcacgctgactacggcggcgtcgtgcctgaactggcctcccgcgatcacgtgcgcaaaaccgtaccgttgatccaggcggcgctaaaggagtctggcttaacggcaaaagacattgatgctgtggcctataccgcaggccctggattagtcggcgcactgctggttggcgcaaccgtggggcgttctctggcgtttgcctggaacgttccggcaatcccggtacaccatatggaagggcatctgttagcgccgatgctggaagataacccgccggaatttccgtttgtcgcgctgctggtgtccggcggtcatacgcagttaatcagcgtgactggcattggtcagtacgagctgctcggcgagtctatcgatgatgccgccggtgaagcgtttgataaaaccgcgaagctgctggggctggattatcctggcggaccgttactgtcgaaaatggcggctcagggtactgccgggcgctttgttttcccgcgtccgatgaccgaccgtccggggctggatttcagcttttctggtctgaaaacctttgcggcgaacacgattcgtgacaacggcaccgacgaccagacgcgtgctgatatcgcccgcgcctttgaagatgcggtggtcgatacgttgatgattaagtgtaagcgagcgttggatcagacgggctttaagcgactggtcatggcgggcggcgtgagtgctaaccgcacgttacgggcgaagctggcggaaatgatgaaaaaacgccgcggcgaagtgttctacgcgcgtccggagttttgtactgataacggcgcgatgatcgcctatgccggaatggtgcggtttaaagcaggcgcgacggcggatctcggcgttagcgtgcgtccgcgctggccgctggcggagttaccggctgcgtaa

SEQ ID NO: 460669 - DNA, 216 bp, Shigella boydii; identical to SEQ ID NO: 1207

SEQ ID NO: 460670 - DNA, 1746 bp, Shigella boydii
atggctggacgaatcccacgcgtattcattaatgatctgctggcacgcactgacatcgtcgatctgatcgatacccgtgtgaagctgaaaaagcagggcaagaatttccacgcgtgttgtccattccacaacgagaaaaccccgtcattcaccgttaacggtgagaaacagttttaccactgctttggatgtggcgcgcacggcaacgcgatcgacttcctgatgaactacgacaagcttgagttcgtcgaaacggtcgaagagctggcagcaatgcacaatcttgaagtgccatttgaagcaggcagcggccccagccagatcgagcgccatcagaggcaaacgctttatcagttgatggacggtctgaatacgttttaccaacaatctttacaacaacctgttgccacgtctgcgcgccagtatctggaaaaacgcggattaagccacgaggttatcgctcgctttgcgattggttttgcgccccccggctgggacaacgtcctgaagcggtttggcggcaatccagaaaatcgccagtcattgattgatgcggggatgttggtcactaacgatcagggacgcagttacgatcgtttccgcgagcgggtgatgttccccattcgcgataaacgcggtcgggtgattggttttggcgggcgcgtgctgggcgacgatacccccaaatacctgaactcgccggaaacagacattttccataaaggccgccagctttacggtctttatgaagcgcagcaggataacgctgaacccaatcgtctgcttgtggtcgaaggctatatggacgtggtggcgctggcgcaatacggcattaattacgccgttgcgtcgttaggtacgtcaaccaccgccgatcacatacaactgttgttccgcgcgaccaacaatgtcatttgctgttatgacggcgaccgtgcaggccgtgatgccgcatggcgagcgctggaaacggcgctgccttacatgacagacggccgtcagctacgctttatgtttttgccggatggcgaagaccctgacacgctggtacgaaaagaaggtaaagaagcgtttgaagcgcggatggagcaggcgatgccactctccgcatttctgtttaacagcctgatgccgcaagttgatctgagtacccctgacgggcgcgcacgtttgagtacgctggcactgccattgatatcgcaagtgccgggcgaaacgctgcgaatatatcttcgtcaggaattaggcaacaaattaggcatacttgatgacagccagcttgaacgattaatgccaaaagcggcagagagcggcgtttctcgccctgttccgcagctaaaacgcacgaccatgcgtatacttatagggttgctggtgcaaaatccagaattagcgacgttggtcccgccgcttgagaatctggatgaaaataagctccctggacttggcttattcagagaactggtcaacacttgtctctcccagccaggtctgaccaccgggcaacttttagagcactatcgtggtacaaataatgctgccacccttgaaaaactgtcgatgtgggacgatatagcagataagaatattgctgagcaaaccttcaccgactcactcaaccatatgtttgattcgctgcttgaactgcgccaggaagagttaatcgctcgtgagcgcacgcatggtttaagcaacgaagaacgcctggagctctggacattaaaccaggagctggcgaaaaagtga

SEQ ID NO: 460671 - DNA, 1842 bp, Shigella boydii
atggagcaaaacccgcagtcacagctgaaacttcttgtcacccgtggtaaggagcaaggctatctgacctatgccgaggtcaatgaccatctgccggaagatatcgtcgattcagatcagatcgaagacatcatccaaatgatcaacgacatgggcattcaggtgatggaagaagcaccggatgccgatgatctgatgctggctgaaaacaccgcggacgaagatgctgccgaagccgccgcgcaggtgctttccagcgtggaatctgaaatcgggcgcacgactgacccggtacgcatgtacatgcgtgaaatgggcaccgttgaactgttgacccgcgaaggcgaaattgacatcgctaagcgtattgaagacgggatcaaccaggttcaatgctccgttgctgaatatccggaagcgatcacctatctgctggaacagtacgatcgtgttgaagcagaagaagcgcgtctgtccgatctgatcaccggctttgttgacccgaacgcagaagaagatctggcacctaccgccactcacgtcggttctgagctttcccaggaagatctggacgatgacgaagatgaagacgaagaagatggcgatgacgacagcaccgatgatgacaacagcatcgacccggaactggctcgcgaaaaatttgcggaactacgcgctcagtacgttgtaacgcgtgacaccatcaaagcgaaaggtcgcagtcacgctgccgctcaggaagagatcctgaaactgtctgaagtattcaaacagttccgcctggtgccgaagcagtttgactacctggtcaacagcatgcgcgtcatgatggaccgcgttcgtacgcaagaacgtctgatcatgaagctctgcgttgagcagtgcaaaatgccgaagaaaaacttcattaccctgtttaccggcaacgaaaccagcgatacctggttcaacgcggcaattgcgatgaacaagccgtggtcggaaaaactgcacgatgtctctgaagaagtgcatcgcgccctgcagaaactgcagcagattgaagaagaaaccggcctgaccatcgagcaggttaaagatatcaaccgtcgtatgtccatcggtgaagcgaaagcccgccgtgcgaagaaagagatggttgaagcgaacttacgtctggttatttctatcgccaagaaatacaccaaccgtggcttgcagttccttgacctgattcaggaaggcaacatcggtctgatgaaagcggttgataaattcgaataccgccgtggttacaagttctccacctacgcaacctggtggatccgtcaggcgatcacccgttctatcgcggatcaggcgcgcaccatccgtattccggtgcatatgattgagactatcaacaaactcaaccgtatttctcgccagatgctgcaagagatgggccgtgaaccgacgccggaagaactggctgaacgtatgctgatgccggaagacaagatccgcaaagtgctgaagatcgccaaagagccaatctccatggaaacgccgatcggtgatgatgaagattcgcatctgggggatttcatcgaggataccaccctcgagctgccgctggattctgcgaccaccgaaagcctgcgtgcggcaacgcacgacgtgctggctggcctgaccgcgcgtgaagcgaaagttctgcgtatgcgtttcggtatcgatatgaacaccgaccacacgctggaagaagtgggtaaacagttcgacgttacccgcgaacgtatccgtcagatcgaagcgaaggcgctgcgcaaactgcgtcacccgagccgttctgaagtgttgcgtagcttcctggacgattaa

SEQ ID NO: 460672 - DNA, 207 bp, Shigella boydii; identical to SEQ ID NO: 24440

SEQ ID NO: 460673 - DNA, 252 bp, Shigella boydii
atgactacaaaactcagttatggatttggagcgttcgggaaggattttgcgatcggcattgtgtatatgtacctcatgtattactacaccgatgtcgttgggctgtctgtgggtttggtcggtactttgtttctggtggcgaggatctgggatgctattaacgatccgattatgggattgaagtggtcaacaaaaactggccaccgagttagagtttttccagtatcgattttccgattcgtttgggggtaa

SEQ ID NO: 460674 - DNA, 1356 bp, Shigella boydii
atgatgactgcacccaaaattacatttatcggcgctggttcgacgattttcgttaaaaatattcttggtgatgtgttccatcgagaggcgctgaaaacggcgcatattgccctgatggacattgatcccacccgcctggaagagtcgcatattgtggtgcgtaagctgatggattcagcaggggccagcggcaaaatcacctgccacacccaacagaaagaagccttacaggatgccgattttgtcgtggtggcatttcagattggcggttatgaaccttgcacggtgactgatttcgaggtctgtaagcggcatggtctggaacaaaccattgccgatacgttggggccgggcggtattatgcgcgcgctacgtaccattccgcatctgtggcaaatttgcgaggacatgacggaagtctgccccgatgccacattgctcaactacgttaacccaatggcgatgaatacctgggcgatgtatgcccgctatccgcatatcaaacaggtagggctgtgccattcggtgcagggaacggcggaagagctggcgcgtgacctcaatatcgatccgtccacgctgcgttaccgttgcgctggtatcaaccatatggcgttttacctggaactggagcgtaaaaccgccgacggcagttacgtgaatctctacccggaactgctggcggcttatgaagcagggcaggcaccgaagccacatattcatggtaatactcgctgccagaatattgtgcgctacgaaatgttcaaaaagctgggctacttcgtcacggaatcgtcagaacattttgccgaatatacgccgtggtttattaagccaggtcgtgaggatttgattgagcgttataaagtaccgctggatgagtacccgaaacgctgcgtcgagcagctggcgaactggcataaagagctggaggagtataaaaacgcctcccggattgatattaaaccgtcacgggaatatgccagcacaatcatgaacgctatctggactggcgagccgagtgtgatttacggcaacgtccgtaacgatggtttgattgataacctgccacaaggatgttgcgtggaagtagcctgtctggttgatgctaatggcattcagccgaccaaagtcggtacgctaccttcgcatctggccgccctgatgcaaaccaacatcaacgtacagacgctgctgaccgaagctattcttacggaaaatcgcgaccgtgtttaccacgccgcgatgatggacccgcatactgccgccgtgctgggcattgacgaaatatatgctcttgttgacgacctgattgccgcccacggcgactggctgccaggctggttgcaccgttaa

SEQ ID NO: 460675 - DNA, 909 bp, Shigella boydii
atgaatacagatacgtttatgtgcagcagcgacgaaaaacagacccgcagcccgctgtcgctgtattcggaataccagcggatggagattgagtttcgcgcaccgcatatcatgcccactagccactggcatggtcaggtcgaagtgaatgtgcctttcgatggcgatgtggaatacctgatcaacaatgaaaaagtgaatatcaatcagggtcatatcacgctgttctgggcctgtacaccgcaccaactaacagataccggaacctgtcagagcatggcgatttttaatctgccgatgcatctgtttctctcctggccgctggataaagacctgattaaccacgtcactcacggcatgatgatcaaatcactggccacacagcaacttagcccgtttgaagtgcgccgctggcagcaggaattaaacagtccgaacgagcaaattcgccagctcgccattgatgaaattggcctgatgctcaagcgatttagcctctctggctgggaaccgattctggtcaataaaacctcgcgcacacacaaaaacagcgtctcgcgccatgcgcaattttatgttagccagatgctgggctttattgccgaaaactatgatcaggcgctgaccatcaacgatgtggctgagcacgtcaaacttaacgccaactatgcaatggggatattccagcgggtcatgcaattgacgatgaaacagtacattaccgcgatgcgcatcaaccacgttcgcgcgttactgagcgataccgataaaagtattctcgatattgccctgacggcaggctttcgttcaagtagtcgtttttacagcacgttcggcaaatatgtcggcatgtcgccgcaacaataccgcaaacttagccaacagcgccgccagacgtttcccggctaa

SEQ ID NO: 460676 - DNA, 2271 bp, Shigella boydii
atgatgaaagtattaattgttgaaagcgagtttctccatcaagacacctgggtcggtaacgccgttgagcgtctggcagatgctttaagccagcaaaatgttaccgtgattaaatccacctcctttgatgatggttttgccattctctcttcaaacgaagccattgactgcctgatgttcagctatcaaatggaacatccggacgaacatcaaaacgtcagacaattgatcggtaagcttcatgagcgccaacaaaacgtgccggtcttcctgttgggcgatcgggaaaaagccctcgccgcaatggatcgcgacctgctggagcttgtcgatgaattcgcctggattctggaagataccaccgactttatcgccggacgcgccgttgccgctatgacccgctaccgccagcagctgttgccgccactgttcagcgcgctgatgaaatatagcgacatccatgaatattcctgggcagcgccaggccaccagggcggcgttggttttaccaaaacacccgccggacgtttctaccatgactactatggagaaaatctgttccgcaccgatatgggcatcgaacgaacttccctcggttctttgcttgaccatactggcgcatttggcgaaagcgaaaaatatgccgcacgcgtatttggtgccgatcgctcctggtcggtagtcgtcggtacttccggctctaaccgcaccatcatgcaggcttgcatgaccgataacgatgtcgtggtcgttgaccgtaactgccataaatccatcgaacaaggcttgatgctgacaggcgcgaaaccggtctacatggtgccaagccgcaaccgctacggcattatcgggccaatctatccgcaggaaatgcaacctgaaaccttgcagaagaaaatcagtgaaagcccgctgactaaagacaaagccgggcaaaaaccgtcttactgcgtggtgaccaactgcacctatgacggcgtgtgttataacgctaaagaagcgcaggatctgctggaaaaaacctccgatcgtctgcactttgacgaagcctggtacggctatgcacgtttcaacccgatctatgccgatcactatgccatgcgcggcgaacctagcgatcacaacggtcctaccgttttcgccacccactccacccacaaactgctgaatgcgctttcacaggcttcttatattcatgtacgtgaaggtcgtggggcgattaacttctcccgcttcaaccaggcctacatgatgcatgccaccacctccccgctgtatgccatctgcgcatccaacgacgtggcggtgtcgatgatggacggcaacagcggcctgtcactgacgcaggaagtgatcgacgaagcggttgatttccgtcaggcgatggcgcggctgtataaagagttcaccgctgacggtagctggttcttcaaaccgtggaacaaagaagtcgtcaccgacccacaaaccggcaaaacctatgactttgctgacgcaccaaccaaactgctgaccaccgttcaggactactgggtaatgcatccgggcgaaagctggcacggcttcaaagatattccggataactggagtatgctcgacccgattaaagtcagcatccttgctccgggaatgggtgaagatggtgaactggaagaaaccggtgttccggcggcgctggtcactgcctggcttggtcgccacggcattgtgcctacccgcaccactgacttccaaattatgttcctgttctctatgggcgtaacccgtgggaaatgggggactctggttaacaccctttgctccttcaaacgccactatgacgccaacacaccgctggcgcaggtgatgccggaacttgttgaacaatatcctgacacttacgcgaacatggggattcacgatctgggtgacaccatgtttgcctggctgaaagaaaacaaccctggcgcacggttgaacgaagcctattccggcctgccggtggcggaaatcaccccgcgtgaagcgtacaacgcgattgtcgacaacaatgtcgaattggtatccattgaaaatctgccaggacgcatcgcggcaaactcagttatcccatatccgccaggaatcccgatgctgctgtctggtgaaaacttcggcgataaaaacagtccgcaagtaagttatttacgctcgctgcaatcctgggaccaccatttccctggatttgaacacgaaactgaagggactgaaattattgacggtatttaccacgttatgtgtgtgaaagcgtaa

SEQ ID NO: 460677 - DNA, 762 bp, Shigella boydii
atgaggatttgcagcgaccaaccttgtattgttttattgactgaaaaagatgtctggataagggtgaatgggaaagaacctattagccttaaagctaaccatatggcgttattaaattgtgaaaataatattatcgacgtctcctctcttaacaacactttggttgctcatattagtcacgacatcatcaaagattacctccggtttctgaataaagatctctcgcaaataccagtatggcaacgtagcgctacgcccatactcaccctgccatgcctgacgccagacgtctttcgcgttgccgcgcaacacagcatgatgcccgcagaaactgagtcagaaaaggaacgaacacgcgcattattattcacggtgctatcccgttttctcgacagtaaaaaattcctttcattaatgatgtatatgttacgtaattgtgtaagtgacagcgtttatcaaattattgaaagcgatattcacaaagactggaatcttagtatggtagccagttgtttatgtcttagcccaagtctgttaaagaaaaagctgaaaagcgaaaacaccagttatagccaaataatcaccacctgccgcatgcgttatgccgtaaatgaattaatgatggacggtaaaaatatctctcaggtatcacagtcctgcggctacaacagtacgtcgtactttatttctgtctttaaagacttctacggtatgacgccgctgcattatgttagtcagcacagagaacgcactgtcgcctga

SEQ ID NO: 460678 - DNA, 1338 bp, Shigella boydii
atgtcttcggatgctgatgctcacaaagtgggcttaatccccgtcaccctgatggtgtcggggaatattatggggtcaggtgtttttctgttacctgcaaacctggcctccactggcgggattgccatttatggatggttggtgacgattatcggtgcactggggctctcgatggtatacgccaaaatgtcgttcctcgacccaagtcctggtggttcttacgcttacgcccgccgctgctttggcccgtttctcggttatcaaaccaacgtcctctactggctggcctgctggatcggcaatatcgccatggtggtcattggcgtaggatatttaagttacttcttcacgattctgaaagatccattggtattaaccatcacctgcgtcgtggtgctgtggatcttcgtcctgctgaacattgtcggtccgaaaatgatcacccgtgtgcaggcagttgccaccgtgctggcgctgatccccatcgtcgggattgccgtatttggctggttctggttccgtggtgaaacctatatggcggcatggaacgtcagcggcctgggcaccttcggtgcaattcaaagtacccttaacgttacgctgtggtcgttcatcggtgtggaaagtgcctccgttgccgcaggtgtggtgaaaaacccgaaacgcaatgtccctatcgccaccattggtggggtattgattgccgccgtttgctatgtactttctaccaccgcgattatggggatgatccctaatgccgcactgcgcgtttctgcttcgccattcggtgatgccgcacggatggcgttgggtgacaccgccggggccattgtttccttctgcgcagctgcgggttgcttaggttcactgggcggctggacgttgctggcgggtcaaacggcgaaagccgctgccgatgacggactgttcccaccgatttttgcccgtgtaaataaagcgggtacgccagtggcggggctgattatcgtcggtattttgatgaccatcttccagctcagcagcatttcaccaaacgcgaccaaagagttcggtctggtttcttccgtctcggtcatctttacactggtgccatatctttacacctgtgcggcgttactgctgctcggacacggtcactttggtaaagcacgcccggcatatctggcagttactaccattgccttcctctactgcatctgggccgtggtggggtccggagcgaaagaggttatgtggtcatttgtcaccctgatggtcatcaccgccatgtatgcgctgaattacaaccggctacataaaaacccgtatcccttagatgcaccaataagcaaagattaa

SEQ ID NO: 460679 - DNA, 741 bp, Shigella boydii
atgaccgctatgagcactgcaattacacgccagatcgttctcgataccgaaaccaccggtatgaaccagattggtgcgcactatgaaggccacaagatcattgagattggtgccgttgaagtggtgaaccgtcgcctgacgggcaataacttccatgtttatctcaaacccgatcggctggtggatccggaagcctttggcgtacatggtattgccgatgaatttttgctcgataagcccacgtttgccgaagtagccgatgagttcatggactatatccgcggcgcggagttggtgatccataacgcagcgttcgatatcggctttatggactacgagttttcgttgcttaagcgcgatattccgaagaccaataccttctgtaaggtcaccgatagccttgcggtggcgaggaaaatgtttcctggtaagcgcaacagcctcgatgcgttatgtgcccgctacgaaatagataacagtaaacgaacgctacacggggcattactcgatgcacagatccttgcggaagtttatctggcgatgaccggtggtcaaacgtcgatggcttttgcgatggaaggagagacacagcagcaacaaggtgaagcaacaattcagcgcattgtacgtcaggcaagtaagttacgcgttgtttttgcgacagatgaagagcttgcagctcatgaagcccgtcttgatctggtggagaagaagggcggaagctgcctctggcgggcataa

SEQ ID NO: 460680 - DNA, 468 bp, Shigella boydii
atgcttaaacaggtagaaattttcaccgatggttcgtgtctgggcaatccaggacctgggggttacggcgctattttacgctatcgcggacgcgagaaaacctttagcgcaggctacacccgcaccaccaacaaccgtatggagttgatggccgctattgtcgcgctggaggcgttaaaagaacattgcgaagtcattttgagtaccgacagccagtatgtccgccagggtatcacccagtggatccataactggaaaaaacgtggctggaaaaccgcagacaaaaaaccagtaaaaaatgtcgatctctggcaacgtcttgatgctgccctagggcaacatcaaatcaaatgggaatgggttaaaggccatgccggacacccggaaaacgaacgctgtgatgaactggctcgtgctgcggcaatgaatcccacactggaagatacgggctaccaagtcgaagtttaa

SEQ ID NO: 460681 - DNA, 723 bp, Shigella boydii
atgaaaccggcaagagtccctcaaactgtcgtggctcctgatcgctggggcgatttgccctggggagagctttatcgcaaggcgctggagcgccagctcaacccgtggttcactaaaatgtatggttttcatctgcttaagattggcaatttaagcgcagaaatcaattgcgaagcgtgcgcggtttctcatcaagtgaatgtttctgcgcaaggaatgcccgtccaggtgcaggcggatccacttcatcttccttttgccgataaatccgttgatgtttgtctactggcacatacattgccgtggtgcaccgatccgcatcgtttattgcgtgaaaccgatcgggtattgattgatgatggctggctggtgattagtggcttcaatcccattagtttaatgggattacgcaaacttgtgccggtattgcgaaaaacctcgccctataacagccggatgtttactctgatgcggcaactggactggctctctttgttgaattttgaagtgctgcacgccagccgtttccacgttctcccgtggaacaaacacggaggaaaactattgaatgcgcatattcctgcgcttggttgcttacaacttattgttgcccggaaacggactattcctttaacgctaaacccgatgaaacagagtaaaaacaagccacgaattcgccaagcggttggagccacccggcaatgtcgtaaaccacaagcttaa

SEQ ID NO: 460682 - DNA, 756 bp, Shigella boydii
atgaatcttaacagtattcccgcctttgatgacaattacatctgggttttgaatgatgaagcaggtcgctgcctgattgtcgatcccggagacgcagagccagtattaaacgccattgccgccaataactggcaaccggaggccatatttctcacccaccatcatcacgatcacgttggcggcgtaaaagaactggtggaaaagtttccgcaaattgtggtgtatggtccacaagagacacaagataagggaacaacacaggtagtcaaagatggcgaaactgccttcgttttagggcatgaatttagtgtaattgccacaccgggtcacactttaggacatatctgttacttcagtaaaccttatctattttgcggcgacacgctgttttctggtgggtgtggtaggttgtttgaagggacagcatcacaaatgtatcaatcacttaataagttaagtgcgttacctgacgatacattggtatgttgtgctcatgaatatacgttatcaaatatgaagtttgctttgagtattcttccgcacgatttgtccataaatgattattatcgtaaagttaaggagttacgggcaaaaaatcaaataacactacccgtaattctgaaaaatgagcggcaaattaatgtttttttaagaacggaagatattgatttaattaatgtaattaatgaagaaacattattgcaacaacctgaagagcgttttgcatggttaaggtcaaagaaagataggttctga

SEQ ID NO: 460683 - DNA, 1221 bp, Shigella boydii
atggacgatgggacgtctatcgcgccagatggtgacttgtgggctttcattggcgacgagctaaagatgggaattccggaaaatgaccggattcgcgaacagaaacagaaatatttacgcaataagagctatctccacgatgtaactttacgggcagagccgtatatgtactggatagcagggcaagttaaaaaacgtaacatgcctatggaactggtactactacccatagtggagagcgcttttgatcctcacgcaacgtctggcgccaatgccgcaggcatctggcagatcattccgagcacggggcgcaattatggtttgaaacagacccgcaattatgacgcgcgtcgcgatgttgttgcttcaacaactgccgcgctgaacatgatgcagcgtctgaacaagatgtttgacggcgactggcttctgaccgtagcggcttataacagcggcgaaggtcgggtcatgaaggcaattaaaacgaacaaagcgcgtgggaaatccacggacttctggtcgttaccgttgccgcaggaaacgaagcagtacgtgcctaaaatgctggcattgagtgatattctcaaaaacagcaagcgttatggcgtacgtctgccaacgaccgatgaaagccgtgctctggcgcgtgtgcacctgagcagcccggttgaaatggcgaaggttgcagatatggcggggatttccgtcagcaagctgaagacattcaacgctggcgtaaaaggctccacgctgggcgcaagtggcccgcagtacgtgatggtgccaaagaagcatgcagatcaactgcgtgattctctcgcttcaggcgaaattgctgctgtacagtcgacgctggttgccgacaatacgccgcttaacagccgtgtttacaccgtacgctctggcgacacgctttcaagcatcgcttcacgtctcggcgtaagcaccaaagatttgcagcagtggaacaaactgcgcggatctaagctgaagccaggccaaagtttgacgattggtgcaggcagtagcgcacagcggttggcaaacaacagcgatagcattacgtatcgtgtgcgcaaaggcgattcgctttcaagcattgctaaacgccacggcgtgaacatcaaagatgtgatgcgctggaacagcgacactgcgaatctgcaaccaggcgataagctgacgttgtttgtgaaaaacaacaacatgccagattcctga

SEQ ID NO: 460684 - DNA, 624 bp, Shigella boydii
atgtcaggtctgccacagggcagaccaacgtttggcgctgcgcaaaacgtgagcgcggtggtggcgtatgacttatcggcccacatgctggatgtcgtggcacaagctgccgaagcccggcaactgaaaaatatcaccacccgccagggatatgccgcaagtctgccatttgccgataacgcatttgatattgttatcagccgttattctgcccatcactggcatgatgttggtgcagcactgcgagaagtgaataggatattgaaacctggcggtaggctgattgtgatggatgtaatgtctccgggtcacccagtgcgcgacatctggttacaggcggtagaagcattacgcgatacctctcacgtacgaaactacgccagcggtgcgtggttgacgttaatcaatgaagccaatctgatagttgataatttaattacagataagttaccgctggaattttcttcatgggtcgtgagaatgcgtacgccagaagcgttagtagacgctattcgcatttaccaacagagcgcatcgacagaggtgagaacgtatttttccttgcagactgatggctctttcaccagtgatatcatcatggtagaagcacataaagcggcataa

SEQ ID NO: 460685 - DNA, 780 bp, Shigella boydii
atgcgctatgttgccggacaacctgcggaaaggatcttaccgccggggtcttttgcgagcatcggccaggcattaccacctggggaaccgttaagtaccgaagagcgtattcggatcctggtgtggaacatatacaaacagcaacgcgctgaatggttgtcggtattaaagaactacggcaaagatgcacatctggtgttattgcaggaagcgcagacaacgccagagttagtacagtttgcgaccgctaactatcttgccgccgatcaggtacccgctttcgtgctgccacaacatccttctggcgtaatgaccctttcggcggcacatccagtgtattgctgcccgttacgtgaacgagaacccattttgcgtctggcgaagtcggcactggtgacggtctatccattacctgacacccgcctgttgatggtggttaatatacacgccgtcaacttcagtctgggcgtggatgtctatagtaagcagttacttcctattggtgatcagatagctcaccacagcggcccggtcattatggcgggagatttcaatgcctggagccgtagaaggatgaacgcgttatatcgctttgcgcgggaaatgtcgctgcgccaggtgcgttttaccgatgatcagcgccgtcgggcgtttggtcgcccgctcgattttgttttctaccgtggtctgaacgtcagtgaagcttctgtactggttacgcgcgcttccgatcacaatccgctactcgttgaattcagtcccggcaagcctgataaataa

SEQ ID NO: 460686 - DNA, 915 bp, Shigella boydii
atgaaagccacgtcggaagaactcgccatttttgtttcggtcgtcgaaagcggcagctttagccgggcagcggaacaattagggcaagcaaactcagcggtaagccgggcggtgaaaaagctggagatgaaacttggcgttagcctgcttaatcggaccacgcgacaacttagcctgacggaagaaggcgagcgttattttcgtcgcgtacagtcaattttgcaggagatggcagcggcagaatcagaaattatggagacgcgtaatacaccgcgtggactgttacggatcgatgccgcaactccagtggtgctgcactttctgatgccgttaattaagcctttccgtgaacgctatccggaaatcactttgtcgctagtctcctccgaaacgattattaatttgatcgaaagaaaagtggatgtcgcgatacgcgctggtacgttaacggattccagcttacgtgctaggccgttatttaacagttatcgaaaaattatcgcctcccccgattatatttcccgctacgggaagccagaaacgatcgacgatttaaagcaacatgtttgcctgggattcactgaacccgcttccctcaatacctggccgatagcctgtagtgatggacaattacatgaggtgaaatacggtttgtcatccaatagtggggaaacactgaaacagctttgcctgagtggcaacgggattgcgtgtttgtccgactacatgatcgacagagaaatcgctcgcggagaattggtggagttaatggcagataaagtgttgccagtggaaatgccattcagtgccgtctattacagcgaccgtgcggtaagtacgcgcatccgggcttttatcgatttccttagcgagcatgtaaaaacagctcccggaggagctgtcagagaggcttaa

SEQ ID NO: 460687 - DNA, 804 bp, Shigella boydii
atggctatccctgcatttggtttaggtactttccgtctgaaagacgacgttgttatttcatctgtgaaaacggcgcttgaacttggttatcgcgcaattgataccgcacaaatctatgataacgaagccgcagtaggtcaggcgattgcagaaagtggcgtgtcacgtcatgaactctacatcaccactaaaatctggattgaaaatctcagcaaagacaaattgatcccaagtctgaaagagagcctgcaaaaattgcgtaccgattatgttgatctgacgctaatccactggccgtcaccaaacgatgaagtctctgttgaagagtttatgcaggcgctgctggaagccaaaaaacaagggctgacgcgtgagatcggtatttccaacttcacgatcccattgatggaaaaggcgattgctgctgttggcgctgaaaacatcgctactaaccagattgaactctctccttatctgcaaaaccgtaaagtggttgcctgggctaaacagcacggcatccatattacctcctatatgacgctggcgtatggtaaggccctgaaagatgaggttattgctcgtatcgcagctaaacacaatgcgactccggcacaagtgattctggcgtgggctatgggggaaggttactcagtaattccttcttctactaaacgtaaaaacctggaaagtaatcttaaggcacaaaatttacagcttgatgccgaagataaaaaagcgatcgccgcactggattgcaacgaccgcctggttagcccggaaggtctggctcctgaatgggattaa

SEQ ID NO: 460688 - DNA, 141 bp, Shigella boydii
atgcctcttttaatgctattttcgttaactgaggtgattatgggcttcagactgttgaggaaaaaaaagcgtaaaatgcagaggatttttgcgattctggcaataatagatatacagacgaaaaaaaacctcgagcgttaa

SEQ ID NO: 460689 - DNA, 1416 bp, Shigella boydii
atggaaaactttaaacatctccctgaaccgttccgcattcgtgttattgagccagtaaaacgtactactcgcgcttatcgtgaagaagcaattattaaatccggtatgaacccgttcctgctggatcgcgaagatgtgtttatcgatttactgaccgacagcggcaccggggcggtaacccaaagtatgcaggcagcgatgatgcgcggcgacgaagcctacagcggcagccgcagctactatgcgttagccgagtcagtgaaaaatatctttggttatcaatatactattccgactcaccagggccgtggcgcagagcaaatctatattccggtactgattaaaaaacgcgagcaggaaaaaggcctggatcgcagcaaaatggtggcattctctaactatttctttgataccacgcagggccatagccagattaacggctgtaccgtgcgtaacgtctatatcaaagaagccttcgatacgggcgtgcgttacgactttaaaggcaactttgacctcgaaggattagaacgcggtattgaagaagttggcccgaataacgtgccgtatatcgttgcaaccatcaccagtaactctgcaggtggtcagccggtttcactggcaaacttaaaagcgatgtacagcatcgcgaagaaatacgatattccggtggtaatggactccgcacgctttgctgaaaacgcctatttcatcaagcagcgtgaagcagaatacaaagactggaccatcgagcagatcacccgcgaaacctacaaatatgccgatatgctggcgatgtccgccaagaaagatgcgatggtgccgatgggcggcttgctgtgcatgaaagacgacagcttctttgatgtgtacaccgagtgcagaaccctttgcgtggtgcaggaaggcttcccgacatatggcggcctggaaggcggcgcgatggagcgtctggcggtaggtctgtatgacggcatgaatctcgactggctggcttatcgtatcgcgcaggtacagtatctggtcgatggtctggaagagattggcgttgtctgccagcaggcgggcggtcacgcggcattcgttgatgccggtaaactgctgccgcatatcccggcagaccagttcccggcacaggcgctggcgtgcgagctgtataaagtcgccggtatccgtgcggtagaaattggctctttcctgttaggccgcgatccgaaaaccggtaaacaactgccatgcccggctgaactgctgcgtttaaccattccgcgcgcaacatatactcaaacacatatggacttcattattgaagcctttaaacatgtgaaagagaacgcggcgaatattaaaggattaacctttacctacgaaccaaaagtattgcgtcacttcaccgcaaaactgaaagaagtttaa

SEQ ID NO: 460690 - DNA, 1242 bp, Shigella boydii
atgactgatcaagctgaaaaaaagcactctgcattttggggtgttatggttatagcaggtacagtaattggtggaggtatgtttgctttacctgttgatcttgccggtgcctggtttttctggggtgcctttatccttatcattgcctggttttcaatgcttcattccgggttattgttattagaagcaaatttaaattatcctgtcggctccagttttaacaccatcaccaaagatttaatcggtaacacctggaacattatcagcggtattaccgttgccttcgttctctatatcctcacttatgcctatatctctgctaatggtgcgatcattagtgaaacgatatcaatgaatttgggctatcacgctaatccacgtattgtcgggatctgcacagccattttcgttgccagcgtattgtggataagttcgttagccgccagtcgcattacctcattgttcctcgggctgaagattatctcctttgtgatcgtgtttggttctttcttcttccaggtcgattactccatcctgcgcgatgccaccagcaccactgcgggaacgtcttacttcccgtatatctttatggctttgccggtgtgtctggcgtcatttggtttccacggcaatattcccagcctgattatttgctatggaaaacgcaaagataagttaatcaaaagcgtggtatttggttcgctgctggtgatttatctcttctggctctattgcacgatggggaatattccgcgcgaaagctttaaggcgataatctcctcaggcggcaacgttgattcgctggtgaaatcgttcctcggcaccaaacagcacggcattatcgagttttgcctgctggtgttctctaacttagctgttgccagttcgttctttggtgtcacgctggggttgttcgattatctggcggacctgtttaagattgataactcccacggcgggcgtttcaaaaccgtgctgttaaccttcctgccacctgcgttgttgtatctgatcttcccgaacggctttatttacgggatcggcggtgccgggctgtgcgccaccatctgggcggtcattattcccgcagtgcttgcaatcaaagctcgcaagaagtttcccaatcagatgttcacggtctggggcggcaatcttattccggcgattgtcattctctttggtataaccgtgattttgtgctggttcggcaacgtctttaacgtgttacctaaatttggctaa

SEQ ID NO: 460691 - DNA, 1176 bp, Shigella boydii
atgtcccgctttttgatttgtagttttgccctggttttactttatcccgccgggattgatatgtacctcgttggtttaccgcgcatcgccgccgatctcaatgccagcgaagcgcagttgcatattgcgttctccgtatatctggcggggatggcagctgcgatgttatttgccggtaaagtggccgatcgttcagggagaaagccggtcgccatacccggcgcggcgctatttattattgcctcggtgttctgttcactggctgaaaccagcacgttatttcttgcaggccgatttctacaggggttgggcgcaggctgttgttacgtagtggcgttcgccattttgcgcgacacgctggatgatcgacgtcgggctaaagtgctgtcattactcaacggtattacctgcatcattccggtgttagcgccagtgctcggacatctgattatgcttaaattcccgtggcagagtctgttctgggcgatggcaatgatgggcatcgcggtactgatgttgtctttgtttattttaaaagaaacgcgcccagcgtcccccgctgcttcggacaaaccacgagaaaatagcgagtcgctgcttaatcggtttttcctcagccgtgttgttatcaccaccctcagcgtttcggtgatcctcactttcgtcaatacatcgccggtattgctgatggaaatcatgggttttgagcgcggagaatacgccaccattatggcgttgaccgctggcgtcagcatgaccgtttcattctccacgccatttgcgctgggaatttttaagccacgtacgttgatgatcacctcgcaggtgttattccttgctgcggggatcacccttgccgtttcaccttcccatgcggtttctctgtttggtatcacactgatttgcgccggtttctcggtaggttttggcgtagcgatgagtcaggcgttaggaccattttcattacgcgcgggcgtagccagctcgaccttaggtattgcgcaggtttgcggttcgtcactgtggatttggctggcagcggtggttggtatcggcgcatggaatatgctgatcgggattctgattgcctgtagcatagtgagcctgttgctgattatgttcgtcgcgcctggacgccccgttgccgctcatgaagaaatccatcaccacgcttga

SEQ ID NO: 460692 - DNA, 960 bp, Shigella boydii
atgaagaaatccatcaccacgcttgatctcaatctgctgctctgtctgcaactgctgatgcaggagcgcagcgtgaccaaagcggcgaagcggatgaacgtgaccccttcagcggtgagtaagtcgctggcaaagttaagagcgtggtttgacgacccgctctttgtgaactcaccgctggggctgtcgcccacaccgctaatggtcagcatggagcaaaatctggcggaatggatgcaaatgagcaatctgctgctggataaaccgcaccaccagacaccgcgcggcctgaagtttgagttggcggcggaatcgccgctgatgatgatcatgcttaatgcgctgtcgaaacggatctaccaacgttacccgcaggcgaccatcaaactacgtaactgggattacgattccttagatgccattactcgtggtgaagtggatattggtttttccggtcgcgaaagccatcctcgctcgcgggagctgttaagctcgctaccgttagccattgattatgaagtgctgtttagtgatgtaccctgcgtctggttacgcaaagatcatccggcactgcatgaaacgtggaatctggacacctttttacgttatccgcatatcagcatttgctgggaacagagcgacacctgggcgctggacaatgtgttacaggagctggggcgcgaacgcacgattgctatgagcctgccggaatttgagcagtcactgtttatggcagcgcaacccgacaatctgctactggcgaccgcgccgcgctactgtcagtactacaatcaactccatcaactgccgttggttgctcttcctctcccgtttgacgaaagccagcaaaaaaagctggaagttccttttaccctgctgtggcataaacggaacagccataatccgaagatcgtctggttacgggaaaccattaaaaacctttacgcgtcgatggcataa

SEQ ID NO: 460693 - DNA, 750 bp, Shigella boydii
atggcgactcactttgcccgagggattttaacggaaggacatctgatttctgttcgtctcccctcccagtgtcatcaagaagcccgaaacattccccctcatcgtcaaagccgttttctggcgtccagaggtttactcgcagaactgatgttcatgctgtatggcattggcgaattgccggaaatcgtcaccctgccgaaaggtaaaccggttttcagtgataaaaatttgccttcgttttctatttcctatgccgggaatatggttggcgtggcgttaacaaccgaaggtgaatgtggcctcgatatggaactacagcgtgcgacgcgcgggtttcatagcccacacgcgcccgataaccacaccttttccagcaatgaatcgctatggatcagtaaacaaaacgatcctaacgaagcgcgggcgcagctcatcacgctgcgccgaagcgtgctaaaactaaccggtgatgttttgaatgacgatccgcgcgatctgcagctgctgcccattgccggacgcctgaaatgtgctcatgtaaatcatgtagaagcgttatgcgacgcggaggacgtgctggtgtggtccgtggcggtcacgcccgcgattgaaaagctcagtgtctgggagttagatggcaaacacagctggaaaagcctgccggatattcacagccgcgccaacaatcctaccagccggatgatgcgttttgcccagctctctaccgtgaagtctttttcgccaaattga

SEQ ID NO: 460694 - DNA, 567 bp, Shigella boydii
atgtctgaaaaattgcaggtggttacgttactggggagcctgcgcaaaggctcatttaatggcatggttgcacgtaccctgccgaaaattgctccggcgagcatggaagtcaatgcgttaccttccattgccgacattcccctgtatgacgctgacgtacagcaggaagaaggttttccagcaacggttgaagctctggcggaacagatccgtcaggctgacggtgtggtgatcgtcacgccggaatataactactcggtaccgggtgtgctgaaaaatgccatcgactggctttcccgcctgccggatcaaccgctggccggtaaaccggtgttgattcagaccagctcaatgggcgtgattggcggcgcgcgctgtcagtatcacctgcgccagattctggttttcctcgatgcaatggtgatgaacaagccggaatttatgggcggcgtgattcagaacaaagttgatcggcaaaccggagaagtgattgatcagggtacgctggaccacctgaccgggcaattgaccgcatttggtgagtttattcagcgagttaagatctaa

SEQ ID NO: 460695 - DNA, 1338 bp, Shigella boydii
atgagtcaacaacacacaacccaggcttctggccaggggatgctggaacgcgtgtttaaactgcgcgaacatggcacgacggcacggaccgaagtgatcgccggttttaccaccttcctgacgatggtttacatcgtttttgttaacccacaaattctgggcgttgctggcatggacaccagtgccgtcttcgtaacaacctgtctgattgctgctttcggtagcattatgatgggattgtttgcaaaccttccggtggcgctggctcctgcgatggggcttaacgcctttttcgcttttgtggttgtccaggcaatggggctgccgtggcagatcggtatgggcgcaatcttctggggcgctgtcggactgcttcttttgaccattttccgcgttcgttactggatgattgctaacattccggtaagtctgcgtgtgggtattaccagcggtatcggcctgtttatcggcatgatggggctgaaaaacgcaggtgtgattgtcgctaactcggaaacgctggtgagcatcggtaatctgacttctcacagcgtacttctgggtatcctcggcttcttcatcattgctattctggcctcgcgcaacattcacgcagcggtgctggtttctatcgtggtgacgacgctgctgggctggatgctgggtgatgtgcactacaatggcatcgtttctgcgccgccgagcgtaatgacagttgtgggtcatgtagatttagccgggtcgtttaacctcgggctggcaggggtgattttctctttcatgttggtcaacttgtttgactcctccggtacgctgattggcgtgaccgataaagcaggtctggcggatgagaaggggaaattcccgcgcatgaagcaggcgctgtatgtcgacagtatctcttccgtgaccggttcgtttatcggtacttcttccgttacggcttatattgagtcctcttccggcgtatcggttggcggtcgtaccggtctgacggcagtggttgttggtctgctgttcctgctggttatctttctgtcgccgctggcgggaatggtgctaggctacgctgcagctggcgcgttgatctacgttggcgtgttgatgacctcaagtcttgctcgcgtgaactggcaggatcttactgaatctgttccggcgtttattaccgccgtgatgatgccgttcagcttttcgattaccgaaggtattgcgctgggctttatctcctactgcgtgatgaatattggtaccgggcgtctgcgtgaccttagcccgtgcgtaatcatcgttgcgctgctgtttatcctgaagattgtatttatcgacgctcattaa

SEQ ID NO: 460696 - DNA, 246 bp, Shigella boydii
atgagcttgctgtcaccctttgacgtggtgatatggatgacggatggctggccactgtatgaatcccgcctgaagggaaagctgcacgtaatcagcaagcgatatacgcagcgaattgagcggcataacctgaatctgaggcagcacctggcacggctgggacggaagtcgctgtcgttctcaaaatcggtggagctgcatgacaaagtcatcgggcattatctgaacataaaacactatcaataa

SEQ ID NO: 460697 - DNA, 1023 bp, Shigella boydii
atgtctacgatgaatgttttaatttgccagcagccgaaagaattagtctggaaacaacgcgagatacctattccgggtgacaatgaagcattaataaaaattaagtctgtcgggatttgcggtaccgatattcatgcctggggtggaaatcaaccattttttagttatccacgtgttttaggccatgaaatatgtggggagattgttaggctgggtaaaaatattgctgatcttaaaaatggtcagcaagttgctgtgatcccttatgttgcctgtcagcaatgcccggcgtgtaaaagcgggcgtaccaattgctgtgaaaaaatttcagtcattggcgtgcatcaggatggcggttttagtgagtatttgagcgtgccggtggcgaacattttgcccgcagacggtattgacccgcaggcggcagcattgattgaacctttcgctattagcgctcatgcggtgcgtcgcgcagccattgctcccggcgagcaggtgctggtggtcggggcggggccaatcggtctgggcgcggcggcaatcgctaaagccgatggcgcacaggtggtggtggcggataccagtccggcgcgccgtgaacatgtggcaacgcgtctggaattacctttactggacccgtcagccgaagattttgacgcgcagctacaggcgcagtttggtggttcgctggcgcagaaagtgatcgacgcgacaggtaatcaacatgcgatgaataacaccgtgaatttgattcgtcacggcggcacggtggtatttgtcggcctgtttaaaggtgagttgcagttctccgatccggaattccataaaaaagaaacgacgatgatgggtagccgcaacgccacgccggaagattttgctaaagtcggtcgactgatggcggaaggaaaaatcactgctgacatgatgttaacccatcgctatccgttcgccacgctggcagaaacctacgagcgcgatgtgattaacaatcgtgagttgattaagggtgtaattactttctga

SEQ ID NO: 460698 - DNA, 2292 bp, Shigella boydii
ttgtcagaactactctctttcgccctttttctcgcctctgtgctgatttacgcatggaaagcgggacgtaacacctggtggtttgcagccacattaacggtgctggggctatttgtcgttttaaatatcaccctgtttgccagcgactattttactggcgatggtattaacgacgcggttctctataccttaaccaacagcctgaccggtgctggcgtcagcaaatacatcctgccgggtatcggcattgtgctggggctgacagcggtgttcggtgcgctgggctggatcctgcgccatcgtcgccatcatccgcaccattttggttacagcctgctggcgctcttactggcgctgggttcggtggacgccagcccggcatttcgtcagataacggaactggtgaaatcccagtcacgcgatggcgacccggactttgcggcttattataaagagccgtcgaaaactatccctgacccgaaactcaacctggtttatatctacggcgaaagtctcgagcggacctattttgataacgaagctttcccggatctcacgcctgaactgggcgcgttgaaaaatgaaggcctggatttcagccacacgcagcagctgccaggaacggattacacgattgcgggcatggtggcttctcagtgcggcataccgctgtttgccccctttgaaggcaacgcctccgcctctgtctccagcttcttcccgcagaacatctgtctgggcgatatcctgaaaaactcgggttatcagaactatttcgtgcagggcgcgaatctgcgttttgccggtaaagatgtgttcctgaagtcgcatggcttcgaccacttatacggctcagaagagctgaaaagcgtggtggccgacccgcactatcgcaacgactggggattctacgacgataccgttctcgatgaagcgtggaaaaagtttgaagagctttcccgctcaggtcagcgattctcactgtttaccctgacagtcgatacccatcacccggatggttttatctcgcgtacctgtaaccgcaaaaaatatgattttgacggtaagccaaaccagtcattcagcgcggtaagttgcagccaggagaatatcgcggcgtttatcaacaaaatcaaagcgtcaccgtggtttaaagataccgtcatcgtcgtctcttctgaccatttagcgatgaacaacacggcgtggaaatacctcaataagcaggatcgcaataacctgttttttgtcattcgtggcgacaagccgcagcaagagacgctggcagtgaagcgtaacacgatggataacggcgcgacggtgctggacattctcggtggcgataactatctcggacttggtcgtagcagtttatccgggcagtcgatgtcggaaatcttcctcaatatcaaagagaaaacattggcgtggaagccggatatcatccgcctgtggaaattccctaaagagatgaaagagttcaccatcgaccagcagaaaaacatgattgccttctcgggtagccatttccgtttgccgctgctgttgcgggtttcagacaaacgcgtggaaccgctgccggaaagcgaatactcagcaccgctgcgtttccagctggccgatttcgctccacgcgacaatttcgtctgggttgaccgttgctataagatggcacaactctgggctccggaactggcactctccaccgactggtgtgtctcgcaagggcagcttggcggtcagcaaattgttcagcatgttgacaaaacaacatggcagggcaaaacggcatttaaagatacggtcatcgacatggcgcgttataaaggcaatgtcgatacgctgaaaattgttgataacgatattcgctacaaagccgacagtttcatcttcaacgtcgccggtgcgccagaagaggtgaaacagtttagtgggatttcccgtccagagtcgtggggccgctggtccaacgcgcagctgggcgatgaagtaaaaatcgagtacaagcatccgctgccaaagaaatttgacctggtgattaccgccaaagcatacggcaataacgccagccgtcctattccggtacgcgtaggcaatgaagaacaaacccttgtgctgggcaatgaagtgaccaccaccacactgcatttcgataacccaaccgatgccgacacactggtaattgtgccgccggaacctgtctcaaccaacgaagggaatatcctcggacactcgccgcgtaagctcgggatcggcatggtggaaattaaagtggtggaacgtgaaggataa

SEQ ID NO: 460699 - DNA, 495 bp, Shigella boydii
atgatgaaaactgttaaacatcttctgtgctgtgccattgccgccagcgcattaatttccaccggggtgcatgctgcgtcctggaaagatgcgctctccagcgccgccagcgaacttgccaaccaaaacagcacgacacaggaaggcggttggtcgctcgcgtcattaactaacttgcttagcagcgggaaccaggccttaagcgcagataacatgaacaacgccgcaggcattctgcaatactgcgcgaagcaaaagctggcgtcggtaaccgatgccgaaaacatcaagaaccaggtgctggaaaagctgggcctgaacagtgaagagcaaaaagaagacaccaactatctggatggcattcagggtttgctgaaaaccaaagatggtcagcaactcaatctggataacatcggaacgactccgctggcagaaaaggtgaaaaccaaagcctgcgatctggtgttaaagcaggggctgaacttcatttcctga

SEQ ID NO: 460700 - DNA, 738 bp, Shigella boydii
atgaaaaacgttggcgacctgatgcaacgcctgcaaaaaatgatgcctgcccatatcaaacctgcattcaaaacgggtgaagaactactggcctggcagaaagaacaaggagcgatccgctccgccgctctcgaacgtgaaaatcgggcgatgaaaatgcagcgcacctttaaccgctccggtattcggccactgcatcagaactgctcctttgagaactatcgcgttgagtgtgaagggcagatgaatgcgttaagcaaagcgcgccagtacgtcgaagagtttgacggcaacatcgccagcttcatcttttctggtaagccaggaaccggcaaaaaccatctggcggcggcaatctgcaacgagctgctgctacgcggtaaatccgtattgatcatcaccgtggccgatattatgtcggcgatgaaagataccttcaggaatagcggtaccagtgaagaacaactgcttaacgatctgagcaacgttgatctgctggtgatcgatgagatcggcgtgcagaccgaatcgaaatacgaaaaagtgatcatcaaccagatcgtcgatcgccgctcttcttccaaacgcccaaccgggatgctgaccaacagtaatatggaagagatgaccaagttgctgggcgaacgcgtgatggaccgtatgcgcctgggtaacagtttgtgggtgatcttcaactgggatagctaccgtagccgggtaacaggtaaagagtattaa

SEQ ID NO: 460701 - DNA, 540 bp, Shigella boydii
atgtcttccagagttttgaccccggacgtcgttggtattgacgccctggtacacgatcaccaaaccgttctggcaaaagctgaaggcggtgtggttgccgtatttgctaacaatgccccggcgttttatgccgtcacgcctgcacgcctggctgaactgctggcgctggaagaaaagctggcgcgtccgggaagcgatgtcgctctggacgatcaactctatcaggaaccgcaagccgctcccgttgctgtacccatggggaaattcgccatgtatccggactggcaacccgatgccgattttatccgcctggcggcgctatggggtgtggcactaagagagccggtgaccaccgaagaactggcctcattcattgcctactggcaggcggaaggtaaagtctttcaccatgtgcagtggcaacaaaaactggcgcgcagcctgcaaatcggtcgtgccagcaacggcggactgccgaaacgagatgtgaatacggtcagcgaacctgacagtcaaattccaccaggattcagagggtaa

SEQ ID NO: 460702 - DNA, 474 bp, Shigella boydii
atgggtgtgatcgagtttctgtttgcattggcgcaggatatgatcctcgccgccattccagcggtcggctttgcgatggtgttcaacgttcccgttcgggcattacgctggtgtgcgctgcttggcgcgattggtcatggttcacgaatgatcttaatgaccagcgggctgaatattgagtggtcaacctttatggcctccatgctggtcggcaccattggtattcaatggtcgcgctggtatctggcgcatccgaaagtgtttaccgtggcggctgttatccctatgttcccgggcatatcggcttataccgcaatgatttcggcggtaaaaatcagccagttaggttacagcgaaccgttgatgattaccctgttaaccaactttcttacagcttcatcgattgttggtgcgttatccatcggtctttccattcctggattatggttgtaccgcaagcgccctcgcgtataa

SEQ ID NO: 460703 - DNA, 834 bp, Shigella boydii
atgatacaaatggattctcattatctgaacaatacgcagcacgtctatgacaaagggcgagttatgcaaactgagcaacagcgagccgtaacacggctttgtatccagtgtggattatttcttttgcaacatggtgcggaaagcgcgttggttgatgagctttcctcacgactgggtcgggcgttggggatggacagcgtcgaaagttctatctcttcgaacgccatagtgctgacaaccattaaagatgggcaatgcctgacatcgacacgtaaaaatcacgatcgcggcattaatatgcatgtggtgactgaagtccagcacattgtgattctggcggagcaccatctgctggattacaaaggcgtagagaaacgatttagccaaattcagccattacgttacccaagatggctggtagccttaatggttggcctttcttgcgcctgtttctgcaaactcaataaaggtggctgggatggtgccgtcatcaccttctttgccagtacggccgcgatgtatatccgccagctgctggcacaacgtcatcttcatccgcagatcaacttttgcctcaccgctttcgccgccaccaccatttccggattgcttttgcaacttcccactttcagcaatacacccactatcgcgatggccgccagcgttctgctgctggtgccggggtttccgttgattaatgccgtcgccgatatgtttaaaggccacatcaataccggactggcacgctgggcgatcgccagtctgctgacactggctacctgcgtcggcgtggtgatggcactgacgatttgggggctacgcggatgggtgtga

SEQ ID NO: 460704 - DNA, 516 bp, Shigella boydii
atggaaaagaccacaacgcaggagttattagcgcaggctgaaaaaatctgcgcgcagcgtaatgtgcgcctgaccccacagcgcctggaagtgttgcgcctgatgagtctgcaggatggcgctatcagcgcttatgatctgcttgatttactgcgcgaagctgaaccgcaagccaagccgccaacggtttatcgcgcgctggattttctgcttgagcaaggttttgtgcataaggtggaatccaccaacagttatgtgctctgtcatctgttcgaccagtccacccatacttcagccatgtttatttgcgatcgctgcggcgcagtgaaagaagagtgtgcagaaggcgtggaagacatcatgcatacgctggcggcaaaaatggggtttgccctgcggcataatgtgattgaagcacatgggctctgtgcggcatgcgtggaagtggaagcgtgtcgtcatcctgaacagtgccagcatgatcactctgtgcaggtgaaaaagaaaccgcgttaa

SEQ ID NO: 460705 - DNA, 210 bp, Shigella boydii
atgaataaagatgaagccggcggtaactggaaacagtttaaaggtaaagtgaaagagcaatggggcaaactgaccgatgatgatatgacgatcattgaaggtaaacgtgatcaactggtcggtaaaatccaggaacgttatggttatcagaaagatcaggcagaaaaagaggtcgtggattgggaaacccgcaatgaatatcgctggtaa

SEQ ID NO: 460706 - DNA, 1326 bp, Shigella boydii
atggcattcctcacttcatctgataaagcactctggcatctcgccttacccatgattttctccaatatcaccgttccgttgctgggactggtcgatacggcggtaattggtcatcttgatagtccagtttatttgggcggcgtggcggttggtgcaacggcgaccagctttctctttatgctgttgctgtttttacgcatgagcaccaccgggctgactgcgcaggcttatggtgccaaaaatcctcaggcattagcccgtgcgctggtgcaaccgttgctgttggcgttgggggcaggggcgttaattgcgctgctgcgtacaccgattatcgatctggcactgcatattgttggcggtagtgaagcagtcctggaacaggcgcggcgctttcttgaaatccgctggttaagcgcaccggcgtcgctggcgaatctggtattacttggttggttactcggcgtgcaatatgcccgtgcgccagtaattttgttagtggtcggcaatatcctcaacattgtgctggatgtctggctggtgatggggctgcatatgaacgtgcagggcgcggcgctggcgacggttattgcggaatatgcaacattgctgattggtctgctaatggtgcgtaaaatcctcaaactacgcggaatttccggcgaaatgctgaaaactgcctggcgaggaaacttccgtcgcttgctggcgcttaaccgcgatatcatgctgcgttcgctgttgttgcaactctgtttcggcgcgatcaccgtacttggtgcgcgactggggagtgacattatcgctgttaacgcggttctgatgacgctactcacctttaccgcctatgcgctggatggttttgcctacgcggttgaagcgcattccggtcaggcgtacggtgcgcgcgacggtagccagttgctggatgtctggcgggcagcgtgccgccagtcggggatcgtagcgttactgttttcggtagtttatttgctggcaggggaacacatcattgcgttgctgacgtcgttaacccagattcagcagctggccgaccgctatcttatctggcaggtgattttgccgttggttggcgtctggtgttatctgctggacggcatgtttataggcgcaacgcgcgcagccgaaatgcgtaacagtatggcggtggccgccgcaggttttgcgttgacgctccttacgctgccgtggctgggtaatcatgctttgtggctggcgttaaccgtctttctggcgttgcgcgggctttctctggcggctatctggcggcgtcactggcgcaacggtacctggtttgccgcaacgtga

SEQ ID NO: 460707 - DNA, 609 bp, Shigella boydii
atgaaagcgttaacggccaggcaacaagaggtgtttgatctcatccgtgatcacatcagccagacaggtatgccgccgacgcgtgcggaaatcgcgcagcgtttggggttccgttccccaaacgcggctgaagaacatctgaaggcgctggcacgcaaaggagttattgaaattgtttccggcgcatcacgcgggattcgtctgttgcaggaagaggaagaagggttgccgctggtaggtcgtgtggctgccggtgaaccgcttctggcgcagcagcatattgaaggtcattatcaggtcgatccttccttgttcaagccgaatgctgatttcctgctgcgcgtcagcgggatgtcgatgaaagatattggcattatggatggcgacttgctggcagtgcataaaactcaggatgtacgtaacggtcaggtcgttgtcgcacgtattgatgacgaagttaccgttaagcgcctgaaaaaacagggcaataaagtcgaactgttgccagaaaatagcgagtttaaaccaattgtcgttgaccttcgtcagcagagcttcaccattgaagggctggcggttggagttattcgcaacggcgactggctgtaa

SEQ ID NO: 460708 - DNA, 369 bp, Shigella boydii
atggccaataataccactggattcacccgaattatcaaagctgctggctattcctggaaaggtttacgcgctgcatggatcaacgaagcggcattccgtcaggaaggcgtagcggtattgttggcggtggtcatcgcctgctggctggatgtggacgcaattacccgcgtgctgcttatcagctccgtgatgctggtgatgattgtggaaatcctcaatagcgccatcgaagcagtggttgaccgaattggctctgaataccatgagctttccggacgcgcaaaagatatgggatccgccgcggtgctgattgcgattatcgtcgccgtgataacctggtgcatcctgttatggtcgcattttggataa

SEQ ID NO: 460709 - DNA, 2424 bp, Shigella boydii
atgtccggctggccacgaatttactacaaattactgaatttaccattaagcatcctggtaaaaagcaagtctattccggcagatcctgccccggaactggggctggatacctctcgtccaattatgtacgttttaccgtacaactcgaaagcagatttgctgacgttacgcgcccagtgtctggctcatgacttgcctgacccgttagagccgctggaaatcgacggcatgctactgccgcgctatgtgttcattcacggcgggccgcgtgtattcacctattacacgccgaaagaagagtctattaagctgttccacgactatctcgatttgcaccgtagcaacccaaatctggatgtgcagatggtgccagtatcggtgatgtttggtcgcgcgccggggcgtgaaaaaggcgaagtaaacccgccgctgcgtatgcttaacggcgtacagaaatttttcgccgtactgtggctcggtcgcgacagttttgtgcgtttctcgccgtcagtttcgctgcgccgtatggcggatgaacacggcacggataaaactatcgcacagaaactggcgcgcgtggcgcgtatgcactttgcccgtcaacgtctggctgctgtgggcccacgtctgcctgctcgtcaggatctgtttaataagctgctcgcctcccgcgccattgccaaagcggtagaagatgaagcgcacagcaaaaaaatctcccatgaaaaagcgcagcagaacgcgattgcgctgatggaagagattgcggcgaatttctcttacgagatgatccgcctgactgaccgcattctgggcttcacctggaaccgactttatcagggcatcaacgtccataacgccgagcgcgttcgccagctggcccacgacggtcatgagctggtgtatgtgccttgccaccgcagtcacatggactacctgctactttcttacgtgctgtaccaccaggggctcgtgccgccgcatatcgccgccgggatcaacctgaatttctggccggccgggccgattttccgccgtctgggggcgttctttattcgccgtacgtttaaaggcaataaactttattccaccgttttccgtgagtatctcggcgaactgttcagccgtggttattccgtcgagtatttcgtggaaggcggtcgttcccgtacggggcgtttgctggatccgaaaaccggtacgctgtcgatgaccattcaggcgatgctgcgtggcggcacgcgtccgattacgctgattccgatctatatcggttatgagcacgtcatggaagtggggacttacgccaaagaactgcgcggtgcgacgaaagagaaagagagcctgccgcagatgctgcgcggtttaagcaagctgcgtaatctcggtcagggttacgtcaacttcggtgaaccaatgccgttgatgacctaccttaaccagcatgtacctgactggcgtgaatctatcgatcccatcgaagcggtgcgtccggcatggttaacgccgacggtcaataatattgctgccgatctgatggtacgcattaacaacgcaggcgcggcaaacgccatgaacctctgctgtaccgcgctactggcatcacgtcagcgctcacttacccgcgagcagttaaccgagcaactcaactgctacctggatctgatgcgcaacgtaccttactccacggactctaccgttccttcagccagcgccagcgagcttatcgatcacgcgctgcaaatgaacaagtttgaagttgagaaagacactatcggcgacatcatcattctgccgcgcgagcaagcggtgctgatgacctactatcgcaacaacattgcgcatatgttggtgctgccttcgctgatggcggcaattgtcacccagcatcgccacatctcccgcgacgtattgatggagcacgtcaatgtgctttacccaatgctgaaagcggagctgttcctgcgctgggatcgcgacgagttgccggacgttattgatgcgttggcaaatgagatgcaacgtcaggggctgattaccctgcaagatgatgagttgcatatcaacccgtcgcattctcgcacgctacagctgctggccgcaggcgcgcgcgaaacgctgcaacgttatgccatcaccttctggctgttgagcgctaacccgtcgatcaaccgcggtacgctggagaaagagagccgcaccgtcgcgcaacgtctctccgtgctgcacggtatcaacgcgccggagttcttcgacaaggcggtgttcagttctctggtgctgacgctgcgtgatgaagggtatatcagcgatagcggcgatgccgaaccggcagaaacgatgaaggtttatcagttgctggcggagttgattacatcagacgtgcgtttgacgattgagagtgcgacgcagggcgaagggtaa

SEQ ID NO: 460710 - DNA, 873 bp, Shigella boydii
atggagtggagtctgacgcagaataagctgctggcgtttcatcgcttaatgcgtacggataagccaattggcgcgttactgctgctctggccaacattatgggcgttgtgggtggcgacaccgggcgttcctcagctctggatcctggcggtatttgtcgcgggtgtctggctgatgcgcgctgccggatgtgtggtgaatgattatgctgaccgaaagtttgatggtcatgttaagcgcacggcgaaccgaccacttcccagcggcgcggtaacagagaaagaggcgcgcgcgctgtttgtagtgctggtactgatttcgtttttactggtactgacgctgaatacgatgaccattctgttgtcgattgccgctctggcgttggcgtgggtgtacccgtttatgaagcggtatacccatctcccgcaagtggtgctgggcgcggcgtttggctggtcgattccaatggcttttgccgctgtgagtgagtcggtgccattgagttgctggttaatgttcctcgccaatattctctgggcggtggcttacgacacgcagtatgcgatggttgaccgcgatgatgatgtgaagattggcattaaatccacggcaatcctgttcggccaatacgataaattgattattggtattttgcagattggcgtactggcactgatggcgatcatcggtgagttaaatggcttaggctggggatattactggtcaattctggtggctggcgcgctgtttgtttatcaacaaaaactgattgccaaccgcgagcgtgaagcctgctttaaagcatttatgaataataactatgttggtctggtactatttttagggctggcaatgagttactggcatttctga

SEQ ID NO: 460711 - DNA, 498 bp, Shigella boydii
atgtcacaccccgcgttaacgcaactgcgtgcgctgcgctattttaaagagatccctgccctggatccgcaactgctcgactggctgttgctggaggattccatgacaaaacgttttgaacagcagggaaaaacggtaagcgtgacgatgatccgcgaagggtttgtcgagcagaatgaaatccccgaagaactgccgctgctgccgaaagagtctcgttactggttacgtgaaattttgttatgtgccgatggtgaaccgtggcttgccggtcgtaccgtcgttcctgtgtcaacgttaagcgggccggagctggcgttacaaaaattgggtaaaacgccgttaggacgctatctgttcacatcatcgacattaacccgggactttattgagataggccgtgatgccgggctgtgggggcgacgttcccgcctgcgattaagcggtaaaccgctgttgttaacagaactgtttttaccggcgtcaccgttgtactaa

SEQ ID NO: 460712 - DNA, 1077 bp, Shigella boydii
atgaagacaattgcctccgttacgctcccgcatcatgtacacgctccacgctacgatcgccagcagttgcaatcacgtatcgttcattttggctttggcgcctttcaccgcgctcatcaggcgttactgaccgatcgtgtgctgaatgcccagggcggcgactgggggatctgtgaaatcagcttgttcagcggtgatcaactgatgagccagctccgcgcacagaaccatttatataccgtgctggagaaaggtgcggacggcaatcaggtgataattgtcggtgccgttcacgaatgccttaatgcaaaactggattccttagcggcaattattgagaaattttgcgagccacaggtgacaattgtttccctgacgattaccgaaaaaggctattgtattgacccggccaccggtgcactcgacaccagtaatccgcggattattcacgatctacaaacccctgaagaacctcactccgcaccgggtattctcgtcgaagcactgaaacgccgccgtgagcgcggccttacaccgtttaccgtgctctcctgcgacaatattcccgacaatggccatgtggtgaaaaacgcggtgctgggaatggcagaaaaacgttcgccagaactcgccgggtggataaaagaacacgtcagttttccgggaaccatggtcgaccgcattgttccggctgcaaccgacgaatcactggcagaaatcagccagcatctgggggtaaatgatccctgcgcgattagctgcgaaccgtttatccagtgggtggtggaagataacttcgtcgctgggcgtcctgcctgggaagtcgcaggtgtacaaatggtgaatgatgtcctgccatgggaagagatgaaactgcgtatgcttaatggcagccactcttttctcgcttatctgggttacctttcaggattcgcccatatcagtgattgcatgcaggatcgcgcatttcgccatgccgccagaacattaatgctgaatgagcaagcgccgacactacaaattaaagatgtcgatttaacacaatatgcgggtgatgctgccaacttactgatttag

SEQ ID NO: 460713 - DNA, 573 bp, Shigella boydii
atgccaagagcgaacgaaattaaaaaaggtatggtactgaattacaacggcaaactgctgctggttaaggatattgatattcagtcgcccactgcccgcggtgccgctacgctgtacaaaatgcgtttttctgatgtccgtaccgggctgaaagtagaagagcgtttcaaaggtgatgatatcgttgacaccgtgacgctgccccgccgttacgttgacttctcctatgtcgatggcaacgaatatgtctttatggataaagaagactataccccgtataccttcaccaaagatcagattgaagaagagttgctgtttatgccagagggcggcatgccggacatgcaggtgctgacctgggacggtcaactgctggcgcttgagctgccgcagaccgttgatctggaaatcgttgaaaccgcaccaggcatcaaaggggcatctgccagcgcccgtaacaaaccggcgacattgagcactggtctggtgattcaggtaccagaatacttaagcccgggcgaaaaaattcgtatccatatcgaagaacgccgttatatggggcgtgctgactaa

SEQ ID NO: 460714 - DNA, 1182 bp, Shigella boydii
atgcataactcccccgcagtctccagcgcgaaatcgtttgacctgacctcgacgacgtttttaatcgttgcctttctcaccggtattgcgggtgctctgcaaaccccgacactcagtattttccttaccgatgaagtacatgcccgtccggcgatggtgggattcttctttaccggcagcgctgtcattgggattctggtaagtcagtttctcgctgggcgctctgataagcgcggcgatcgcaaatcgctgattgtcttttgctgcctgttaggcgtgctggcctgcaccctttttgcctggaatcgcaactactttgttttgctattcgttggcgtctttcttagcagctttggctcgaccgctaacccgcaaatgtttgcccttgcccgtgaacatgccgacaaaaccggacgtgaggcggtgatgttcagctcttttttacgcgctcaggtttcactggcatgggtcattggcccaccgctggcttatgcgttagcgatgggtttcagctttacggtaatgtatctgagcgcagcggtagcgtttattgtttgcggcgtgatggtgtggctgtttttaccgtcgatgcaaaaagagcttccgctggcgaccggcacggttgaagcgccgcgccgtaaccgtcgcgatacgctactgctgtttgtcatttgtacattgatgtggggctcgaacagcctgtacatcatcaacatgccgctatttattatcaacgaactgcatcttcccgagaaactggccggtgtgatgatggggaccgccgccgggctggaaatcccgacgatgttgattgccggatatttcgccaaacgtctgggtaagcgtttcttaatgcgcgttgctgccgtgggtggcgtctgtttttacgcaggaatgctgatggcgcattcacctgccattctgttgggcttgcagctgctaaatgctatttttattggcattctgggcggcatcgggatgctctattttcaggatttgatgcccggtcaggcaggttcagccaccacgctctataccaacacgtcgcgcgtgggctggatcatcgcaggatcagtggcgggcatcgtcgccgagatctggaattatcacgctgtgttctggtttgcgatggtgatgattatcgccactctgttttgcttactgcggattaaagatgtttaa

SEQ ID NO: 460715 - DNA, 1131 bp, Shigella boydii
atgttccagttatccgtacaggacatccatccgggcgaaaaggccggagacaaagaagaggcgattcgccaggtcgctgcggcgctggtgcaggccggtaatgtagcagaaggctacgtcaatggcatgctggcgcgcgaacagcaaacctcaacgttcctcggcaatggtattgctattccacacggcactaccgacacccgcgatcaggtgctgaaaaccggcgttcaggtatttcagttcccggaaggcgtcacctggggtgatggtcaggtagcgtacgtggcaatcggtattgctgccagctcggatgaacatctgggcctgctacgccagctgacccacgtactgagcgatgattccgttgctgaacaactgaagtcagcaacaacagcagaagaacttcgcgcattactgatgggcgaaaagcagagtgagcagctgaagctcgacaacgaaatgctgacgctggatatcgtcgccagcgatctgctgactcttcaggcgctgaacgctgcgcgtctgaaagaggcgggggcagttgacgccactttcgtcaccaaagccatcaatgaacaaccgctgaatctcggacagggtatctggctgagcgatagcgccgaaggcaatctgcgtagcgcgattgcggtaagccgtgcggcaaatgcttttgctgtggacggcgaaacggcagccatgctggtgagtgtggcgatgaatgacgatcagcccatcgcggttcttaagcgtctcgctgatttattgctcgacaataaagctgaccgcttgctgaaagcagatgcggcaacgttgctggcgctgctgaccagcgatgatgcgccgaccgacgacgtgttaagcgcggagtttgtggtgcgcaatgaacacggcctgcatgctcgtccaggtaccatgctggtcaataccattaaacaatttaacagtgatattaccgtgacaaaccttgatggcaccggcaaaccggcaaacggacgtagtctgatgaaagttgtggcacttggcgttaagaaaggtcatcgcctacgctttaccgcccagggtgcagatgctgaacaggcgctgaaagccattggcgacgctatcgctgctggtcttggggagggcgcataa

SEQ ID NO: 460716 - DNA, 939 bp, Shigella boydii
atgagcagacgtgttgctacgatcacccttaatccggcttatgaccttgttggtttctgcccggaaattgaacgcggcgaagtgaacctggtgaaaaccaccggtctgcatgcggcgggtaaaggcatcaacgtggccaaagtattaaaagacctgggaattgatgtcaccgttggcggcttcctgggtaaagacaatcaggatggttttcagcaactgttcagcgagctgggcattgccaaccgtttccaggttgtacaggggcgcacccgaattaacgttaagctgacggaaaaagacggcgaagtgaccgacttcaacttctcgggttttgaagtcacccccgccgactgggaacgctttgtgactgattctctgagctggctcggtcagttcgatatggtctgtgtcagcggaagcttaccgtcaggcgtcagcccggaagcgttcaccgactggatgactcgcctgcgtagtcagtgtccttgcattatctttgatagtagccgtgaagcgttagtagcaggtttgaaagcggcaccgtggctggtgaaacctaaccgccgcgagttggaaatctgggcaggccgtaaactgcctgaaatgaaagatgtgattgaagctgcacatgcgctacgtgaacaaggtattgcgcatgttgttatttcactgggtgccgaaggcgcgctttggattaatgcctccggcgaatggatcgccaaaccaccgtcagtcgatgtcgtaagcaccgttggcgcaggggattctatggttggtggcctgatttatggcttgctgatgcgtgaatccagtgaacacacactgcgtctggcgacagctgttgcagccctggcggtaagtcaaagcaatgtgggtattaccgatcgtccgcagttggccgcaatgatggcgcgcgtcgacttacaaccttttaactga

SEQ ID NO: 460717 - DNA, 1692 bp, Shigella boydii
atgaaaacgctgctgattattgacgctaatctcggtcaggcacgcgcctatatggcgaagaccctgctgggcgcggcggcgcgaaaagcaaaactggaaatcatcgacaatccgaacgacgcagaaatggcgattgttctcggtgattccatcccgaatgacagcgcgctgaacggtaaaaatgtctggctgggtgatatttcccgggcagttgcgcaccctgagctgttcctgagtgaagccaaaggccatgcgaaaccttacactgcgccggtcgctgcgacagcaccggttgctgccagcggtccgaaacgcgtagttgcggtgactgcttgcccgactggcgtagcacacacctttatggcggctgaagccattgaaaccgaagcgaaaaaacgtggctggtgggtgaaagttgaaacccgtggttctgttggcgcgggcaatgcaatcacccctgaagaagtcacagcagcggatctggtgattgtggcggcagatatcgaagtggatctggcgaaatttgctggtaaaccgatgtatcgtacctctaccggtctggcgctgaagaaaaccgcgcaggaactggataaagcggttgctgaagcaacgccgtatgaaccggcgggcaaagctcaaacggcgaccactgaaggtaagaaagagagtgcaggcgcttaccgtcacttgctaacaggcgtctcttatatgctgccgatggtcgtcgcaggtggtctgtgtatcgcgctttcttttgcttttggtatcgaagcgtttaaagagccgggtacgttggcagcggcgctgatgcagattggcggtggttcagcctttgcgctgatggtgccggtactggcaggttatattgccttctccattgccgatcgtccgggcctcacgccgggtctgattggcggtatgctggcggtcagcaccggttctggctttattggcggtataattgctggcttcctggctggttacattgcgaagttaatcagtacgcaactgaaactgccacagagtatggaggcgctgaaaccgatcctgatcattccgctaatttccagtctggtggtcggtctggcgatgatctacctgatcggtaaaccagttgctggcattctcgaagggctgactcactggctgcagaccatggggactgcgaatgcggttctgctgggggcgatcctcggtggcatgatgtgtactgacatgggcggtccggtaaacaaagcagcgtacgcattcggtgtgggtctgctgagtactcaaacctatggcccgatggcggcgattatggcggcaggtatggtgccaccgctggcaatgggtctggcaacaatggtggcgcgtcgcaaattcgacaaagcgcagcaggaaggtggcaaagccgctctggtattgggactgtgcttcatttcggaaggtgcaattccgtttgctgctcgtgatccgatgcgtgtgctgccgtgctgtatcgtgggtggggcgctgactggcgcaatctcaatggcgattggtgcgaaactgatggcaccgcacggtggtctgtttgttctgctgatccctggcgctattacgccggtactgggttacctggtagcaattattgccggtacgctggtggcgggtttggcctatgccttcctgaaacgtccggaagtggacgcagtagcgaaagcagcgtaa

SEQ ID NO: 460718 - DNA, 612 bp, Shigella boydii
gtgataggcagactcagaggcatcatcattgaaaaacaacccccgctggtgttaattgaagtgggcggcgtaggctatgaagtgcatatgccgatgacctgtttttatgaactccctgaagcgggtcaggaagcgatcgttttcacccactttgtggtgcgtgaagacgcgcaactgctgtacggttttaacaataaacaagagcgcacattgttcaaagagttgatcaaaaccaacggcgtcggcccgaagttggcgctggcgatcctctccggaatgtcagcgcagcagttcgttaatgccgttgaacgtgaagaagtgggggcactggtgaaactgccgggtattggcaaaaaaaccgccgaacgcttgattgttgaaatgaaagaccgatttaaaggtttgcatggcgatctgtttaccccggccgccgacctggtactcacatcacctgccagcccggcgaccgacgatgctgaacaggaagcggttgccgcgctggtggcgctgggctataaaccacaagaagcaagccgcatggtgagcaaaatcgctcgccctgacgccagcagtgaaacattaattcgcgaagccctacgcgccgcgttatga

SEQ ID NO: 460719 - DNA, 1011 bp, Shigella boydii
atgattgaagcagaccgtctgatttctgccggtaccactttgccggaagatgtagcagatcgcgccattcgccctaaattactggaagagtatgttggtcagccgcaggttcgttcacagatggagattttcatcaaagcagcgaaactgcgcggcgatgccctcgatcatttgttgatttttggtcctccggggttgggtaaaactacgcttgccaacattgtcgccaatgaaatgggcgttaatttacgcacgacttctggtccggtgctggaaaaggcgggcgatctggcagcgatgctcactaaccttgaaccgcatgacgtgctgtttattgatgagatccaccgtttatcgccagttgttgaagaagtgctgtatccggcaatggaagactaccaactggatatcattattggtgaaggtccggcggcacgctccattaaaattgatttgccgccgtttaccctgattggcgcaaccacgcgcgcaggttcgctgacatcaccgttgcgcgaccgttttggtattgtgcaacgtctggagttttatcaggtgccggatctgcaatatatcgttagtcgcagtgcacgctttatggggcttgagatgagtgatgacggcgcgctggaagttgctcgtcgcgctcgcggtacgccacgtattgccaaccgtctgctgcgtcgagtgcgtgatttcgccgaagtgaagcacgatggcaccatctcggcagatatcgctgctcaggcgctggacatgttgaatgtcgatgctgaaggtttcgattatatggaccgcaaattgttgctggcggtaatcgataagttctttggtgggccggtaggtctggataacctggcggcggctattggcgaagaacgtgaaaccattgaggatgtgctggaaccttatttgattcagcaaggctttttgcagcgtacaccgcgtgggcgtatggcgacgacgcgggcgtggaatcactttggcataacgccgccagaaatgccgtaa

SEQ ID NO: 460720 - DNA, 786 bp, Shigella boydii
atgattgaattattatttcccggttggttagccgggatcatgctcgcctgtgccgcgggtccgctgggttcgtttgtagtctggcgtcgtatgtcttatttcggtgatacgctggctcatgcctcattacttggcgtcgcgtttggtttgttgctggacgtgaatccattctatgcggtaattgccgttacgctgctcctggcgggcggtctggtatggctggagaagcgtccacagctggcgattgacacgttattagggattatggcgcacagtgccctgtcgctgggcctggtggtcgttagtctgatgtctaacattcgtgttgatttgatggcttacctgttcggtgatttgctggcagtgacgccagaagatctcatcgctattgcgattggcgtggtcatcgtggtggctattttgttctggcaatggcgcaatttgctgtcgatgacgattagcccggatctggcgtttgttgatggtgtgaaattacagcgcgtgaaattgttgttgatgctggtgacggcattgacgattggtgtagcgatgaaatttgttggcgcgttgattattacttcactgctgattattcctgctgctactgcacgtcgctttgcccgcacgccggaacagatggcaggtgtcgctgtgttggtggggatggttgccgtaacgggcggtttaaccttttccgcattttacgatacgccggcgggtccgtcggtggtgctatgtgcagcactgttatttattatcagtatgatgaaaaagcaggccagctaa

SEQ ID NO: 460721 - DNA, 756 bp, Shigella boydii
atgacaagtctggtttccctggaaaatgtctcggtttcttttggccaacgccgcgtcctctctgatgtgtcactggaacttaaacctggaaaaattttgactttacttgggccaaatggcgcaggtaagtcgacactggtacgggtagtgctcgggctggtaacacccgatgaaggggttatcaagcgcaacggaaaactacgcatcggctatgtaccgcagaagctgtatctcgacaccacgttgccactgaccgtaaaccgttttttacgcttacgccctggcacacataaagaagatattttgcctgcactgaaacgtgtccaggccgggcatctgattaacgcaccgatgcaaaagctctctggtggcgaaacacagcgtgtactgttagcgcgagcattgttaaatcgaccgcaattattagtgctggatgaacccactcaaggcgtggatgtaaatggccaggtgccgttatatgaccttattgaccagttgcgtcgcgaactggattgtggcgttttaatggtctctcacgatctgcatctggtaatggcaaaaaccgatgaagtgctgtgtctgaatcaccacatttgttgttccggcacaccggaagttgtttccctacatccggagtttatttctatgtttggtcctcgtggtgctgaacaactgggtatctatcgccatcatcataatcatcgtcacgatttacagggacgaattgttttgcgtcggggaaatgatcgctcatga

SEQ ID NO: 460722 - DNA, 987 bp, Shigella boydii
atgaaatgttataatatcacacttctcatattcattacgatgattggtcgcattatgttacataaaaaaacgcttcttttcgcagcattatccgccgctctctggggaggtgcaacacaggccgcagatgccgccgttgtcgcttcgcttaaacccgttgggttcatcgcttctgccattgctgatggtgtaacagaaacggaggttttactgcctgacggcgcttcagaacatgattattcactgcgtccatcggatgtaaaacgcttacagaacgcggacttagtcgtttgggttggcccggagatggaagcgtttatgcaaaaaccggtaagcaaattactaggagcgaagcaggtaacgattgcgcagcttgaagatgtgaaactgctactgatgaaaagtattcacggcgatgatgatgatcacgaccacgcggaaaaaagtgaagaagatcaccatcacggcgatttcaacatgcatctttggctttccccagagatagcgcgggctacagcggttgcaatccatggaaaattagtggaacttatgccgcaaagtcgagccaaacttgacgccaacctgaaggattttgaggcacaattagcctcaaccgaaacgcaggttggtaacgagctcgcgccgctcaaggggaaaggttatttcgtttttcacgatgcttacggctatttcgaaaaacagttcggactgacaccgcttggtcattttaccgttaaccctgagattcaacctggcgcgcagcgtttacatgaaataagaacacagttggttgagcaaaaagcaacctgcgtttttgctgagccacagttcaggccagcggtcgttgagagcgtcgcacgagggacatccgttcgtatgggaacgttggatcccttggggacgaatatcaaactgggtaaaacaagctattcagaattcctgagtcaattagccaaccagtatgcgagctgcctgaaaggagattaa

SEQ ID NO: 460723 - DNA, 1323 bp, Shigella boydii
gtgcaacagatagcccgctctgtcgccctggcgtttaataatttaccgcgaccacaccgcgttatgttggggtcgctcaccgttcttactctggccgtcgctgtctggcggccctatgtttatcaccgcgatgccacgccaattgtcaaaaccattgagctggaacagaacgaaattcgttcgctcttacctgaagccagtgagccgattgatcaagctgcacaagaagatgaagccattccccaggacgaactggatgacaaaatcgccggtgaagcgggtgtgcatgaatatgttgtttccactggcgatacgctaagcagcattctcaatcagtatggtattgatatgggtgatatcacccaactggctgcggccgacaaagaattgcgtaacctgaaaatcggtcaacaactctcctggacattaaccgcggacggcgaactgcagcgcctcacctgggaagtgtctcgtcgtgaaacccgaacctatgaccgtactgccgctaacggttttaaaatgaccagcgaaatgcagcaaggagagtgggttaacaatctgctgaaaggtaccgtcggaggaagctttgttgccagcgccagaaacgccggtttaaccagcgccgaagtgagcgcagtgattaaagccatgcagtggcaaatggatttccgcaaactgaaaaaaggcgatgaatttgcggtgttaatgtctcgagagatgcttgatggtaaacgtgagcaaagccagctgctgggcgtacgtttgcgttcagaaggtaaagattattacgcaatccgcgctgaggatggcaaattctacgaccgtaacggtactggtctggcgaaaggattcttgcgattcccgacggcgaaacagttccgtatctcgtctaactttaacccgcgtcgtactaatccggtgaccggtcgcgttgcaccacacagaggtgttgatttcgccatgccgcagggtacgccagtgctttcagtgggtgacggtgaagtggtggttgccaaacgcagtggcgcagcaggttattatgtggctattcgtcatggtcgcagctacaccacgcgttatatgcacttgcgcaagattctggtgaaaccgggacagaaggtgaaacgtggcgaccgtatcgcgctttccggtaataccggacgttcaaccgggccgcatctgcactatgaagtatggataaaccagcaggccgtaaacccgctgacggcaaaactgccgcgtaccgaagggctgaccggctccgatcgtcgcgaattcctggcgcaggccaaagagattgtgccgcagctacggtttgattaa

SEQ ID NO: 460724 - DNA, 972 bp, Shigella boydii
atggaaatgaaaaaaaataatagcgaatacattcctgagtttgataaatcctttcgccacccgcgctactggggagcatggctgggcgtagcagcgatggtgggtatcgctttaacgccgccaaagttccgtgatcccattctggcacggctgggacgttttgccggacgactgggaaaaagctcacgccgtcgtgcgttaatcaatctgtcgctctgctttccagaacgtagtgaagctgaacgcgaagcgattgttgatgagatgtttgccaccgcgccgcaagcgatggcaatgatggctgagttggcaatacgcggaccggagaaaattcagccgcgcgttgactggcaagggctgcagatcatcgaagagatgaggcgtaataacgagaaagttatctttctggtgccgcacggttgggccgtcgatattcctgccatgctgatggcctcgcaagggcagaaaatggcagcgatgttccataatcagggcaacccggtttttgattatgtctggaacacggtgcgtcgtcgctttggcggtcgtctgcatgcgagaaatgacggtattaaaccattcatcctgtcggtacgtcaggggtactggggatattatttacccgatcaggatcatggcccagagcacagcgaatttgtggatttctttgccacctataaagcgacgttgcccgcgattggtcgtttgatgaaagtgtgccgtgcgcgcgttgtaccgctgtttccgatttatgatggcaagacgcatcgtctgacgattcaggtgcgcccaccgatggatgatctgttagaggcggatgatcatacgattgcgcggcggatgaatgaagaagtcgagatttttgttggtccgcgaccagaacaatacacctggatactaaaattgctgaaaactcgcaaaccgggcgaaatccaaccgtataagcgtaaagatctttatcctatcaaataa

SEQ ID NO: 460725 - DNA, 828 bp, Shigella boydii
atgacgctgatttatcactacaattcctcttatcttcgcttcgcatttaccctgacacaggacagtccacgcgttgatgtccaaacttttattgattggcacgaacctaatgtttctctcaaagtcaaattcccggtgtcagtacaaacatctcttgcacaatgtcaaattcagttcggtgtaattgacagaccaacgcatagcgatgattcgttcgcttttgccaaagatgaaataccagcacatcactgggtcgacctttctgatcgagaaactggcatagctttaatagcaaaaaacaaatatggctaccgtgtcaaagaccagacgcttgaattaactttgctgcgttcgcagcataaacctggggaagttgttaagacagacaattatgataatttcctgattaataattttgcagatattggtaaacaaaaattcatattctccttatttcctcatcatggagattaccgtgtgggtggtgttattaatcaagcctatataatgaatcatcccttacaggtcgtccctgtcaaactgcacccgggtgaattacccccttcactatcattttttgctatcgatactaacagcgttatcatcgaaacaataaaattagctgaagacggcgacggtataatcgtaagattatatgagagtcatggattagaaatttcagccatgctttcgtgggtatgtaattatcactacgttcaatatgtcgatcttcaagaaaataagttagatgacagtttttattgcaatcaatattgcaatcttgagttcaaaccttttgaaattatcacgctacgattaactcaatag

SEQ ID NO: 460726 - DNA, 309 bp, Shigella boydii
atgagcagaaaaaaccaacgttactctaaagagttcaaagccgaagctgtcagaacggttcttgaaaatcaactttcgatcagtgaaggcgcttcccgattatcccttcctgaaggcactttaggacaatgggttaccgccgccagaaaagggctcggtactcctggttcccgcacggtggctgaactggaatctgaaattctgcaactgcgtaaggcgttaaatgaagctcgccttgagcgagatatattaaaaaaagcaacagcgtattttggtaagcgtaaactgaccgccgtatgtagccattaa

SEQ ID NO: 460727 - DNA, 276 bp, Shigella boydii
atggccgcggtaattctacgcaaagttgaaaaaatttatgacaatggattcaaacctgttcacggcattgatctcgatataaacgatggtgaattcatggtttttgttggaccatctgggtgtgccaaatcaactacattacgcatgattgcaggtcttgaagacgtatcaggtggtgaaatttacattagcgaccgccttgttaatacccttccgcctaaagatcgcagcattgcaatggtgttccagaactatgcgctgtatgaggtagcctga

SEQ ID NO: 460728 - DNA, 489 bp, Shigella boydii
atgaaaaataaattgcttattgcggctgtgttgactggtcttctttcaggatgcgttgatggcaattcaccctctggcagtcaggaaggtgtcgtgaaagcggatcctcgctattcagaatgtaacctccctgatgtaaatgaaagagggccaattgctgcgggtctttacatttccggaaccctcccggaaggctattggttaatgaagccagagcgtaaaatgcattataagggagatggtatttatcagcttatttattctgaaaaagcaggtgcggtaacaatgcaatttgcgactatgaactggaatccgcagttcactgtaacaggtcttgaattgccattaaatcaggctaaaacactcaagaaaggaggcatggataaaaatacaaaagtcgtcattcctgccgatggaaagtatgtttggacgattcaaattggtcctgataaaaaggcaatagccgccatggtagcaccatgtaaatag

SEQ ID NO: 460729 - DNA, 957 bp, Shigella boydii
atgttcagcgcactagatattaaaacgttgatgcaaggaactttatatggtgatccatcactcagggttgataccattcggccaatccatagtcctttagttggtggactctcgattgttatgacacctggagatttgttgcatataccaacgactggtgcggatataattatcggaccggaagagatcattagttctaatactaaggcaaagattgtagtcgattacctgaacgtgaataatcttaacaaagttttaagatattttaaggtacataagtatcgtttgtttgagcaagaaaacacttcaacgatacctgatgtatacattggtaaacactgccagataggtatgaactgccattttatgcctggtgttaaaattatgaactgtgtgaccataggtgataatgttgccattcatgcgaatacagtgattaaagaaggtactattattggcaatgacgttatcatagattctaataactccatcggtaattatagttttgaatatatgtcggatgaacgtgattcatatgtccgagttgatagcatcggtagagttatcataggtgattatgttgaaatcggttgtaacaacaccattgaccgagggacacttggagatacgattataggccaaggcactcgtattgataatcaagtgcagattggacgtgactgcataatcggtaataaatgcctgattgtttcacaatgcggtttttcaggacacgtagttttaggcgaccatgttattacacatggtcaagtcggaatcgccggtcacatatcaattggtagttattcggtaattaaggctaaatcaggtgtaagccattcttgtcctgaaaagagtgacctttttggttaccctgccaaaaatacgcgagaatacaacaaaaatctcgctgtccttaataaactaactaaacagcatggtgtatataaacagtga

SEQ ID NO: 460730 - DNA, 627 bp, Shigella boydii
atgtataccgacggtaatatagatagcccttatgtcacaggcttgcatactgtaactgttgacaacagttttcgccctacgttgacgtactttaactctgactggaacgcaggtttttattcaaacgttgaatacttatacagtcgaaatgataagagctcctggggcgtacgcgaagaagaaggtcaaagtatactatttcagccctataaacgttttggtgcatgggagtttggtattgaatttttctaccagaaaaagcataacgatgaatttaatcacggtaaaataaatgatcgtagtatttataccgaaacttactacgagccaattatcaaatatgcttttgaaaacgcaggtaatctgtatctacgcacccgcttcggacacgggaaaacagaaaacgcagatagtttgcaatacaatgcaaacagaacctatttcaaaacaattcgaaaagccactctaggttatgaacaaaacataggtgacgactggatagccaagattgaatataaacatgcctgggaaaaagagcacaaaaacttttatgatccaagagatgaagaaaaatataatgtgctcaatcaggataatatttatgttcatgctttctatcgcttttga

SEQ ID NO: 460731 - DNA, 159 bp, Shigella boydii
atggttttaataaaaaagaatgtcttatcggcttcaattgcaacagtcattttaggctcaacaggagcctttgcggcaaacgatcgcggctttacctccgacactgactggtcagaagaacaagcgggctttaatggacatgttggtactacattttaa

SEQ ID NO: 460732 - DNA, 1233 bp, Shigella boydii
atgaagctttcaaatatcgtcacagttataattcttgcaatttccagtacgctaacaccccaggcgatggcagaaaaattaattcctgaaactgatgctgagttgttagtttggtctgatgccacaagcgtggaatatatgaaatatgcagcaaaggaattcaataaagattttggctacaaggtaaagtttacatttcgcaatatagcgccaatggatgcagcatcaagaattatgcaggatgggggtacgactcgtgtagctgatgtagctgaaattgaacatgataccctggggcggttagtcgttgctggcggggttatggaaaacatggtctcagctgagcggattaaaaaaacatttattccaggcgcagtatcggcagctacatataataacatcagctatggttttcctgtaagtttcgcaacgctggcgcttttctataataaggatttgttaaacaccgcaccaaaaacattcgaagaaatcaatactttcagtgaaaagtttaataattcatccgagcataaatatgctctgctatgggatgtacaaaattattatgtttcacgtatgtttattaccttgtatggtgccaacgaattcggtaaaatcggtaacgatcctaaagctctaggcatcgcttcatctgaagcgaagaaagggctagagacgatgaaacgcttaaagaaagcgaatccctctaatcctcttgatatgggtaatccacaagttctaagaggtctgtttaatgaaggtaaagttgctgctgtaatcgacggaccttggtccatacaaggttacattgacagcggaatcaattttggcgtgacacgcatcccaacattagatggtcatcagcctcgcacattttcaacagtacggctggccgttgtaagctcatttaccgcatatcctcatgccgctgaattattcgctgactacctgacaacggataagatgttgatgaagcgttatgaaatgacgaatctcatcccaccaatcgattcacttatgaacaaaattagccagacaggtagtgaagctataaaagcaattattgctcaagctaattattctgacgcaatgccatcaataccggaaatgtcttatttatggtctccaatgactaatgctattttggctacctgggttgagaataaaacaccggatgaagttttaaatcatgcacaaacaattattgaagaacaactttcgcttcaggagtaa

SEQ ID NO: 460733 - DNA, 1290 bp, Shigella boydii
gtgaatacacaacaactgaaaatgaagagtgcacctgtgctacctatttcctgtttgattatgggcgggactcagttatcacgtcattattatgtgaaaggcgggatattctttgcaatacaagtatgctttttgctttatctttccgatattgtgcatacattaataggtttgttcacattaggtgatgtcgcgcaaattcgaaaagggctgactgttattcagggtgacaattctatatttatgcttgtagagggcgtgatagcgaccattattgttggcttattcgccactatttacatccttaatattaaagatgcgcggaactcatcttattgccatctgacttttaaacaacagttatataagctctatgaggataaatttgcatttatagtcctaacgcccgcatttttagcgagtatagcattcattgttttacctattgtaattacagttcttgtatcgtttacaaactatgctgcgccaaatcacatcccaccaaagaacctggttgattgggttgggattaaaaatttcataatgttgtttaaatttaaaatatggtctgatacgtttctaggtgtcgctctctggacatttatttgggcaatttgcgcgacggtttttaccttcagttttggctttattctggctttagcactggctaaaaaaaatatacgtttcgcaaaagtctggcgattgatatttatactgccatatgccatacccacatttgtaacgttacttattttgcgtcttcttttaaatggaattggtccggttaactcgtttctgaacagtatcggaatgaattcagttgattttctgtcggttccattaaatgcaaaaataacagtaattgccgtttgtgtttgggtaggggcaccgtattttatgctattgatcgcgggtgcattaacaaacatatcccgagatttgtatgaggctagtgaggtcgatggcacaactaaatggcaacagtttaaggaaattacattgccaatggtgttacatcaggttgcgtcaactctggtaatgacatttgcatataatttcaataattttggtgcaatttatcttctgactgaaggtggtccgactaatccggaatacagattcgctgggcataccgatatttttattacctggatttataaactcacattgaatttccagcaatatcatatagcttctgtaatctccatcataatatttatcttcttatcggttatagcaatatggcaattcagacggatgaaatcatttaaagatgatgtagggatgtga

SEQ ID NO: 460734 - DNA, 168 bp, Shigella boydii
atgcagtggtatttgaacactttcattcttgctaccgctaacatgttaatttcactgttcgttgtgacgatgaccgcctacgttttttcaaggtatcgatttcgtggaaagcgtaatacgttaatgagtattcttgtattgcaaatgtttcctgcattttatcaatga

SEQ ID NO: 460735 - DNA, 642 bp, Shigella boydii
atgattacagttagttcgttaaaacactcagcaaaaagtgaagatagctatgcctatgataacgaaactttgtatgtacggttacgcacattaagaggagaagttgataaagttattctctggataggcgatccatataattgggctgaaggtggtcttgacggcggtaacatggtcgggacagaagcgttcggctggattggcggcaacgagatcgagatggaacaagaagctgtcaccgaatttcatgatcactggtttgcagtgttcaaacctcaaaaacgccgttgccgttacggttttatactttttgggaaagagggagagaagtttctttttggtgagaaaaggtgtgttgatatcagttcaccggagtgcgaagaacgagagttaagccgcttaaataactttttttgcttcccttatcttaataaaattgacgttctaaataccccctcctgggtaaaaaatacggtatggtaccaaatttttccagaccgtttctgtaacggcagacctgaaatatccccagaaggggtagaaccgtggggcagtacaccgacttcattcaactttatgggtggggatctgtggggggttattgataaactcgatggtaatgctgccaacttactgatttag

SEQ ID NO: 460736 - DNA, 831 bp, Shigella boydii
ttgtttgttgaatggaaacctgaacttgaagaggctgatattagtgattctgtgattcataaaaaaatcccggtaaaatatgttcaggcaccatcctataaagaaatatttgaggtgctgagtgaaactaaaaaaaggattccagcacatttattccgaatgataaaagatgaactttatgagttggtcttaactgatgatccgaaaggaaaattatatgtgagggattcagagaaaattgaagaaggggtcagtacaactgagtttgttgtgggatatggtgctatttcgatggtaaaaaaatcggaatcgatggcaactaaaggattggttggactggagcgtgtagatctcatccgagaggttgtatttgaaaatggatattatgattggggatgtgttgttaatgatgttttgccaaatatatgcaaaggcaatgtgcgcattcctatttttcacttcttaaatcacgctaaattaattaatcctgatgggagtataattaatgaaacagaactctcaggtggcgttttatcacgattaaatatcactcctattagttttcagtctcaaggatgggataaacgacgctctgaaaccgttcctgaggtcaaggtgggggtcaatgagttatatcttgcttatgatttcagtttctttttaagaatgatgccttatatggagcctggattaatcaagcgcgatatgggagagcttctcaaaatattgaaaaaatatatagatgaagctatgaatactcaggtattgtcaagtaatttttgcaaattagtgtgtatttatgattatatcaaaaatagtcacaggtattaa

SEQ ID NO: 460737 - DNA, 1083 bp, Shigella boydii
gtgagttcggcaatggtgaagttaggggatgttattaatgttcactacggaaaagcattaaaagctgatcagcgtgtatcgaatggaagtgtccatgtttttggtagttcaggaattgtcggcaaccacgataaaacgctttgcagctatcccacgataattattggccgcaaaggcagcgttggtgctattacctgggctccaagcggaggctggatcattgatactgcttattacgttgagatcaaagataataataagttagatctccgatacttgttttatattctgagcggaattgatctcactaagaaaacgattaccacaagtattcctggattaaatagagacgatctctatgatacatttattaaattaccaccttttgaagagcagaaacgaattgtggatcttctcgataaagctgagggtatacgccaaaaacgtgagcaatccatcaaactggctgatgattttttgcgtgctacgtttgctacaatgtatgggaatcctattacaaaccccaaaaaatggcctgtccatcttatgggagacattattgaatttaaaggtggaaatcaaccacctaaaagtgattttatttttgaacctaaacagggttatattagattagtacaaattagagattttaaatccgataaatatgcgacgtacattccgcaagaaaaagcaaaacgtattttcgaagttgatgatgttatgattgctcgttatgggccacctgtgtttcaaatacttagaggtttatccggcagctacaatgtagctttaatgaaagcttcacccaaagaaaatattaggaaggggtttatattctatcttctacaacttccggaatatcatgatgttgttgtaaaaaactctgaaagaacagcaggacaaaccggtgtaaatcttgaactattaaacaaattcaatgttcccctcccacctatatactatcaagatgagatattagatagattagctagaattgaaaaatttaaagaaaaaatagaaatatcattaaataatttagaaatacaatttttatcactacagaagagattaatgggtttttaa

SEQ ID NO: 460738 - DNA, 1635 bp, Shigella boydii
atgattactggcgacttaaaaagtaaaatcgacggactatgggaagatttctgggtgggtggtatcaccaacccgctgaccgtaatcgaacagatcacctatctgatgtattcccggatgctggatacccaggaacaacgcgacgaaaagcgtaaacaaatcgcgggtattgattttaaaccgcgttttgcgccagaacagcaggagttccgtttcagtcactatagcaaccttggctcggatgagatgatggaagtggtgcgcgatggcgtattccagcatttccgtcagctcggccaggccgatgcttcgaaggtgacgctgctgggcaactttatgaaagatgctcgtctggagattgttaagccgtcattgctgaccaaagcggttgaggtaatcaaaaacctgccattggatcgcggcgacaccaaaggcgacctttacgaatacctgttaagcaagctgacaactgccggaatcaacggacagttccgcacaccgcgccacattatccgcacgatggttgaaatgatggagccgaacccggcccgcggcgagacgatttgcgatcccgcctgtggcaccggtggttttctggcaaccagctatgaatatctgctggagaagtacagctcgctggaatccattcatactgagattggcaccaacgaacgtggcgagctggaagagcaaaaaatctttaccggcgatctgctgacaccgtggcgtaaccatgtggataacaacatgttccacggttacgactttgacaccacaatgctacgtatcgccgccatgaacctgattatgcacggcgtggatgcgcctgatatccactatcaggacacaatgagccagagtttcagcacaaacttcccgcaggccagtaaaaacgccttcaacctgattctggcgaacccgccgtttaccggttcactggacgaggaagatatcgactccacgctgtcggcaatggtgaaaaccaaaaaaaccgaactactgttcctggcgcgtattctgcaaatgctgaaagtgggcgggcgcagtgccactatcgtgccgcagggcgtgctgtttggctctagcaaggcgcaccagtcacttcgcaaaacgctggtggaagataaccaactggaagcggtgatcaatctgccttctggtgtatttaaaccttacgctggcgtggcgacggcgatcttgatctttaccaaaggcggtcaaacggatgaggtctggttctacgatctacaaaatgacggctacagcctggatgataagcgcaacccgataaaagacaacgatctgccgcatctgctggcaagctggaagcattaccgtactttacgcgggctaccggttgataactttatgggtaagaagttagcctcgttgcttaaacagcagtacccggaagggattaatgctggcgttgattttaaagatcgcacgcaggcggcgtttgttgtaccgaaagcggatattgctgcgcagaaatacgatctatccatcaaccgttataaagaagtcgtgtatcaggcggaggaatatgaagatccgaaggtgatattgaagcggttaaaggatctggaaaaagagattctggcggatttggatgagctggaggggatgctgtga

SEQ ID NO: 460739 - DNA, 3414 bp, Shigella boydii
atggagcagtctctcaattttgaaatgttgcgcagccagtggccggaactggcagaactcgcatgtatggcagagcgctatgttcactccgatccggaaagctgcctggttaagctgcgcaactacaccgaattgatggtgcgctggttgtatcgtcaggagcggttgccggaaggtattaaggctaatctttacgatttaatgaacgctgatgtctttaccagcatgatgccggaagccatcatcatgaaaatggatgctctgcgtatccatggcaaccgtgccgcgcacggcggacgtatcaaagctaaagatacttactggctgctcaaagaagcgtatttgttgggaatttggctgtatgttcgctacgcccacggtaatgttgatgactgccccaaatttacactccctccattaacacaatcttcaggtcgtgcagatgaaaaacgtctggaagatgcaatcaaggctcaggatgaaagccgtgagcgcgaactggcgctacaacgcgcactacagcaagaacaggaaaaggccgaacacctcactcaacgcctgaatgaagccagagcgcgtaacaagcatgttgccgatattctctctattgatgaagcggaaacccgccgtcgcctgattgactctcgcttacttgcagccgactggaatgtaggggaagaacttaaaaacacggatcaagtcacacaagaacatccagtcaaagagcaacccaccacctctggtgacggttatgcagactatgtcttgtgggatgaggcacacaaaccgttggcggtggtggaagcaaaaaaaaccagcgtcaatgccgagcaaggacgaattcaggcccggctgtatgcagactggctggaaaaagaatacggtcagcgtccggtcatcttctacaccaacggctatgatatctggctgtgggatgaccataaaactcatggttatcccccgcgtcgggtgtttggcttctacagcaaggaaagcctgcaatatcttattcagcagcgtgaaacccgtctgccgctgaacagagtgccacacgtaaaagataacgaaggtaaggccgttgccggacgtttgtaccagctcgaaaccattgcccgcgtcagtgaacggtttaccaacaagtaccgacaatcgttaattgttcaggctacgggtacaggcaaaacccgcgtggcaattgcactaagcaaactgatgattgatgcccgctgggtaaaacgcgtcctgtttctttgcgaccgtaaagaactgcgtaaacaggcggcaaatgcctttaatcaattcaccaatgagccgctgtatgtggtcgggaaatcgaaaaaagcagacaggcagaatgccagaatctacatcgctacctatcccggtatgatgaaaatcatggaccatttcgatgtcggttatttcgatttgatcatcgccgatgaatcccaccgctctatctacaacgtctacggcgatctgtttaagtattttgatgccctccagattggcctgacggccacgccaattgacatggtgagtaaaaccactttcggcctgtttggttgtgaaggacgtattcctaccgccaactacagcctggaagatgccatcgccgataacaatctggttccctatgaggttgtcacacacacaacagaattcctgcgcgaaggtatcaaacgggagaaattaagcgacgcacaaatccgcgagctggaagaacaaggcatagatcccaatacgctggagtttgatggcaaggcgctggatgaggcgatctacaacaaagacaccaaccgctatatcctgcgtaacctgatggaaaatggcctgaaagatcgggacggccagttgcctggtaaaaccatcattttcgcccgtaaccacaaacacgcgctgctgttgaatgaattgttcgacgatatgtacccacagtttgccgggcgcttctgccaggtcatcgacaactacgatccccgcgccgagcaactgattgatgattttaaagggctggatgaaagcaccaacaaagagctgaccatcgctatctccgttgacatgctcgataccggtattgatgtcccggaaattgtgaatctggtctttgccaaaccggtcaaatcaaaagtgaagttctggcagatgattggccgtggtacgcgcctctgtccggggttgtacggttacgacgataacggcaaaccgctggataaacagaaattccgcattttcgatcactggggcaattttgagtatcacgagctgcataccgaagaggcggaagtcacagcgacaaaatcgcttgcgcaaaaacgcttcgaagcgtgggttatgctgggggccgctgcgcagcgtaaattcgacaaacaggcggtggatttagttgctcaccagcttcgcgagcaaatcaacgcactggatgaaaagtcgattgccgtacaggaaaaatggcagcagaaagcgcagtacagtgatgaaaaggtgctgcgccagctttctccgaaaacacagcaggatctgctatctgttctggccccgttgatgcagtggctggacgtgcgcgggcaaagcgatgccatacgctttgatatggatattctggcggcgcaaactgcccgttataccaacccggaagagctggatgttctctggccgatcatcgtcgaaaaagtggagcgcctgccgccgcatttggcgcaggtgcagcaacagggacaacgaatcaatcagcttcgtgatttaagctggtggaagcaggccagcctggaagagctggaggatattcgcattcatttgcgcggtatcatgcacctgatggaaaaagacgcgacgcctaaatttggttcgatacaggtggatattaccgaagatgcgaacctgatccagacggagacccgcaaaactaatatccgctcgattgatttcaaactctatcgccagcaggttcagggggcgctggagccgctgttccagcaaaacccggttctgaagaaaatccgcaacggcgagccagtcacgcaaaacgagctggatgagctggcgaagctggtgctgatccagaaccccaacgttgatattcgtgcgttgaaagagttttatccgcaggcaaccgccagcctggataaacttttgcgtaccatcatcgggatggacagcgacgcggtggaagtgcgttttgcccagttcgccgctgataacagcctgaccagccaacaactgcgcttcctgtcattgctgaaaaaccacattcgcgattacggcaccattgaaatgcggcagctctttgaacagccttttacgcatatccacaacgaaggcgttaccggtgtgttccctgatatagcgcaaatcgcccgcctgcaaaagatagtcgaagagctgggtgttgtgaccgacgcagcgacggtataa

SEQ ID NO: 460740 - DNA, 585 bp, Shigella boydii
gtgagcaaattgatcttacccagcaatacggtcagttaccgcgcacatggcctgcctgtgtcagaaaatctgctggagcaggatttttacgccagtggtccgaaccagaagtgggcgggagacatcacgtacttacgtacagatgaaggctggctgtatctggctgtggtcattgacctgtggtcacgtgccgttattggctggtccatgtcaccacgcctgacggcgcaactggcctgcgatgccctgcagatggcgctgtggcggcgtaagagaccccggaacgttatcgttcactcggaccgaggaagtcagtactgttcagcagattatcaggcgctgctgaagtggcataatctgcgtggcagtatgagcgcaaagggctgctgctacgataatgcctgcgtggaaagcttctttcattcgctgaaagtggaatgtctccacggagaacactttatcagccgggaaataatgcgggcaacagtgtttaattatatcgaatgtgattacaatcgctggcgacggcacagttggtgtggcggcctcagtccggaacaatttgaaaaccagaacctcgcttag

SEQ ID NO: 460741 - DNA, 477 bp, Shigella boydii
atggggaaaaggatagtaaaaatatcatcaaccaaaataaatactagtattttgagctctgtttcagaacaaatcggtgaaaatattacagattggaaaaatgatgaaaaaaaagtctacgtatcccgggtggtaaaccaatgtattgataagttttgtgcagaacacagccgaaaaatcggcgataatctccgtaaacagatatttaaacaggttgagaaagattatcacatttctctagacatcaatgctgcacaaagttccataaatcatcttgtatcaggaagcagttatttcaaaaagaaaatggacgaactttgtgaagggatgaatagaagcgttaaaaatgatacaacaagcaatgttgcaaatcttatttccgatcagttttttgagaaaaatgtgcaatatattgatctaaagaaattacgtgggaatatgagtgactatattacaaatttagaatcgcctttctga

SEQ ID NO: 460742 - DNA, 207 bp, Shigella boydii
atgcccggagccactgttgctgatgaattcgataaaaccttggcgtttcttgaagctatcgttaatgcggataatgaaacaacgattggtgagattcgctcttttgccgacaccctggacgctgtccggttcaatcgcaacaaaatcaaccggcagctgagcaaacccaaccttgcctctctgacgctggagcatgaagtgatttag

SEQ ID NO: 460743 - DNA, 231 bp, Shigella boydii
atgcattccgtattgggcactatgatgccagaaatctgcaaggctccacaccttcctgtatttcccttcctctatcacagtgcactttacttaatagggtgggatgtgttcattacatttattgtgttttttatgattgtttttgcgtccagtgtcgttcgtcatgggaaactggttctatgggtagtatcgctcagtctagttaactgtttgtttctttttagaaattaa

SEQ ID NO: 460744 - DNA, 678 bp, Shigella boydii
atgtcaataaataactatggattacatccagcaaacaacaaaaatatgcacctaataataggcagcaatactgctaatgaaaataaaggaatgaaacgtaatatcattaacgtgacaaataccgctatatcccacgccatcaatgaagaaaaatcaggggggggatatagtggtgtttctttcagaaaattggccaaaatacagagcatatccattccgacaaagaataataaggagtataaccgccataatttgttttcattgatttggcatggaaatgccgatgcagcgcgtaaatacggtgaatcgctgttggcagccgaaatacccaaagaggaaaaactagaagttcttgcagcacgaaataatgctggggaatctgctttgttcatagctcttcaagaaggtcattccgctgcgattcaagcttatggagattttattaaaacttttgatttatcactaaaagaaacgattaaactattggatgtaagagataatgaggggttaccaggattatttctggccgcagggaaagggaatatcgaggctatgatggcatatataaatatatgccatcatagtgggataaaacttacagaaatagcagacagacttaacaataatgaacaagacatgtttaatattatttctgacaaaatacaagagttgttttaa

SEQ ID NO: 460745 - DNA, 135 bp, Shigella boydii
atgaatgaaaaacagttgacatctaataagttgcgggctttagctaatgaactagccaaaagtctcaaaaatcctgaagatctcagtcagtttgattggatgctgaaaatgaaaccgtactcaatgctaatatga

SEQ ID NO: 460746 - DNA, 1233 bp, Shigella boydii
atggacacctcacttgctcatgagaatgcccgcctgcgggcactgttgcagacgcaacaggacaccatccgccagatggcgaaatacaaccgcctgctctcacagcgggtggcggcttatgcttccgaaatcaaccggctgaaggcgctggttgcgaaactgcagcgcatgcagttcggtaaaagctcagaaaaacttcgcgcaaaaaccgaacggcagatactggaagcacaggagcgaatcagcgcacttcaggaagaaatggcggaaacgctgggtgagcaatatgacccggtactgccatctcccctgcgccagtcttcagcccgtaaaccgttacctgcctcacttccccgtgaaacccgggtcatccgtccggaagaggaatgctgcccggcctgtggtggcgaactcagttctctgggatgtgatgtgtcagagcagctggagcttatcagcagcgcctttaaggttatcgaaacacaacgtccgaaactggcctgttgccggtgtgaccatatcgtgcaagcaccggtgccttcaaaacccattgcacgcagttatgccggagcggggcttctggcccatgttgtcgctggaaaatatgcagactatctgccgttataccgccagtcagaaatataccgtcgtcagggcgtggagctgagccgtgccacactggggcgctggacaggtgctgttgctgaactgctggaaccgctgtatgacatcctgcgccagtatgtgctgatgcccggtaaagtccatgccgatgatatccccgttccggtccaggagccgggcagcggtaaaacaaggactgcccggctgtgggtctacgttcgtgatgaccgtaacgccggttcggaaatgcctccggcggtctggttcgcgtactcaccggaccggaaaggtatccatccacagaatcatctggccggttacagcggagtgcttcaggccgatgcttacggtggttaccgggcgttgtacgaatccggcagaataacggaagccctgctgcgtatcggtgaactgtatgccatcgaggcagaagtccggggatgttcagcagaacagcgtctggcggcaagaaaagccagagccgcgccactgatgcagtcattgtatgactggatacagcaacagatgaaaattcattcgctgaaaatggaatgtctccacggagaacactattatccatcgggaaatagtgcgggcaacagtgtttag

SEQ ID NO: 460747 - DNA, 348 bp, Shigella boydii
atgatatctttccctgcaggttcgcgtatctggctggttgcaggtatcaccgatatgcgaaatggctttaacggtctggcctcaaaagttcagaacgtcctgaaggatgacccgttctccgggcatctgttcatcttccgcggacgccggggtgaccagataaaagtgttgtgggctgacagtgacggactgtgcctctttaccagacgcctggagcggggccgcttcgtctggccggtcacccgtgacggcaaggtgcaccttactccggcccagttatccatgcttcttgagggcatcgactggaaacacccgaaacgaacggaacgcgctggcatccgcatataa

SEQ ID NO: 460748 - DNA, 306 bp, Shigella boydii
gtggcgcagatcgcccgtgaaaacggaatcaacgataacctgctcttcaactggcgccatcaataccggaaaggtggcctgctgccttccggaaaaaatatgcctgcactgcttcccgtgacgttaacgccggagccggataataaaatcccggctccggcacaggaaccagagcagataaatacaccgtccgacagtctgtgctgtgagctggttctgccggccggaactctcaggcttaaaggtaaactgacgccggcgttattacagatacttatccgcgaaataaaagggagcagccactga

SEQ ID NO: 460749 - DNA, 1095 bp, Shigella boydii
atgtcaacttctatcagaatctgtagctacctgctgctgccgctgatctacctgctggttaacgtcaaaatcgcccagcttggtgaaagtttccccatcactatcgtcacttttttacctgtcttgttactgctgtttttagaacgcatcagcgttaaaaaattgatgattgccttagggattggtgcgggactcacggcgttcaactatctgtttggtcagtcgttggatgccagtaaatacgtcacttcaaccatgctgtttgtctatattgtgatcattattggcatggtgtggagtattcgctttaaaacgatttcgccacacaaccatcgcaagatattacgtttcttttatctggtggtcgggctggtggtggcgctggcggcagtggagatggcgcaaattatcctcaccggtggcagcagtattatggagtcgatttcgaaatatctgatttacagcaacagctatgtgctgaatttcattaaattcggcggcaagcgcacgacagcactttatttcgaaccggcatttttcgctctggcattaatctcaatttggctcagcatcaaacagtttggtatcaaaacgcctaaaaccgatgctatgattctcgcagggataatattatccggatcgttttcaggggttatgacctttatcctgttttatttgctggagtgggcatttcaatatctgaataaagaggcgattaagaaaaatttaccgttggcattgatttctctggctgtattcctggttggtgtggtaatcgcgtttccttatatttccacccgtctgggcgatttaggtacggaaggatcgtcatcgtattatcgtattgtcggtccgctggtgatggtcggttattctttgacccatattgacggtgtagtcagatttggctcactttatgaatatgtcgcatcattcggaatatttaacggtgcggatgtcggaaaaaccatagacaatggtttgtatctgctgattatttatttttcctggttcgcagtgtttttatcgctgtggtacatggggaaagtgataaaaatgatgatcaacgctttggtaatgactccaacttactga

SEQ ID NO: 460750 - DNA, 1230 bp, Shigella boydii
atgaatattttgcaatttaatgtgcgactggcggaaggcggggcagcaggtgtggcgttagatcttcaccagcgtgcgctgcaacaggggctggcgtcacattttgtctacggctacggctacggctacggcaaaggcggcaaagagagcgtcagccatcagaactatccgcaggtcatcaaacatacgccgcggatgaccgcgatggcgaacattgcgttgtttcgtctgtttaatcgcgatctgttcggcaatttcaatgagttatatcgcaccattactcgcacaccgggcccggtggtcctgcatttgcatgtgctgcacagctactggttgaatcttaagagcgtggtgcgcttttgcgagaaggtgaaaaaccataaaccggacgtcactctggtctggacgttacacgaccactggagcgttaccggacgctgcgcctttaccgacggttgcgaaggctggaaaacgggctgccagaaatgcccgaccttaaataactatccgccggtgaagattgatcgcgcgcaccagctggtggcgggcaaacgccagttattccgcgagatgctggcgctgggctgtcagtttatttcccccagccagcatgtggctgacgctttcaatagtctgtacgggccagggcgttgccggattatcaataatggtattgatatggcaaccgaagcgattctggcggacttgcctccggtgcgcgaaacccagggcaagccgaaaatcgcggtggtggcgcatgacctgcgttacgacggcaagactaaccagcaactggtacgtgagatgatggcgctgggcgacaaaattgaactgcatacctttggtaagttctcgccgttcaccgctggcaacgtggttaatcacggctttgaaactgacaagcgcaagttgatgagcgcgctcaatcaaatggatgcgctggtgttcagttctcgcgtcgataactacccgctgattttgtgtgaggcgctatcgattggcgtgccggtgatcgccacccatagcgatgcggcgcgggaagtgctgcaaaaatccggtggtaaaaccgtcagtgaagaagaggtgctgcaactggtgcagttaagcaaaccggaaatcgcgcaggcgatatttggtaccacgctggctgagttcagccaacgcagccgcgccgcctacagtggacaacagatgctggaggagtatgtcaacttctatcagaatctgtag

SEQ ID NO: 460751 - DNA, 489 bp, Shigella boydii
atgctggaagatctgcgtgccaacagctggagtttacgcccgtgctgcatggttcttgcctatcgtgttgctcatttttgttcggtgtggcgcaaaaagaacgtcctcaacaatctgtgggcggccccgttgctggtgctgtatcgcattatcaccgaatgctttttcggttatgaaatccaagctgccgcgaccattggccgccgctttactatccatcacggttacgccgtagtgatcaataaaaacgtggtggcgggggatgattttaccattcgccacggcgtcactatcggcaatcgtggtgccgataacatggcatgtccacacattggcaacggcgtcgaactcggtgccaacgtcattattcttggtgatatcacgattggtaacaacgtcaccgtgggcgcgggcagcgtggtgctcgactctgtcccggacaacgcgctggtggtgggagaaaaagcgcgagtgaaggtaattaaatga

SEQ ID NO: 460752 - DNA, 840 bp, Shigella boydii
atgaaagacaatccgctgatctcaatctatatgccgacctggaaccgccaacaactggcgattcgggcgataaaatcggtcctgcgccaggactacagcaactgggagatgatcatcgtggatgattgctccacctcctgggaacaactgcaacagtacgtcaccgccctcaacgatccgcgtattacctacattcacaacgacattaacagcggggcgtgcgcggtacgtaaccaggcgattatgctggcgcaaggggaatacattaccgggatcgatgacgatgatgaatggacgcccaaccacctgagcgtcttcctcgcccataaacagcaactggtcactcacgcctttttgtacgctaacgactacgtatgccagggagaagtttattcccaaccggcaagcttaccactgtatcccaaatcgccgtactcacgccgcctgttctataaacgcaatatcattggcaatcaggtttttacctgggcgtggcgtttcaaagagtgcttgttcgataccgaactgaaagcagcacaggattacgacatcttcctgcggatggtggtggagtatggcgagccgtggaaagtggaagaggcgacgcagatcctgcatatcaatcacggtgaaatgcagatcacctcgtcaccgaaaaaattctccgggtacttccacttttaccgcaagcacaaagataaatttgaccgtgcaagcaaaaaatatcagctgtttaccctctaccagatccgcaataaacgtatgacctggcgcactttgctgacgctgctgtcggtgcgtaacggcaaacgtctggctgatggtattcgggggcgctaa

SEQ ID NO: 460753 - DNA, 2220 bp, Shigella boydii
atgacagaaaaagtaaaacaacatgccgctccggtaacgggcagtgatgaaatcgatattggtcgcctggtcggcaccgtcattgaagcgcgctggtgggtgattggcatcaccgctgtattcgccctttgtgccgtggtttacaccttcttcgccacgccgatttatagtgccgacgcactggtacaaatcgagcaaagcagcggcaattcgttagtgcaggatatcggatcggcgttagccaacaaaccgcctgcatcggacgccgagatccagttgattcgttcgcgcctggtgcttggtaaaacggtggacgatctcgacctcgatattgcggtgagcaaaaacacgttcccgattttcggtgcgggctgggatcgcctgatgggacgtcagaacgaaacggtgaaagtgactacctttaaccgcccgaaagagatggcggaccaggtgtttacgcttaatgtgctggacaataaaaactacaccctgagcagtgatggcggctttagcgcccgtgggcaagcgggccagatgctgaaaaaagaaggcgtcacgctgatggttgaagccattcacgcccgcccgggcagtgagtttaccgtcaccaaatactccacgttggggatgatcaaccaactgcaaaacagcctgacggtaacggagaacggcaaagacgcaggcgtactgagcctgacttataccggtgaagatcgcgaacagatccgcgacattcttaacagcatcgcccgtaactatcaggaacaaaatattgagcgcaaatcggcggaagcgtcgaaaagcctcgctttcctcgcgcaacagttaccggaagtacgtagccgcctcgatgttgccgaaaacaaactgaatgccttccgtcaggataaagattctgttgatctgccgcttgaagcgaaagcggtgctcgattcgatggtgaacatcgacgcgcagttgaacgaactgacctttaaagaggcggaaatctccaagctgtacaccaaagttcacccggcgtaccgcacgctgctggagaaacgtcaggcgctggaagaagagaaagccaaacttaacggtcgcgtaacggcgatgccgaaaacccagcaggagattgtgcgcctgacccgcgatgccgagtctggtcagcaggtctatatgcaactgctgaataaagagcaggagctgaaaatcaccgaagccagcaccgtcggcgatgtgcgcattgttgacccggcaatcacccagcctggcgtgctgaaaccgaagaaaggactgattatcctcggcgcaattatcctcggcctgatgctctctatcgtgggtgtgctgctgcgctcgttgtttaatcgcggcatcgaaagcccgcaggtgctggaagaacatggtatcagcgtctatgccagcatcccgctgtcggaatggcagaaagcgcgcgatagcgtcaaaaccatcaaagggattaaacgctataaacagagccagctactggcggtggggaatccaaccgatctggcgattgaagccatccgcagtctgcgtaccagtctgcacttcgcgatgatgcaggcgcagaacaatgtgttgatgatgacaggggtgagcccgtcaatcggtaaaacctttgtctgcgccaacctggcggcggtgatcagtcagaccaataaacgggtgttgttgatcgactgcgatatgcgcaaaggctacacccacgagctgttgggtaccaataacgtcaatggcctgtcggaaattctgattggccagggcgatattactaccgcagctaaaccgacctctattgccaaatttgacctgatcccgcgcggtcaggtaccgccaaatccttctgaactgttgatgagcgaacgctttgccgaactggtgaactgggcgagtaaaaactatgacctggtgttgattgatacgccgccgattctggcagtgaccgatgcggcaattgttggtcgtcatgttggaaccacgttaatggtggcgcgttatgcggtcaacacattgaaagaagtggaaaccagtctgagccgctttgagcaaaatggtattccggtgaaaggggtgattctgaactccatcttccgccgcgccagcgcgtatcaggattatggctattacgaatacgaatataagtcggatgcgatgctgacgcatcttatccgacctaccttcacgccgcatccggcaagcaaaccagctccgtag

SEQ ID NO: 460754 - DNA, 444 bp, Shigella boydii
atgtttaacaacatcttagttgtctgtgtcggcaatatttgccgttccccgacggcggaacgcttactgcaacgttatcacccggaactgaaagtggagtccgctggactcggcgcgctggtcggtaagggcgctgaccctactgctatcagcgtcgccgcagaacatcaactgtctctggaaggtcactgtgcccgtcaaatcagccgccgcctgtgtcgcaactatgacctgattttgaccatggaaaagcgccatatcgaacgcttatgcgagatggcaccggagatgcgcggcaaagtgatgctgtttggtcactgggataacgaatgtgaaatccccgatccgtatcgcaaaagccgggaaacgtttgcagcggtgtacacattacttgaacggtctgcccgccagtgggcgcaggcattgaacgcagagcaggtataa

SEQ ID NO: 460755 - DNA, 1140 bp, Shigella boydii
atgatgaaatccaaaatgaaattgatgccattattggtgtcagtaaccttgataagcggttgcacagtacttccgggcagcaatatgtcgacgatgggcaaagacgtcatcaaacagcaggacgctgatttcgatctcgacaaaatggtgaatgtttatccgctgaccccgcgcctgattgaccaattacgcccacgcccgaatgtagcgcgccccaatatgacgctggaaagcgagatcgcgaattaccagtatcgcgtcgggccgggggacgttcttaatgtcaccgtctgggatcacccggaactcaccacgccagccggtcagtaccgcagctccagcgacaccggcaactgggtacagcctgacggcactatgttttacccgtatatcggcaaggttcacgtagtggggaaaacgctcgctgaaatccgcagtgatattaccgggcgcttagcgacgtacatcgctgacccgcaggtggacgttaatatcgccgccttccgctcacaaaaggcctatatctccggtcaggtgaataaatccggtcaacaggcgatcaccaacgtaccactgaccattctcgacgccatcaacgccgcaggtggcctgaccgacaccgctgactggcgcaacgtggtgctaacacacaatggtcgtgaagaacgcatttctttgcaggcgctgatgcaaaacggcgacctcaatcagaaccgactgctttatcccggcgatattctctatgtgccgcgtaatgatgatctgaaagtatttgtgatgggtgaagtgaagaaacagagcaccctgaaaatggactttagcggtatgaccctgactgaagccctgggcaatgctgaaggtatcgacatgaccacctccaacgccagcggcatctttgtcattcgtccgctgaaaggcgagggcgggcgtaacggcaagattgccaatatctaccagctggatatgtccgatgcgacgtcgctggtgatggcgacagaattccgcctgcaaccttatgacgtggtgtatgtcactaccgccccggtttcccgctggaaccgtctgatcaatcagttgctgccaacaattagcggtgtccgttacatgacggatacagccagcgacattcataactggtaa

SEQ ID NO: 460756 - DNA, 504 bp, Shigella boydii
atgaatatatcatatatgaatagcaacaaaacgacatctttacctgttgagctagatgcactaaataataaagatatctcttatgccaaagatttttcttatgtcaaagatttctttttatacatagaaacacagttaaaaagtgcaaaagatttttgtagacctggagaagaagtatcaagttctattgcaagtaaagtttttcacgcatttattgatttagttaacaaaatcaggggtaagaaagactttatgtatatttgcacgctttgctgttttgccgaggaggttaaaggtgattattctcattacaggacctttttatttgatattggtaatcaatataaggttaaacttacacaaagcggaaaaaaagagttctctttaacattagaatttaacgatactataattgaatctcagaaagtcacaggcaataaggcaaagcatattcttgaggatatagaaatattctatcgtaacaaacccgatacttattattaa

SEQ ID NO: 460757 - DNA, 714 bp, Shigella boydii
atgcgcaagatcacacaggcaatcagtgccgtttgcttattgttcgctctaaacagttccgctgttgccctggcctcatctccttcaccgcttaaccctggtactaacgttgccaggcttgctgaacaggcaccaattcattgggtttcggtcgcacaaattgaaaatagcctcgcagggcgtccgccaatggcggtggggtttgatatcgatgacacggtacttttttccagcccgggcttctggcgcggcaaaaaaaacttctcgccagaaagcgaagattatctgaaaaatcctgtgttctgggaaaaaatgaacaatggctgggatgaattcagcattccaaaagaggtcgctcgccagctgattgatatgcatgtacgccgcggtgacgcgatcttctttgtgactggtcgtagtccgacgaaaacagaaacggtttcaaaaacgctggcggataattttcatattcctgccaccaacatgaatccggtgatctttgcgggcgataaaccagggcaaaatacaaaatcgcaatggctgcaggataaaaatatccgaattttttatggcgattctgataatgatattaccgccgcacgcgatgtcggcgctcgtggtatccgcattctgcgcgcctccaactctacctacaaacccttgccacaagcgggtgcgtttggtgaagaggtgatcgtcaattcagaatactga

SEQ ID NO: 460758 - DNA, 417 bp, Shigella boydii
atgtggtatcaaaagacgctcacgcttagcgccaaatctcgtgggtttcatctggtaacggatgaaattctgaatcagctggctgatatgccgcgcgttaacatcggcttactgcatctgttgctgcaacatacctccgcctctctgacacttaatgagaactgcgatcccaccgtacgccacgacatggagcgttttttcctccgcaccgttcccgacaacggaaattatgagcatgactatgagggagcagacgatatgccttctcatatcaaatcctcaatgcagggaacatcgcttgtattgccgttacataaagggcgtattcagaccggcacctggcaaggcatctggctgggggaacatcgcatccacggcggatcgcgtcgcatcatcgcgacactacaaggggagtaa

SEQ ID NO: 460759 - DNA, 357 bp, Shigella boydii
atgaccatttcggagttgctacaatattgcatggcaaaaccaggcgcagaacagagcgtgcataacgactggaaagcgacgcagatcaaagtggaagatgtgctgtttgcgatggtgaaagaagtagaaaatcgcccagctgtttcgctgaaaaccagcccggagctggcggagctgctacgtcagcagcacagcgatgtgcgtcctagccgccatctgaataaagcgcactggagcaccgtgtatctcgacggttcgctgccggattcgcaaatctattatctggtggatgcgtcttatcagcaggcagtgaatttactaccggaagaaaagcgtaaattgctggtacaactctga

SEQ ID NO: 460760 - DNA, 2823 bp, Shigella boydii
atggataagatcgaagttcggggcgcccgcacccataatctcaaaaacatcaacctcgttatcccccgcgacaagctcattgtcgtgaccgggctttcgggttctggcaaatcctcgctcgctttcgacaccttatatgccgaagggcagcgccgttacgttgaatccctttccgcctatgcgcggcagtttctgtcactgatggaaaagccggacgtcgatcatattgaggggctttctcctgccatctcaattgagcagaaatcgacgtctcataacccgcgttctacggtggggacaatcaccgaaatccacgactatttgcgtttgttgttcgcccgcgtcggcgaaccgcgctgtccggaccacgacgtcccgctggcggcgcaaaccgtcagccagatggtggataacgtgctgtcgcagccggaaggcaagcgtctgatgctactcgcgccaatcattaaagagcgcaaaggcgaacacaccaaaacgctggagaacctagcaagccagggttacatccgtgctcgtattgatggcgaagtctgcgatctttccgatccgccgaaactggaactgcaaaagaaacacactattgaagtggtggttgatcgcttcaaggtgcgtgacgatcttacccaacgtcttgcggagtcgtttgaaaccgcgctggagctttccggtggtacagcggtagtggcggatatggacgacccgaaagcggaagagctgctgttctccgccaacttcgcctgcccaatttgcggctacagtatgcgtgaactggagccacgactgttttcgtttaacaacccggcaggtgcctgcccaacctgtgacggccttggcgtacagcaatatttcgatcctgaccgcgtgatccaaaaccccgagctgtcactggctggcggtgcgatccgtggctgggatcgccgcaacttctattacttccagatgctgaaatcgctggcagatcactataagttcgacgtcgaagcgccgtggggcagcctgagcgcgaacgtgcataaagtggtgttgtacggttctggcaaagaaaacattgaattcaaatacatgaacgatcgtggcgatacctccatccgtcgtcatccgttcgaaggcgtgctgcacaatatggagcgccgttataaagagacagaatccagtgcggtacgtgaagaattagccaagtttatcagcaatcgcccatgcgccagctgcgaagggacgcgtctgcgtcgggaagcgcgccacgtttatgtcgagaatacgccgctgcctgctatctccgacatgagcatcggtcatgcgatggaattcttcaacaatctcaaactagctggtcagcgggcgaagattgcagaaaaaatccttaaagagatcggcgatcgtctgaaattcctcgttaacgtcggcctgaattacctgacactttcccgctcggcagaaacactttccggcggtgaagcccagcgtatccgtctggcgagccagattggtgcgggcctggttggcgttatgtatgtactggacgagccgtctatcggcctgcaccagcgcgataacgagcgcctgttgggtacgcttatccatctgcgcgatctcggtaataccgtgattgtggtggagcatgacgaagacgcaattcgcgccgctgaccatgtgatcgatatcggtcctggtgcgggtgttcacggcggtgaagtggtcgcagaaggtccgctggaagcgatcatggcggtgcctgaatcgttgaccgggcagtacatgagcggtaaacgcaagattgaagtgccgaagaaacgcgttccggcgaatccagaaaaagtgctgaagctgacaggtgcacgcggcaacaacctgaaggacgtgacgctcacgctgccagtcggtctgtttacctgcatcacaggggtttcaggttccggtaaatcgacgctgattaacgacacactgttcccgattgcccaacgccagttgaatggtgcgaccatcgccgaaccggcaccgtatcgcgatattcaggggctggagcatttcgataaagtgatcgatatcgaccaaagcccaattggtcgtactccacgttctaacccggcgacctataccggcgtgtttacacctgtgcgcgaactgtttgcgggcgtaccggaatcccgtgcgcgtggttatacgccaggacgtttcagctttaacgtccgtggcgggcgctgcgaagcctgtcagggcgacggtgtgatcaaagtggagatgcacttcctgccggatatctacgtgccgtgcgatcagtgcaaaggtaaacgctataaccgtgaaacactggaaattaagtacaaaggcaaaaccatccacgaagtgctggatatgaccatcgaagaggcgcgtgagttctttgatgcggtgccagctctggcgcgtaagctgcaaacgttgatggacgttggtctgacgtacattcgcctggggcagtccgcaaccacactttctggtggtgaagcccagcgcgtgaagctggcgcgtgagctgtcaaaacgtggcaccgggcagacgctgtatattctcgacgagccgaccaccggtctgcacttcgccgatattcagcaactcctcgacgtgctgcataaactgcgcgatcagggcaataccattgtggtgattgagcacaatctcgacgtgatcaaaaccgctgactggattgtcgacctgggaccagaaggcggcagtggcggcggcgaaatcctcgtctccggtacgccagaaaccgtcgcggagtgcgaagcttcgcatacggcacgcttcctcaagccgatgctgtaa

SEQ ID NO: 460761 - DNA, 516 bp, Shigella boydii
atggccagcagaggcgtaaacaaggttattctcgttggtaatctgggtcaggacccggaagtacgctacatgccaaatggtggcgcagttgccaacattacgctggctacttccgaatcctggcgtgataaagcgaccggcgagatgaaagaacagactgaatggcaccgcgttgtgctgttcggcaaactggcagaagtggccagcgaatatctgcgtaaaggttctcaggtttatatcgaaggtcagctgcgtacccgtaaatggaccgatcaatccggtcaggatcgctacaccacagaagtcgtggtgaacgttggcggcaccatgcagatgctgggtggtcgtcagggtggtggcgctccggcaggtggtaatatcggtggtggtcagcctcagcagccgcagggtggcaatcagttcagcggcggcgcgcagtctcgcccgcagcagtccgctccggcagcgccgtctaacgagccgccgatggactttgatgatgacattccgttctga

SEQ ID NO: 460762 - DNA, 282 bp, Shigella boydii
atggctaccctcaccactggcgtggttcttcttcgctggcaacttcttagtgccgtaatgatgtttctggccagcacactcaacatccgttttcgtcggtctgattatgtcgggcttgcggtgatcagcagcggtctgggcgttgtttccgcctgttggttcgcaatggggttgcttggcatcacaatggcggacatcaccgctatctggcacaacatcgagtcggtgatgatagaagagatgaatcagacaccgccacaatggccaatgattttgacctga

SEQ ID NO: 460763 - DNA, 741 bp, Shigella boydii
atgagtcatcgtgcacgacaccaattactggcgttgccgggcattatctttttagttctctttcccatcattctttcgctatggattgccttcctttgggcaaaatcagaagtgaataatcagctccgaacctttgctcaactggcactggataaatccgagctggtcattcgccaggcagatttagtgagcgatgcagctgaacgctatcaggggcaagtttgcactccagcccatcaaaagcgaatgttgaatattattcgtggctatctttatattaatgaattgatctatgcccgtgataaccattttttatgctcatcgctgatagcgcctgtaaacggctatacgattgcaccggccgattataagcgtgaacctaacgtttctatctattattaccgcgatacgccttttttctctggctataaaatgacctatatgcagcggggaaattatgtggcggttatcaaccctctcttctggagtgaagtgatgtctgatgatccgacattgcaatggggtgtgtatgatacggtgacgaaaacctttttctcgttaagcaaagaggcctcggcagcaacgttttctccgctgattcatttgaaggatttaaccgtacaaagaaatggctatttatatgcgacagtttattcgacaaaacgcccaattgcagccattgttgcgacttcatatcaacgtcttataacccatttttataatcatcttatttttgggtaa

SEQ ID NO: 460764 - DNA, 324 bp, Shigella boydii
atgttgaataccgcttctctgccgagccttatattggtgcctcatgcagtaatgtgtcagttttatctatgttatgcctgcgggcgaagaaaacaatctaaggaatttttcaaatggcaaagattaaaggtcaggttaaagtggttcaacgagtctaaaggttttggcttcattactccggctgatggcagcaaagacgtgttcgtacacttctccgctatccagggtaatggcttcaaaactctggctgaaggtcagaacgttgagttcgaaattcaggacggccagaaaggtccggcagctgttaacgtaacagctatctga

SEQ ID NO: 460765 - DNA, 810 bp, Shigella boydii
atgtctttttcctgtccactttgccatcagcctctttcgcgtgaaaaaaacagctatatctgtccccagcgacatcagtttgatatggcgaaagaagggtatgtcaatctgctgcccgttcagcataaacggtctcgtgatccgggcgacagcgcggaaatgatgcaagcacgccgcgcattcttagatgccggacattatcagccgctgcgtgatgcaattgtcgcccaactgagggaacggcttgatgataaggccacggcggtgctggatattggctgtggtgaagggtattacacacacgcatttgccgatgcgttgcccgaaatcaccacgtttggtctggatgtttcgaaggtagcgataaaagcggcggcgaaacgctatccgcaggtcactttttgtgtcgcttccagccaccgtttgccgttttccgataccagtatggacgccataatacgtatttacgcgccgtgtaaagcagaagaattagcacgagtagtgaagcccggcggctgggtcattactgccacgccgggaccgcgacatttgatggagctgaaggggctgatttacaatgaagtacatcttcatgcacctcatgcagaacaactggaaggttttacattacagcagagtgcggagttgtgttatccgatgcgtcttcgcggtgatgaagccgtcgcattattgcagatgacgccgtttgcctggcgtgcgaagccagaagtctggcaaacactggcagcaaaagaagtgttcgactgccagacggactttaatattcacctctggcagcgttcttattaa

SEQ ID NO: 460766 - DNA, 567 bp, Shigella boydii
atgaatatcactgctactgttcttcttgcgtttggtatgtcgatggatgcatttgctgcatcaatcggtaaaggtgccaccctccataaaccgaaattttctgaagcattgcgaaccggccttatttttggtgccgtcgaaaccctgacgccgctgatcggctggggaatgggcatgttagccagccggtttgtccttgaatggaaccactggattgcgtttgtgctgctgatattcctcggcgggcgaatgattattgagggttttcgtggcgcagatgatgaagatgaagagccgcgccgtcgacacggtttctggctactggtaaccaccgcgattgccaccagcctggatgccatggctgtgggtgttggtcttgctttcctgcaggtcaacattatcgcgaccgcattggccattggttgtgcaaccttgattatgtcaacattagggatgatggttggtcgctttatcggctcaattattgggaaaaaagcggaaattctcggcgggctggtactgatcggcatcggcgtccagatcctctggacgcacttccacggttaa

SEQ ID NO: 460767 - DNA, 459 bp, Shigella boydii
atgacaatcacggacctggtactgattcttttcatcgccgcactcctggccttcgcgatctacgatcagttcatcatgccccgccgtaacggccccaccctgctggcaattcctttgctccggcgtggtcgcatcgatagcgttatcttcgtcggattgattgtcattcttatctataacaacgtcacgaatcatggtgcgttaataacgacatggttattaagcgcactggctctgatgggtttttatatattctggatccgcgttccgaagatcatctttaaacaaaaaggttttttcttcgccaatgtctggattgaatatagcctaatcaaagcgatgaacttgtcggaagatggcgtgttggtgatgcaattagaacagcgtcggctgttaatccgcgttcgaaatatcgacaatctggaaaaaatttataagcttatcgtttcaactcaataa

SEQ ID NO: 460768 - DNA, 852 bp, Shigella boydii
atggttgatacaactcaaactaccaccgagaaaaaactcactcaaagtgatattcgtggcgtcttcctgcgttctaacctcttccagggttcatggaacttcgaacgtatgcaggcactgggtttctgcttctctatggtaccggcaattcgtcgcctctaccctgagaacaacgaagctcgtaaacaagctattcgccgtcacctggagttctttaacacccagccgttcgtggctgcgccgattctcggcgtaaccctggcgctggaagaacagcgtgctaatggcgcagagatcgacgacggtgctatcaacggtatcaaagtcggtttgatggggccgctggctggtgtaggcgacccgatcttctggggaaccgtacgtccggtatttgcagcactgggtgccggtatcgcgatgagcggcagcctgttaggtccgctgctgttcttcatcctgtttaacctggtgcgtctggcaacccgttactacggcgtagcgtatggttactccaaaggtatcgatatcgttaaagatatgggtggtggcttcctgcaaaaactgacggaaggggcgtctatcctcggcctgtttgtcatgggggcattggttaacaagtggacacatgtcaacatcccgctggttgtctctcgcattactgaccagacgggcaaagaacacgttactactgtccagactattctggaccagttaatgccaggcctggtaccactgctgctgacctttgcttgtatgtggctactgcgcaaaaaagttaacccgctgtggatcatcgttggcttcttcgtcatcggtatcgctggttacgcttgcggcctgctgggactgtaa

SEQ ID NO: 460769 - DNA, 801 bp, Shigella boydii
atggagattaccactcttcaaattgtgctggtatttatcgtagcctgtatcgcaggtatgggatcaatcctcgatgaatttcagtttcaccgtccgctaatcgcgtgtaccctggtgggtatcgttcttggggatatgaaaaccggtattattatcggtggtacgctggaaatgatcgcgctgggctggatgaacatcggtgctgcagttgcgcctgacgccgctctggcttctatcatttctaccattctggttatcgcaggtcatcagagcattggtgcaggtatcgcactggcaatccctctggccgctgcgggccaggtactgaccatcatcgttcgtactattaccgttgctttccagcacgctgcggataaggctgctgataacggcaacctgacagcgatttcctggatccacgtttcttctctgttcctgcaagcaatgcgtgtggctattccggccgtcatcgttgcgctgtctgttggtaccagcgaagtacagaacatgctgaatgcgattccggaagtggtgaccaatggtctgaatatcgccggtggcatgatcgtggtggttggttatgcgatggttatcaacatgatgcgtgctggctacctgatgccgttcttctacctcggcttcgtaaccgcagcattcaccaactttaacctggttgctctgggtgtgatcggtactgttatggcagtgctctacatccaacttagcccgaaatacaaccgcgtagccggtgcgcctgctcaggctgctggtaacaacgatctcgataatgaactggactaa

SEQ ID NO: 460770 - DNA, 972 bp, Shigella boydii
gtgaccattgctattgttataggcacacatggttgggctgcagagcagttgcttaaaacggcagaaatgctgttaggcgagcaggaaaacgtcggctggatcgatttcgttccaggtgaaaatgccgaaacgctgattgaaaagtacaacgctcagttggcaaaactcgacaccactaaaggcgtgctgtttctcgttgatacatggggaggcagcccgttcaatgctgccagccgcattgtcgtcgacaaagagcattatgaagtcattgcaggcgttaacattccaatgctcgtggaaacgttaatggctcgtgatgatgacccaagctttgatgaactggttgcgctggcagtagaaacaggccgtgaaggcgtgaaagcactgaaagccaaaccggttgaaaaagccgcgccagcacccgctgccgcagcaccaaaagcggctccaactccggcaaaaccaatggggccaaacgactacatggttattggccttgcgcgtatcgacgaccgtctgattcacggtcaggtcgccacccgctggaccaaagaaaccaatgtctcccgtattattgttgttagtgatgaagtggctgcggataccgttcgtaagacactgctcacccaggttgcacctccgggcgtaacagcacacgtagttgatgttgccaaaatgattcgcgtctacaacaacccgaaatatgctggcgaacgcgtaatgctgttatttaccaacccaacagatgtagagcgtctcgttgaaggcggcgtgaaaatcacctctgttaacgtcggtggtatggcattccgtcaaggtaaaacccaggtgaataacgcggtttcggttgatgaaaaagatatcgaggcgttcaagaaactgaatgcgcgcggtattgagctggaagtccgtaaggtttccaccgatccgaaactgaaaatgatggatctgatcagcaaaatcgataagtaa

SEQ ID NO: 460771 - DNA, 210 bp, Shigella boydii
atgtttaactcccgtttaacaaccatggagtatagggcagtagcccgcagtatggatcgtcaccgacgtcatttcagcatcaggccttttaacgcctgcctttctggcactctatgccgcacctttcgtttgcattttgtcgttacgcctgcattatttctggcgtcgaatagctattccttaagcaggagcttgtcatggaattcttaa

SEQ ID NO: 460772 - DNA, 1551 bp, Shigella boydii
atggaattcttaatggacccctcaatttgggcggggctactcacgcttgttgttctcgaaattgtgctgggtatcgataacctggtcttcatcgccattcttgctgacaaactgccgccaaaacaacgcgataaagcgcgtttgctggggttatcactggcgctgattatgcgtctggggctgctgtcgctgatttcatggatggtcacgctgaccaaaccgctatttaccgtcatggatttctccttctccggacgcgacctgattatgttgttcggggggatattcttgctgttcaaagcaacaaccgaactgcatgaacggctggaaaaccgcgatcatgattccggccacggtaaaggctacgccagtttctgggtggtcgtcacacagattgtcatccttgacgccgtcttctcgttggatgcggtaattactgcagtagggatggttaaccatctgccggtgatgatggcggcggtagtgattgcgatggcggttatgttgctggcatccaaaccgctgacgcgattcgttaaccagcaccccacggtggtggtgctctgtctgagcttcctgttaatgattggtctgagtctggtggcagaaggtttcggtttccacattccgaaaggttacctgtatgccgcgattggcttctcgatcatcatcgaagtgtttaaccagattgcgcgtcgcaactttattcgccaccagtcgactttgccgctgcgagcgcgtactgccgatgccatcctgcgtttgatgggcgggaaacgtcaggccaatgttcagcacgatgccgataacccgatgccgatcccggaaggtgcatttgccgaagaagaacgttacatgattaacggcgtactgacgctggcgtcgcgttctctgcgcgggatcatgacgccgcgcggtgaaataagctgggttgacgctaatctcggggtcgatgaaatccgcgagcaactgctctcttcaccgcacagtctgttcccggtatgtcgcggtgaactggatgaaatcatcggtattgtacgtgctaaagaactgctggtggcgctggaagagggcgttgatgtggcggcgattgcttcggcgtctccggcgattatcgtcccggaaaccctcgatccgatcaacctgttgggcgtgctgcgtcgtgctcgcgggagctttgttatcgtgaccaacgagtttggtgtggtacaaggtctggtcacgccgctggatgtgctggaagccattgcgggtgaattcccggacgctgacgaaacgccggaaatcattactgatggtgacggctggctggtaaaaggcggtacagatttgcatgccttgcagcaggcgcttgatgttgagcaccttgccgatgacgatgatatcgcgacggtcgcgggcctcgtgatctcggcaaatggtcacattccccgtgtgggcgatgtgattgatgtagggccactgcatatcaccatcattgaagccaatgattatcgtgttgatctggttcgcattgttaaagagcaaccggcgcacgatgaagatgagtaa

SEQ ID NO: 460773 - DNA, 450 bp, Shigella boydii
atggtgatagccttagacgccagttcaacttgctggtatctggcacgccagttgcctgacatcaacattcaggtcttcaccaatagccatccgatttgccatgaactcggtaaacgcgaacgcattcaactgatcagttccggcggcacacttgagcgcaaatatggctgttacgtcaatccctcgctgatttcccaacttaaatcgctggaaatcgatctgtttattttttcttgtgaagggatcgatagcagcggcgcactgtgggactccaatgcgatcaacgctgattacaaatcgatgctattaaaacgtgccgcgcaatcgttgttattgattgataaaagtaaatttaatcgttcaggggaagcccgcatcgggcatctggatgaggtaacgcacattatttctgatgagcgccaggttgcaacttctttggtaacagcctga

SEQ ID NO: 460774 - DNA, 1101 bp, Shigella boydii
atgaataaggttgtattgctgtgccgtccgggctttgaaaaagagtgcgccgcagaaattaccgataaagccggccagcgggaaattttcggttttgcccgcgtgaaagagaatgcgggttatgtcatttatgaatgttatcaacctgatgatggcgataagttaatccgtgagctgccgttcagttcattaatttttgcccgccagtggtttgtggtgggggaactcctgcagcatttgccgccagaagatcgtattacccccattgtcggcatgttacagggcgtagtagagaagggcggagaactgcgtgttgaagttgccgataccaacgaaagcaaagagttgctgaaattctgccgtaaatttactgttccgctacgcgctgccttgcgcgatgccggggtgctggcgaactatgaaacgccgaagcgtccggttgtgcatgtattctttattgcaccaggctgctgctataccggttactcatacagcaacaataattcgccgttctatatgggcattccgcgcctgaaatttccggcagaggcgccgagtcgttccacgctcaaactggaagaggcatttcatgtgtttattcctgcggatgagtgggatgaacgcctggcgaacgggatgtgggcggtggatttaggcgcttgccctggcggctggacctaccaactggtgaagcgcaacatgtgggtttattccgtcgacaacggcccgatggcgcaaagtctgatggataccgggcaggtgacgtggctgcgggaagacggtttcaaattccgtccgacacgcagcaatatctcctggatggtatgcgatatggttgaaaaaccggctaaagttgcggcattgatggcgcagtggctggttaatggctggtgccgtgaaaccattttcaatctcaaactgccgatgaaaaaacgctacgaagaagtatcacacaatctggcgtatattcaggcacagcttgatgaacatggcataaatgctcagattcaggcgcggcagttgtatcacgatcgcgaagaagtgacggtgcacgtccgccgcatctgggctgcggtgggtggtcgtcgcgacgagcgataa

SEQ ID NO: 460775 - DNA, 396 bp, Shigella boydii
atgaccagccgttttatgctgattttcgccgccattagcggcttcatttttgtggctctgggcgcttttggcgcgcatgtgttaagtaaaaccatgggggccgttgagatgggctggatccagaccggcctcgaataccaggcgtttcatacgctggcgatcttaggtctggcggtggcaatgcagcgtcgcatcagtatctggttttactggagtagcgttttcctcgcgttaggcacggtgttgttcagcggcagcctttattgcctggcgctgtcccatctgcgtttgtgggcgtttgtcactccggttggcggcgtgagcttcctcgcgggctgggcgttaatgttagttggtgctatccgtttaaagcgcaagggcgtaagtcatgaataa

SEQ ID NO: 460776 - DNA, 918 bp, Shigella boydii
atgtctaaacgattaccaccgctaaatgccttacgagtttttgatgccgcagcacgccatttaagtttcactcgcgcagcagaagagctttttgtgacccaggccgcagtaagtcatcaaatcaagtctcttgaggattttttggggctaaaactgttccgccgccgtaatcgttcactcctgctgaccgaggaagggcaaagctatttcctcgatatcaaagagatattttcgcaattaaccgaagcgacgcgtaaactccaggcccgtagcgccaagggggcgttgacggtcagtttactccccagtttcgccattcattggttggttccgcgactttccagctttaattcagcttatccgggaattgacgttcgaatccaggcggttgatcgtcaggaagataagctggcggatgatgttgatgtggcgatattttatggtcggggcaactggccggggctacgggtggaaaaactgtacgccgaatatttattgccggtgtgttcgccgctactgctgactggcgaaaaacccttgaagacaccggaagatctggctaaacatacgttattacatgatgcttcgcgccgtgactggcagacatatacccgacagttggggttaaatcatatcaacgttcagcaagggccaatttttagccatagcgccatggtgctgcaagcggctatccacgggcagggagtggcgctggcaaataacgtgatggcgcaatctgaaatcgaggccggacgtcttgtttgcccgtttaatgatgttctggtcagtaaaaacgctttttatctggtttgtcatgacagccaggcagaactgggtaaaatagccgcctttcgccaatggatcctggcgaaagccgctgctgaacaagaaaaattccgctttcgttatgaacaataa

SEQ ID NO: 460777 - DNA, 228 bp, Shigella boydii; identical to SEQ ID NO: 3241

SEQ ID NO: 460778 - DNA, 1206 bp, Shigella boydii
atgaacgtttttaatcccgcgcagtttcgcgcccagtttcccgcactacaggatgcgggcgtctatctcgacagcgccgcgaccgcgcttaaacctgaagccgtggttgaagccactcgacagttttacagcctgagcgccggaaacgtccatcgcagccagtttgccgaagcccaacgcctgaccgcgcgttatgaagctgcacgagagaaagtggcgcaattactgaatgcaccggatgataaaactatcgtctggacgcgcggcaccactgaatccatcaacatggtggcacaatgctatgcgcgtccgcgtctgcaaccgggcgatgagattattgtcagcgtggcagaacaccacgccaacctcgtcccctggctgatggtcgcccaacaaactggagccaaagtggtgaaattgccgcttaatgcgcagcgactgccggatgtcgatttgttgccagaactgattactccccgtagtcggattctggcgttgagtcagatgtcgaacgttactggcggttgcccggatctggcgcgagcgattacctttgctcattcagcagggatggtggtgatggttgatggtgctcagggggcggtgcatttccccgcggatgttcagcaactggatatcgatttctatgctttctctggtcacaaactgtatggcccgacgggtatcggcgtgctgtatggcaaatcagaactgctggaagcgatgtcgccctggctgggtggcggcaaaatgattcacgaagtgagttttgacggcttcacgactcaatctgcgccgtggaaactggaagcaggaacgccaaatgtggctggtgtcataggattaagcgcggcgctggaatggctggcagattacgatatcaaccaggccgaaaactggagccatagcttagcaacgctggcggaagatgcgctggcgaaacgtccaggctttcgttcattccgctgccaggattccagcctgctggcctttgattttgctggcgttcatcacagcgatatggtgacgctactggcggagtacggtattgccttgcgggccgggcaacattgcgctcagccgctactggcagaattaggcgtaaccggcacactgcgcgcctcttttgcgccatataatacaaagagtgatgtggatgcgctggtgaatgccgttgaccgcgcgctggaattattggtggattaa

SEQ ID NO: 460779 - DNA, 444 bp, Shigella boydii
atgacaaacccgcaattcgccggacatccgttcggcacaaccgtaaccgcagaaacgttacgcaataccttcgcaccgttgacgcaatgggaagataaatatcgccagttgatcatgctggggaaacagcttccggctttgccagacgagttaaaagcgcaggctaaagagattgccggatgcgaaaaccgcgtctggctgggatataccgtggctgaaaacggtaaaatgcacttctttggcgacagcgaagggcgcattgtgcgcggcctgttggcggtgttgttgactgccgttgaggggaaaaccgccgccgaattacaggcacagtcgccgctggcattgtttgatgagctgggattgcgtgggcagcttagcgcctcacgcagccaggggttgaatgcgttaagcgaggcaattatcgctgcggcgaagcaggtttaa

SEQ ID NO: 460780 - DNA, 807 bp, Shigella boydii
atgtctgtggtaattagtgatgcatggcgtcagcgttttggtggcacagcgcgtctgtatggtgaaaaagcgttgcaactgtttgctgacgcgcatatttgtgtggttggtatcggtggtgtcggttcctgggcggcggaagcgctggcgcgcacggggattggcgcaatcacgcttatcgatatggatgatgtgtgcgtcaccaataccaatcggcaaattcacgctctgcgcgataacgtcgggctggcaaaagcggaagtcatggcggagcgcattcgccagattaacccggagtgccgtgtaacggtggtggatgatttcgtgacgccggataacgtagcgcaatatatgagtgccggttattcgtacgtgattgatgccattgatagtgtacgacccaaagcggcgctgattgcttattgtcggcgcaataaaatcccgctggtcacgaccggtggcgcgggtgggcagattgacccgacgcagattcaggttaccgatctggcgaaaacgattcaggacccgctggcggcgaagttgcgcgagcgcctgaaaagcgattttggcgtagtgaaaaacagtataggtaagctcggcgtggattgcgtgttttctactgaagcgctggtgtacccgcagtcagacggtacggtgtgtgcgatgaaagccacggcagaagggccgaagcggatggattgtgcatctggatttggcgcggcaacgatggtgaccgccacctttgggtttgttgcggtttctcatgcgctgaagaagatgatggcgaaagcagcgcgtcagggttaa

SEQ ID NO: 460781 - DNA, 1098 bp, Shigella boydii
atgaaaggacgttgggtaaagtaccttcttatgggcacggttgtggcaatgcttgccgcctgctcttccaaatcaaccgatcgcggacagcaatataaagacgggaaatttacccagcctttctctctggtgaaccagccagatgccgttggcgcgccgattaacgccggtgattttgccgagcaaattaaccatatccgtaattcgtcaccgcgtctgtatggcaaccagagtaatgtttataacgcggtgcaagagtggctgcgcgcaggtggtgatacccgcaatatgcgccagttcggcattgatgcctggcagatggaaggtgccgacaactatggtaacgtgcagtttacaggctattacacgccggtaattcaggcgcgccatacccgccagggcgagttccagtatcctatttaccgtatgccgccaaaacgtggtcgtctgccgtctcgtgcggagatctacgcgggggcattgggcgataaatacatcctcgcttacagcaactctctgatggataacttcattatggatgtgcagggtagtgggtatatcgactttggtgatggcagtccgcttaactttttcagctatgcagggaaaaacggtcatgcctatcgcagcattggtaaggtgctgatcgaccgtggcgaagtgaaaaaagaagatatgtcgatgcaggcgattcgtcattggggcgaaacacacagtgaagccgaggttcgcgagctgctggaacagaacccgtctttcgtcttctttaaaccgcaatcttttgcaccggtgaaaggggcaagtgcggtgccgctggttggccgtgcttctgttgcctccgatcgttcaattattccgccaggtactaccttgctggcagaagtgccgctgctggataataacggcaaatttaacggtcagtacgaattgcgtctgatggtggcgctggatgtcggtggcgcaatcaaaggccaacacttcgatatctatcaagggatcgggccggaagccggacatcgcgcaggttggtacaaccactatggacgtgtctgggtgctgaaaaccgccccgggcgcaggtaacgtctttagcggctga

SEQ ID NO: 460782 - DNA, 1038 bp, Shigella boydii
atgcacggtaattctgaaatgcaaaaaatcaaccaaaccagcgcaatgcctgaaaaaactgacgttcactggagtggtcggtttagcgttgcaccaatgctcgactggacggacagacattgccgctatttcttgcgtctgctttcccgcaatacgttgctgtataccgaaatggtgaccacaggggcgattattcacggtaaaggtgattacctggcgtacagtgaagaagaacatccggtagcgttgcaactcggcggtagcgatccggcggcgctggcacagtgtgcgaagctggcagaagcgcgtggatatgatgagatcaacctgaatgtcggctgcccgtctgaccgggtgcagaacggcatgtttggtgcgtgtctgatgggtaatgcgcagctggttgccgattgcgtgaaagcgatgcgcgatgtggtgtcgattccggtgacggtgaaaacgcgtattggcatcgatgaccaggacagctatgaatttctctgcgatttcatcaacaccgtttccggcaaaggcgagtgtgggatgttcatcatccatgcacgtaaagcctggctttcggggttaagcccgaaagaaaaccgtgaaatcccgccgctcgattatccgcgtgtgtatcaactgaagcgtgactttccgcatctgacaatgtcgattaacggtggtatcaagtcgctggaagaggccaaagcacacctgcaacatatggatggcgtgatggtcgggcgcgaggcgtatcagaatccgggtattctggcggcggtagaccgggagatctttggttcctcggataccgatgcctatccggtggcggtagtgcgcgccatgtatccgtacattgagcgtgaactcagccaggggacgtatctcggccatattacccggcatatgttgggcttgttccagggtattcctggcgcgcggcagtggcggcgttatttaagtgaaaatgcccataaagcgggtgcagacattaatgtgttggaacacgcgctcaaactggtggcggataagcgttaa

SEQ ID NO: 460783 - DNA, 243 bp, Shigella boydii
atgctggaactactttttgtgattggcttttttgtcatgctgatggtcaccgacgtttcgttgctgggcattatcaccgcgctggttgtggcgacggccattatgttcctcggcggtatgctggcattgatgattaagttgctgccgtggttactactggcgattgcggtggtgtgggttattaaggcgattaaagcaccaaaagtgcctaaatatcagcgttatgaccgctggcgttactaa

SEQ ID NO: 460784 - DNA, 984 bp, Shigella boydii
atggcaacacgaattaaatttcacaagcacggtggcccggaagtacttcaagccgtagagttcactcctgccgatccggcagagaatgaaatccaggtcgaaaataaagccatcggcatcaattttatcgacacgtatatccgcagcggcctttacccgccgccatcactacccagcggatcaggtaccgaagcggcaggcatcgtgagtaaagtcggcagtggtgtaaagcatattaaggcaggcgatcgtgtagtctatgcgcagtcggcgttaggcgcttacagctctgtgcataacattaatgcggataaagcggcgattctgcctgcggctatttcttttgagcaagctgcagcatctttcctgaaaggcttaacggtttattatctgctgcgcaaaacctatgaaattaaacccgatgaacagttcctgttccacgcagcggctggcggcgttggcttgattgcctgccagtgggcaaaagctctgggcgcgaaacttatcggcaccgtaggaaccgcgcaaaaagcgcagagcgcgctaaaagccggcgcgtggcaggttattaactatcgtgaagagaatctggtcgagcgattgaaagagatcaccggcggtaagaaagtgcgcgtagtgtacgattccgtgggcagagacacctgggaacggtcgctggattgcctgcaacgccgcggcttaatggtcagttttggcaactcatcaggtgcggttaccggtgtgaacttaggcattctcaatcaaaaaggctcgttgtatgtgacacgcccttccctgcaaggctatatcaccacgcgggaggaattaaccgaggccagtaatgaactgttctctttgattgccagcggtgtgattaaggtcgatgtcgccgagcagcagaaatatccgctgaaggatgcgcagcgtgcgcatgagattctggaaagccgggcgacgcaaggttccagcctgctgattccataa

SEQ ID NO: 460785 - DNA, 1416 bp, Shigella boydii
atggcaggaaataaacccttcaacaaacagcaggctgaaccccgcgaacgcgatccacaagttgccgggctgaaagtgcctccgcactcgatcgaagcggagcagtcggtgttgggcggtttaatgctggataacgaacgctgggacgatgtagccgagcgtgtggtggcagacgatttttacacccgcccacaccgccatatctttactgaaatggcgcgtttgcaggaaagcggtagtcctatcgatctgattacccttgcggaatcgctggaacgccaggggcaactcgatagcgtcggtggttttgcttatctggcagagctgtcaaaaaatacgccaagtgcggcgaacatcagtgcttatgctgacatcgtgcgtgaacgtgccgttgtccgtgagatgatctcggttgcgaatgagattgctgaagccggttttgatccgcaggggcgtaccagcgaagatctgctggaccttgctgaatcccgcgtctttaaaattgccgaaagtcgtgcaaacaaagacgaagggccgaagaacatcgccgatgtgctcgacgcaaccgtggcgcgtattgagcagttgtttcagcagccacacgatggcgttaccggagtaaacaccggttatgacgatctcaacaaaaaaaccgctggcttgcagccgtcggatttgatcatcgtcgccgcgcgtccgtcgatgggtaaaacaacatttgcgatgaacctcgtcgaaaacgcggcgatgttgcaggataaaccagtacttatcttctcgctggagatgccttcagaacagattatgatgcgttctctggcgtcgctgtcgcgcgttgaccagactaaaatccgtaccgggcagctcgatgatgaagactgggcgcgcatttccggcaccatgggtattttgctcgaaaaacgcaatatctatatcgatgactcctccggcctgacgccaacggaagtgcgttcccgcgcacgccgtattgcccgtgaacacggcggcatcgggcttatcatgatcgactacctgcaactgatgcgcgtaccggcgctttccgataaccgtacgctggaaattgcagaaatctctcgctcgctgaaagcactggcgaaagaactgaacgtgccggtggtggcgctgtcccagttgaaccgttctctggaacaacgtgccgacaaacgcccggtcaactccgacctgcgtgaatctggctctatcgagcaggatgcggacttgatcatgtttatctatcgtgatgaggtgtatcacgaaaacagtgatttaaaaggcatcgcggaaattattatcggtaaacaacgtaacggcccaatcgggacggtacgcctgacctttaacggtcaatggtcgcgcttcgacaactatgcggggccgcagtacgacgacgaataa

SEQ ID NO: 460786 - DNA, 1080 bp, Shigella boydii
atgcaagcggcaactgttgtgattaaccgccgcgctctgcgacacaacctgcaacgtcttcgtgaactggcccctgccagtaaaatggttgcggtggtgaaagcgaacgcttatggtcacggtcttcttgagaccgcgcgaacgctccccgatgctgacgcctttggcgtagcccgtctcgaagaagctctgcgactgcgtgcggggggaatcaccaaacctgtactgttactcgaaggcttttttgatgccagagatctgccgacgatttctgcgcaacattttcataccgccgtgcataacgaagaacagctggctgcgctggaagaggctagcctggacgagccggttaccgtctggatgaaactcgataccggtatgcaccgtctgggcgtaaggccggaacaggctggggcgttttatcatcgcctgacacagtgcaaaaacgttcgtcagccggtgaatatcgtcagccattttgcgcgcgcggatgaaccaaaatgtggcgcaaccgagaaacaactcgctatctttaataccttttgcgaaggcaaacctggtcaacgttccattgccgcgtcgggtggcattctgctgtggccacaatcgcattttgactgggtgcgcccgggcatcattctttatggcgtctcgccgctggaagatcgctccaccggtgccgattttggctgtcagccagtgatgtcactaacctccagcctgattgccgtgcgtgagcataaagccggagagcctgttggttatggtggaacctgggtaagcgaacgtgatacccgtcttggcgtagtcgcgatgggctatggcgatggttatccgcgcgccgctccatccggtacgccagtgctggtgaacggtcgcgaagtaccgattgtcgggcgcgtggcgatggatatgatctgcgtagacttaggtccacaggcgcaggacaaagccggggatccggtcattttatggggcgaaggtttgcccgtagaacgtatcgctgaaatgacaaaagtgagcgcttacgaacttattacgcgcctgacttcaagggtcgcgatgaaatacgtggattaa

SEQ ID NO: 460787 - DNA, 1194 bp, Shigella boydii
gtgtttcaaaaagttgacgcctacgctggcgacccgattcttacgcttatggagcgttttaaagaagaccctcgcagcgacaaagtgaatttaagtatcggtctgtactacaacgaagacggaattattccacaactgaaagccgtggcggaggcggaagcgcgcctgaatgcgcagccccatggcgcttcgctttatttaccgatggaagggcttaacagctatcgccatgccattgcgccgctgctgtttggtgcggaccatccggtactgcaacaacagcgcgtagcaaccattcaaacccttggcggctcaggggcattgaaagtgggcgcggatttcctgaaacgctacttcccggaatcaggcgtctgggtcagcgatcctacctgggaaaaccacgtagcaatattcgccggggctggattcgaagtgagtacttacccctggtatgacgaagcgactaacagcgtgcgctttaatgacctgttggcgacgctgaaaacattacctgcccgcagtattgtgttgctgcatccatgttgccacaacccaacaggtgccgatctcactaatgatcagtgggatgcggtgattaaaattctcaaagcccgcgagcttatcccattcctcgatattgcctatcaaggatttagtgccggtatggaagaggatgcctacgctattcgcgccattgccagcgctggattacccgctctggtgagcaattcgttctcgaaaattttctccctttacggcgagcgcgtcggcggactttctgttctgtgtgaagatgccgaagccgctggccgcgtactggggcaattgaaagcaacagttcgccgcaactactccagcccgccgaatttgggtgcgcaggtggtggctgcagtgctgaatgacgaggcattgaaagccagctggctggcggaagtagaagagatgcgtactcgcattctggcaatgcgtcaggaattggtgaaggtattaagcacagagatgccagaacgcaatttcgattatctgcttaatcagcgcggcatgttcagttataccggtttaagtgccgctcaggttgaccgactacgtgaagaatttggtgtctatctcatcgccagcggtcgcatgtgtgtcgccgggttaaatacggcaaatgtacaacgtgtggcaaaggcgtttgctgcggtgatgtaa

SEQ ID NO: 460788 - DNA, 168 bp, Shigella boydii
atgaacaaatttattaaagttgcactggtaggtgcagtactggctacgttaactgcatgtactggtcatattgaaaaccgtgataagaactgctcttacgactacctgctgcacccggcaatttctatttctaaaatcattggcggttgcggtcctactgcacagtaa

SEQ ID NO: 460789 - DNA, 1338 bp, Shigella boydii
atgggaagccaggaactccaacgcaagctcggattttgggccgttcttgcaatcgccgtcgggacaaccgtcggctccggtatttttgtatctgtgggtgaagtggcaaaagcagcgggcacgccgtggcttacggtgctcacgtttgtcattggcgggttaattgtgatcccgcaaatgtgcgtctatgcggaactatccaccgcttatccggaaaatggcgcagattatgtttatctgaaaaatgccggaagccgaccgctggctttcctctccggctgggccagcttctgggccaacgatgcgccgtcattgtcgattatggcgctggcgattgtcagcaatcttggctttttaacgcctatcgatccgttgcccggtaaatttatcgccgccggattaattatcgcctttatgttgctacacctgcgctccgttgaaggcggcgcagcgtttcagacgctaattaccatcgccaaaattatcccgttcactatcgtcattggccttgggatcttctggtttaaagcggagaattttgccgcccctaccaccactgcgattggcgcaacgggcagctttatggcgctgctggcggggatctctgccaccagttggtcgtataccggcatggcctctatctgttatatgaccggcgaaattaaaaaccccggaaaaaccatgccacgagcgctgattggttcctgtctgctggttctggtgctctacaccctgctggcgctggtgatttccgacctgatgcccttcgacaaactcgccaattctgaaacgccgatttccgacgccctgacctggatccccgcactcggcagcaccgctgggatctttgttgccatcacggcgatgatcgtcattcttggttcgctttccagctgcgtgatgtaccagccgcggctggaatacgcgatggcgaaagacaacctgttctttaaatgcttcggccatgtgcatccgaaatacaacacgccggatgtctccatcatcctgcaaggggcgctggggctcttcttcatcttcgtttccgatctcaccagcctgctgggttatttcaccctggtgatgtgtttcaaaaataccctcaccttcggctccatcatctggtgtcgtaaacgcgacgattacaaaccgctgtggcgtactccggctttcgggctgatgaccaccctcgccattgcgtcaagcctcattctggtcgcctcaacctttgtctgggcaccgattcccggccttatctgcgccgtcatcgttattgctactggtctgcctgcttacgccttctgggcgaagcgtagccgccagctcaacgctttgtcgtaa

SEQ ID NO: 460790 - DNA, 582 bp, Shigella boydii
atgttggatattgataaaagcaccgtggactttctggtcaccgaaaatatggttcaggaagtggaaaaagttctcagccatgacgttccgctggtgcacgccatcgtggaagagatggtgacgcgcgacattgatcgtatttatttcgttgcctgcggctcgccactcaacgcggcgcaagcggcgaaacatctggcggatcgcttttccgatcttcaggtctacgccatttccggctgggagttctgcgataacaccccgtatcgcctcgacgatcgttgcgcggtgattggcgtttctgactacggtaaaacggaagaggtaatcaaagcgctggagctgggccgggcctgcggcgcactcactgcggcgttcaccaaacgcgcggacagcccgattacctcggcggcggaatttagcattgattatcaggccgactgtatctgggaaattcacctgctgctctgctacagcgtggtgctggagatgatcacccgcctcgcgccgaacgcggaaatcggcaagatcaaaaacgatctcaagcagttgccgaatgcgctcggtcatctggtacgtacctag

SEQ ID NO: 460791 - DNA, 396 bp, Shigella boydii
atgatttataccgttgctgcgggtccgctgcgtccgctgggttacaaagaaggcattgtaacgctgatggaatttacctggacgcacggctgcgtgattgagagcggagagttccgccatggcccgctggagattgtcgaaccgggcgttccgttcctgttcctgctcggcaatgatgaaagtcgccacaccaccgaacgcgccattaactttgttaaacagcgtactgacaacgtgatcgtcatcgattacgccgaaatttcgcaagggctgcacccgtggctggcaccgttcctgatgttcgtgccaatggagtggctctgctactacctgtctatttacaaagatcacaacccggatgaacgccgctattacggtggtctggtggaatattaa

SEQ ID NO: 460792 - DNA, 831 bp, Shigella boydii
atgaaaacaggtatgtttacctgcggccaccagcggctgcctattgaacacgcatttcgtgatgcaagcgagctgggttacgacggcatcgaaatttggggcggtcgcccgcacgcgttcgcgccggacttaaaagcgggcggcatcaaacaaatcaaggcgctggcgcagacgtatcagatgccgattatcggctatacgccagaaaccaacggctatccgtataacatgatgctgggcgatgaacatatgcgtcgcgaaagcctcgacatgatcaagctggcgatggatatggcaaaagagatgaacgcgggttatacgctgatttccgcggcccacgcgggctatctcacgccacctaatgttatctggggacggctggcagagaacctaagcgaactgtatgagtacgcggaaaacatcggcatggatctaatcctcgaaccgttaacgccgtatgaatcgaacgtcgtgtgtaatgctaatgatgtgcttcatgcgctggcgctggtgccttcgccgcgcctgttcagcatggtcgacatttgcgcgccgtatgtccaggcggaaccggtgatgagttatttcgacaaactgggcgataaattacgtcatctgcatattgtcgacagcgacggggccagcgacacgcattacattcctggagaaggcaaaatgccgctgcgggaactgatgcgcgatattattgagcggggctatgagggttactgtacggtggagctggtgacgatgtatatgaacgagcccagactctatgcccgccaggcgctggaacgctttcgcgcgctgctgccggaggatgagagatga

SEQ ID NO: 460793 - DNA, 786 bp, Shigella boydii
atgaaaaccctggcgacaatcggcgataactgcgtcgatatctacccgcaactgaataaagcgttttctggcggtaatgcggtcaatgtggcggtgtactgcactcgctacggcatacagccgggatgcattacctgggtgggtgacgatgactacggcacaaagctgaagcaggatctcgcccgcatgggcgtcgatatcagccatgtccatacgaaacacggcgttaccgcacaaactcaggtggaactgcacgacaatgatcgcgtttttggcgactacaccgaaggcgtgatggccgactttgccctgagtgaagaggattacgcctggctggcgcagtatgacattgtgcacgcggcaatctggggacatgcggaagacgcattcccacagctgcacgctgcgggcaaacttaccgctttcgacttctccgacaagtgggacagcccgctctggcagacactggtgccgcatctcgattttgcctttgcctccgcaccgcaagaagacgaaacgctgcgtctgaagatgaaagcgattgttgcccgtggcgcaggaaccgtgattgtcacgctgggtgaaaacggcagcattgcctgggatggcgcgcagttctggcgtcaggctcctgaaccggtgacggttatcgacaccatgggtgccggagattcgttcattgccggattcctttgcggctggtctgcggggatgacattaccgcaggcgatggcgcagggaacggcgtgcgcggcgaaaaccattcagtaccacggtgcctggtag

SEQ ID NO: 460794 - DNA, 732 bp, Shigella boydii
atgtcagctacggaccgctactctcatcaactcctctacgctaccgtccgccagcgactgctggatgatatcgcgcagggggtttaccaggccgggcaacagatccctaccgaaaacgagctttgtacacaatataacgtcagccgcattaccattcgcaaagccatcagcgacttagtggcggacggcgtactgatccgctggcagggaaaaggcacctttgtacaaagccagaaagttgaaaacgccctgcttactgtcagtggttttaccgattttggcgtctcacaaggcaaggcgacgaaagagaaagtgatcgaacaggaacgggtcagcgccgcgccgttttgcgaaaagctgaacatccccggaaacagcgaagtgttccatctctgccgggtgatgtatctcgataaagagccgctgtttattgatagttcatggatcccgctgtcgcgttatcctgactttgatgagatttacgtcgaaggaagctccacctatcagttatttcaggagcgttttgacacgcgagtggtcagcgacaaaaagaccatcgatatctttgccgccacccgcccgcaggcaaaatggctgaaatgcgaactgggcgaaccgttgtttcgcatcagcaaaatcgcctttgatcagaatgacaaaccggtgcacgtctccgaactcttctgccgcgccaatcgcatcaccttaactattgataataaaagacattaa

SEQ ID NO: 460795 - DNA, 1086 bp, Shigella boydii
atgaagacgtttcctctgcaaagcctgacgcttattgaggcgcagcaaaagcagtttgcgctggtggacacgatttgccgtcactttcccggcgcggagtttctaaccagcggtgatttgggcttaacgccggggctgaatcaaccgcgtattacccaacgggtggagcaggtgctggctgatgcatttcacgcacaggctgcggcgctggtgcagggcgcggggactggcgcgattcgcgccgggctggcagctttgctcaaaccggggcagcgtcttctggtgcatgacgcgcctgtttacccgacgacacgggttattgttgagcagatggggctgacgcttattactgttgatttcaatgacctgtcggcactgaagcaggtcgtcgacgagcaacaaccggatgcggcgctggtgcagcatacgcgccagcagccgcaggacagctacgtgctggcagatgtgctggcaacgttgcgcgcggcaggtgttccagcgttaaccgatgacaactatgcggtgatgaaggtggcgcgaatcggctgtgaatgcggcgcgaatgtctcgacattttcctgcttcaagctatttgggccagagggtgttggtgcagtggtcggcgatgctgatgttatcaaccgtattcgcgccacgctttactccggcggtagccagatccagggcgcacaggcgctggaagtattgcgttgtctggtgtttgcgccagtgatgcacgcggtgcaggcaggggtatctgaacggttgctggctttgcttaacggtggtgcggtgccggaagtgaaaagcgcggtgattgctaatgcgcagtcgaaggtgttgattgtcgagtttcatcagccgattgccgccagagtgctggaagaggcgcaaaagcgcggtgccttgccttacccggtgggtgcagagtcgaaatatgaaatcccgccgctcttttatcgcctttccggaacgtttcgccaggcgaatccacaatcagaacattgtgcgattcgcattaacccgaatcgcagcggtgaagagacggtgctgcggattttgcgtgagagtattgccagtatttaa

SEQ ID NO: 460796 - DNA, 1020 bp, Shigella boydii
atggcgtttggtcttggcgctatctggggcgtgttgatccttacttgcctgttgccagtaaaccagctgctgaccgcgctgccggtggatgtattaggtagcctcggggaattaagctcgccggtagtttctgcttttgcactgtttccgctggtggcgattttctaccagtttggctggaagcaaagtctggtcgccgccgtggttgttctgatgacccgtgtggtagtcgtgcgctatttcccacatcttaaccctgaatccatcgaaatctttattggcatggtgatgctgctggggatcgcgataactcacgacctgcgtcatcgtgatgaaaatgatattgatgccagcgggctttcggtgtttgaagaacgcacgtcgcggattatcaaaaacttaccctatatcgccatcgtgggagcattgattgccgccgttgccagcatgaagattttcgccggcagtgaagtgtcgatcttcactctggagaaagcgtactccgcaggcgtaacgccggaacaatcgcaaacgctgatcaaccaggcggcactggcagaatttatgcgcgggctgggttttgtaccgttgattgccaccaccgccttagcaacgggtgtgtatgcagttgcgggctttacctttgtttatgcggtgggctatctctcgccgaatccgatggttgcagcggtattaggcgcagtggttatttcggcggaagtcttgctgcttcgttctatcggcaaatggctgggacgctacccgtcggtgcgtaatgagtcggataacatccgtaacgccatgaatatgctgatggaagtggcgctgctggtcggttcgattttcgcagcaattaagatggcgggttataccggattctctatcgcggttgccatttacttcctcaacgaatccctgggccgtccggtacagaaaatggcggcaccggtcgtggcagtaatgatcaccggtattctgctgaatgttctttactggcttggcctgttcgttccggcttaa

SEQ ID NO: 460797 - DNA, 372 bp, Shigella boydii
atgcttcatactgccaatcccgtcatcaaacacaaagccggtttgctcaatctggctgaagaactcagcaacgtatcaaaagcctgtaaaatcatgggcgtttcgcgtgatacgttttatcgttaccgcgaactggtcgctgaaggcggtgtggatgcgcagattaatcgtagtcgccgcgctcctaaccttaagaaccgtaccgatgaggcaactgaacagactgttgttgattacgccgtcgctttcccgacacatggtcagcaccgggccagcaacgagctgcgtaaacaggggggttttatctccgacagtggtgtccgttctgtctggttactccataaccttgagaatctcaaaagacgatactga

SEQ ID NO: 460798 - DNA, 1095 bp, Shigella boydii
atgcaagagagacacacggaacaggactatcgtgccctgctgattgctgatacgcccattattgatgttcgcgcccctatcgagtttgagcaaggcgcaatgcccgccgctatcaatctgccgttaatgaataacgatgaacgcgccgccgttggcacctgctataaacagcaagggtcagacgcggcgctggcgctggggcataaactggtggcgggtgaaattcgtcagcagcgcatagacgcctggcgggcagcgtgcctgcaaaatccgcaaggtattctctgctgtgcccgtggcggtcaacgctcacatattgtgcaaagctggttgcatgcagcggggattgattatccgctggtggaaggcggttataaggcactgcgccagaccgcgattcaggcgactattgaactggcacaaaaaccgatagtgctgattggcggttgtaccggcagcggtaaaacgctgttagtgcagcaacagccgaacggtgtcgatctggaagggctggcgcgtcatcgcggttcggcgtttggtcgcacgttacaaccacaacttagccaggcgagttttgaaaatctgctggctgccgaaatgctaaaaaccgacgcccgtcaggatttgcgcctgtgggtgctggaagatgaaagccggatgatcggttcgaatcacctgccggaatgtctgcgcgagcgaatgactcaggcggcgattgcggtggtagaagatccgtttgagatccgtcttgaacgcctgaacgaagagtatttcttgcgtatgcatcatgattttacccacgcgtacggcgacgaacagggctggcaggaatattgcgaatacctgcatcacggactttcggctattaagcgtcggctggggttacagcgctataacgaactcgctgcccagctggatacggcgctgacaacgcaactcaccaccggcagcaccgacggtcatctggcctggctggtgccgttacttaaagaatattacgacccaatgtatcgctatcagcttgagaaaaaagcggaaaaagttgtctttcgcggtgagtgggcggaagtggcggaatgggttaaggcgcggtaa

SEQ ID NO: 460799 - DNA, 927 bp, Shigella boydii
atgttcgatccagaaaccttgcggactttcattgcggttgctgaaacaggaagtttttcaaaagcggcagaacgattatgtaaaaccacggcgacgatcagttatcgcattaaacttctggaagagaataccggagtagcgctgtttttccgtacgactcgtagcgtaacgttgacagcggctggcgagcatctactttcccaggccagagactggctgagctggctggaaagtatgcccagcgagctgcaacaggtgaatgatggcgtggaacgccaggtgaatattgtcatcaacaacctgctctataacccccaggccgtcgcccagttgctagcgtggctgaatgaacgttacccctttacccagtttcacatctcccgacaaatctatatgggcgtctgggactcgctattgtacgaaggtttttcgctggctatcggcgtcacgggaactgaggcgctggcaaatacctttagtcttgatcccttaggatcggtgcaatggcgatttgtcatggcggcggatcatccgctggcgaacgttgaagagccgctaacagaagcgcagttgcgtcgctttccggcggtcaatattgaagacagcgcccgcaccttaaccaaacgcgtcgcctggcgattgccagggcaaaaagagattattgttcctgatatggaaacgaaaatcgccgcccatctggcgggcgttggcattggttttttgccaaaatcgctttgccagtcaatgatcgataatcaacaactggtcagccgggtaatcccaacgatgcgccctccttcgccattgagtctggcatggcgcaaatttggcagcggcaaagcggtagaagatattgtgaccttgtttacccagcgcaggccggaaatcagcggatttttagaaattttcggcaacccacgcagttaa

SEQ ID NO: 460800 - DNA, 483 bp, Shigella boydii
atgaaacttcaggtattaccgttaagtcaggaagcctttagtgcttatggcgacgtaatcgaaactcagcaacgggattttttccatattaacaatggcctggtggagcgttaccacgatttggcgctggttgagattcttgagcaagaccgtacgcttattagcattaaccgcgcgcaaccggcgaatctgccgctgaccattcacgaactcgaacgtcatccgctgggcactcaggcctttatcccgatgaaaggtgaagtgtttgtggtggtcgtggcgttaggcgacgacaaaccagacctgtcaacgctgcgggcgtttatcaccaacggcgaacagggagtgaattaccatcgtaacgtctggcatcacccacttttcgcctggcagcgcgtcaccgattttctgaccatcgatcgcggcggcagtgacaactgtgatgttgaaagtattcctgaacaggaactctgttttgcgtga

SEQ ID NO: 460801 - DNA, 816 bp, Shigella boydii
atgacggaagttagacggcgcggcaggccaggacaggcggagcctgtggcacagaagggcgcacaggcgttagagcggggaattgcgattctgcaatatctggaaaaaagtgggggaagttcgtcggttagcgatatttctctcaatctggatttgccgctctccacgacctttcgcttgctgaaggttttacaagcagcggattttgtctatcaggaaagtcaattaggctggtggcatataggattaggtgtctttaacgtcggtgcggcgtacatccataaccgcgatgtcctctccgtcgccgggccgtttatgcgccgcctgatgttactttccggcgaaacggtcaatgtcgcgatccgtaacggcaatgaagcagtattaattggtcagttagagtgtaaatcaatggtcaggatgtgtgcgccactgggcagtcgtctgccgctgcatgcttccggtgcgggcaaagcgctgctttatccgctggcggaagaggagttgatgagcatcattctgcaaaccggtttgcagcagtttacgccaactacgcttgtggatatgcccaccttgctgaaggacctggaacaagcgcgtgaactgggctataccgtagataaagaagagcatgttgtaggtctgaattgcatagcttcagcaatttacgatgatgtcggtagcgttgttgccgctatctccatctccgggccttcatcaagactgacagaagatcgttttgtcagtcagggtgagctggtcagagacaccgcccgcgatatcagcacggcgttgggactgaaagcacatccataa

SEQ ID NO: 460802 - DNA, 1782 bp, Shigella boydii
atggcaaaaatgagagccgttgacgcggcaatgtatgtgctggagaaagaaggtatcaccaccgccttcggtgttccgggagctgcaatcaatccgttctactcagcgatgcgtaagcacggcggtattcgtcacattctggcgcgtcatgtggaaggtgcttcgcacatggcggaaggttatacccgcgcaacggcagggaatatcggcgtatgtctggggacttccggtcctgcgggcacggacatgatcaccgcgctctattccgcttctgctgattccattcctattctgtgcattaccggccaggcaccgcgcgcccgtctgcataaagaagattttcaggccgtagatattgaagcaattgctaaaccggtcagcaaaatggcggttacagttcgtgaagcggcgctggtgcctcgcgtgctgcaacaggcatttcacctgatgcgttctggtcgtccgggtccggtactggtggatttaccgttcgacgttcaggttgcggaaatcgagtttgatcctgacatgtacgaaccgctgccggtctacaaacctgctgccagccgtatgcagatcgaaaaagctgtagaaatgttaatccaggccgaacgtccggtgattgttgccgggggcggggtaatcaatgctgacgcagctgcactgttacaacagtttgctgaactgaccagcgttccggtgatcccaacgctgatgggctggggctgtatcccggacgatcatgaactgatggccgggatggtcggcctgcaaaccgcgcatcgttacggtaacgcaacgttgctggcgtccgacatggtgtttggtatcggtaaccgttttgctaaccgtcataccggttcggtagagaaatacaccgaagggcgcaaaatcgttcatatcgatattgagccgacgcaaattggtcgcgtgctgtgtccggatctcggcattgtctctgatgctaaagcggcgctgacactgctggttgaagtggcgcaggagatgcaaaaagcgggtcgtctgccgtgtcgtaaagaatgggtcgccgactgccagcagcgcaaacgcactttgctgcgcaaaacccacttcgacaacgtgccggtgaaaccgcagcgcgtgtatgaagagatgaacaaagcctttggtcgcgatgtttgttatgtcaccaccatcggtctgtcacaaatcgctgcggcacaaatgctgcatgtctttaaagaccgccactggatcaactgtggtcaggctggtccgttaggctggacgattccggctgcgctaggggtttgtgccgctgatccgaaacgcaatgtggtggcgatttctggcgactttgacttccagttcctgattgaagagttagccgttggcgcgcagttcaacattccgtacatccatgtgctggtgaataacgcctatctcggcctgattcgtcagtcacaacgcgcctttgacatggactactgcgtgcaactcgctttcgagaatatcaactccagcgaagtgaacggttacggcgtcgaccacgtaaaagtagcggaaggtttaggttgtaaagcgattcgcgtcttcaaaccggaagatattgcgccagcctttgaacaggcgaaagccttaatggcgcaatatcgggtaccggtagtcgtggaagttattctcgagcgtgtgaccaatatttcgatgggcagcgaactggataacgtcatggaatttgaagatatcgccgataacgcagtggacgcaccgactgaaacctgcttcatgcactatgaataa

SEQ ID NO: 460803 - DNA, 132 bp, Shigella boydii
atgttacgtttctctgctaatttatcgatgttatttggtgaatatgattttctcgcccgttttgagaaagctgcgcagtgtggttttcgcggcgttgaatttatgggtaatgctgccaacttactgatttag

SEQ ID NO: 460804 - DNA, 609 bp, Shigella boydii
atgaaactcgtcggtagctacaccagcccgtttgtacgcaaactttctattctgttgttagaaaagggcataactttcgaatttattaatgaactgccctataacgcggacaacggcgtggcgcaatttaacccgttaggaaaagtgccggtgctggtgaccgaagagggcgaatgctggtttgattcgccgatcatcgctgaatatattgagttaatgaatgtcgctccggcgatgttgccgcgcgatccgctggagtcgttgcgggtgcgcaaaattgaggcgctggcggatggcattatggatgccgggctggtatcggtgcgtgaacaggcgcgtccagcggcgcagcagtctgaagatgaattgttacgccagcgggagaaaatcaaccgcagtctggatgtgctggaaggatatctggtcgatggcacactcaaaaccgatacggtcaatctggcgactatcgccattgcctgtgctgtcggatatctcaatttccgccgcgttgcgccaggttggtgtgtcgaccgcccacacttagtcaaactggtcgaaaacctgtttagccgcgaaagttttgctcgcaccgaaccgccaaaggcttga

SEQ ID NO: 460805 - DNA, 1392 bp, Shigella boydii
atgacaaccgaaacgcgttccctctatagtcaacttccggctattgatcgcttattgcgcgatagctccttcctttctttgcgtgatacttatggtcacacccgcgtggtggaattgttgcgtcagatgctcgacgaagcgcgagaagtgattcgtgacagccagacgcttcctgcgtggtgtgaaaactgggcgcaagaagtcgatgcccggttgacgaaagaggcgcagagcgcgctgcgtccggtgatcaacctgacgggaaccgtgctgcataccaaccttggacgagctttacaggcggaagccgcggtggaagccgttgcgcaggctatgcgttcgccagtgaccctcgagtacgatctggacgacgctggacgcggacatcgcgatcgggcgctggcgcaactgctgtgccgtattacgggggcggaagatgcctgtatcgtcaataacaatgcggcggcggtgttattgatgttggcggccactgccagcgggaaagaggtggtagtatctcgcggcgaattggtggagattggcggcgcgtttcgtattcccgatgttatgcgtcaggcaggctgcaccctacacgaagtagggaccaccaaccgtacgcacgcgaatgattatcgtcaggcggtgaatgaaaataccgcactgttgatgaaagtacataccagtaactacagcattcaggggttcaccaaagcgatagatgaagcggaactggtggcgctcggcaaagagctggatgttcccgtagtgactgatttaggcagtggctcgctggtcgatcttagccagtacggtttgccgaaagagccaatgccgcaggagttgattgcggcgggcgtcagtctggtgagcttctccggcgacaagttgttaggcgggccgcaggcagggattatcgttggtaaaaaagagatgatcgcccgcctgcaaagccacccgctgaagcgtgcattacgcgcggataaaatgaccctcgcggcgctggaagccacgttgcgtctttatttacaccctgaagctctgagtgaaaaattaccgaccctgcgcctgcttacccgcagcgcagaggtcattcaaatccaggcacaacgtttacaggctccccttgccgcacattacggcgcggagtttgcggtacaggttatgccatgtctttcgcagattggcagtggttcgctgccggttgatcgcctgccgagcgcggcattaacgtttacaccccatgatggacgcggtagccaccttgagtcattagccgcccgctggcgtgaattgccagtgccggtgattggtcgtatttatgacggacgattgtggctggatttacgctgccttgaagatgagcaacggtttttggagatgttgttgaaatga

SEQ ID NO: 460806 - DNA, 1845 bp, Shigella boydii
atgattattgcgactgccggacacgttgaccacggcaaaacaaccttattgcaggcgattactggcgtaaatgctgaccgtctgccggaagaaaaaaagcgcggcatgaccatcgatctcggctatgcctactggccgcagccggatggtcgcgtgcctggttttatcgacgtacccggtcatgaaaagtttctttccaacatgctggcgggcgttggtggtattgatcacgcgctgttggtggtggcgtgcgatgacggcgtgatggcgcagacccgtgagcatctggcgattttgcagctgaccggtaacccgatgctgacagtggcgctgaccaaggccgatcgcgtggacgaagcgcgtgttgatgaggttgaacgccaggtaaaggatgtgctgcgggaatacggttttgctgaggcaaaactgtttatcaccgcagcaaccgaaggtcggggaattgatgccctgcgcgagcatctgcttcagttaccaggacgtgaacacgccagccaacatagtttccgcctcgcgatcgaccgcccatttaccgtaaaaggtgccgggctggtcgtcaccggtacggcgttaagcggggaagtgaaggtaggcgattcactctggctgactggtgtaaataaaccgatgcgtgtacgtgcgctgcatgcacaaaaccagccaacagaaaccgcccatgccgggcagcgtatcgcgcttaacatcgcgggtgatgcggaaaaagagcagattaaccgtggcgactggctgcttgccgatgcgccgccagagccgttcacacgggtgattgtcgagcttcaaacccatacaccgctgacccagtggcagccgctgcatattcaccacgccgccagccacgtcacgggacgcgtttcactgctggaagataaccttgctgaactggtcttcgacaccccgttatggctggcagataacgaccgcctggtattgcgcgatatctctgcccgcaacacgctggccggagcgcgcgtcgtgatgcttaacccgccgcgtcgcggtaaacgtaaaccagagtatctgcaatggctggcttccctcgccagggcacagaatgatagcgaagcgttagccgttcacctgcaacgcggcgcggttaatcttcctgatttcgcctgggcgcgccagctcaacggcgaagggatgcgcgaactgctgcaacagcctggctatattcaggctggttatagcttgttgaatgcgccggttgccgctcgctggcaacggaaaattctcgacacattagcgacttatcatgagcaacatcgcgatgaacctgggcctgggcgcgaacgtctgcgacgtatggcgttgccaatggaagatgaagcgctagtactgttgctgattgaaaagatgcgcgaaagcggcgacatcctcagtcatcacggttggctgcatctgccggatcacaaagcgggcttcagcgaagagcagcaggccatctggcaaaaagcagagccgctgtttggtgacgagccgtggtgggtgcgtgatctggcaaaagagacgggtaccgacgagcaggcaatgcgcctgacgctacgccaggcggcgcagcaaggaataattaccgcgatcgtcaaagatcgttattaccgtaacgatcggattgtcgaatttgccaatatgatccgcgatctcgatcaggagtgtggttcaacctgcgcggcggatttccgcgatcgcttaggcgtaggccgaaagctggcaattcagattctggaatattttgaccgcattggctttacgcgtcgtcgtggaaatgatcatttattgcgcgacgcattattatttccggaaaaataa

SEQ ID NO: 460807 - DNA, 1152 bp, Shigella boydii
atggcatcttcaactttctttattccttctgtgaatgtcatcggcgctgattcattgactgatgcaatgaatatgatggcagattatggatttacccgtaccttaattgtcactgacagtatgttaacgaaattaggtatggcgggcgatgtgcaaaaagcactggaagaacgcaatatttttagcgttatttatgatggcacccaacctaaccccaccacggaaaacgtcgccgcaggtttgaaattacttaaagagaataattgcgatagcgtgatctccttaggcggtggttctccacacgactgcgcaaaaggtattgcgctggtggcagccaatggcggcgatattcgcgattacgaaggcgttgaccgctctgcaaaaccgcagctgccgatgatcgccatcaacaccactgcgggtacggcctctgaaatgacccgtttctgcatcatcactgacgaagcgcgtcatatcaaaatggcgattgttgataaacatgtcactccgctgctttctgtcaatgactcctctctgatgattggtatgccgaagtcactgaccgccgcaacgggtatggatgccttaacgcacgctatcgaagcatatgtttctattgccgccacgccgatcactgacgcttgtgcactgaaagccgtgaccatgattgccgaaaacctgccgttagccgttgaagatggcagtaatgcgaaagcgcgtgaagcaatggcttatgcccagttccttgccggtatggcgttcaataatgcttctctgggttatgttcatgcgatggcgtaccagctgggcggtttctacaacctgccacacggtgtatgtaacgccgttctgctgccccatgttcaggtattcaacagcaaagtcgccgctgcacgtctgcgtgactgtgccgctgcaatgggcgtgaacgtgacaggtaaaaacgacgcggaaggtgctgaagcctgcattaacgccatccgtgaactggcgaagaaagtggatatcccggcaggcctacgcgacctgaacgtgaaagaagaagatttcgcggttctggcgactaatgccctgaaagatgcctgtggttttactaacccgatccaggcaactcacgaagaaattgtggcgatttatcgcgcagcgatgtaa

SEQ ID NO: 460808 - DNA, 1539 bp, Shigella boydii
atgaccaataatcccccttcagcacagattaagcccggcgagtatggtttccccctcaagttaaaagcccgctatgacaactttattggcggcgaatgggtagcccctgccgatggtgagtattaccagaacctgacgccggtgactgggcagctgctgtgcgaagtggcgtcttcgggcaaacgagacatcgatctggcgctagatgctgcgcacaaagtgaaagataaatgggcgcacacctcggtgcaggatcgcgcggcgattctgtttaagattgccgatcgaatggaacaaaacctcgagctgttagcgacagctgaaacctgggataacggcaaacccattcgcgaaaccagtgctgccgacgtgccgctggcgattgatcattttcgctatttcgcctcgtgtattcgggcgcaggaaggtgggatcagtgaagttgatagcgaaaccgtggcctatcatttccatgaaccgttaggcgtggtggggcagattatcccgtggaacttcccgctgctgatggcgagctggaaaatggctcccgcgctggcggcgggcaactgtgtggtgctgaaacccgcacgtcttaccccgctttctgtactgctgctaatggaaattgtcggtgatttactgccgccgggcgtggtgaacgtggtcaatggcgcaggtggggaaattggcgaatatctggcgacctcgaaacgcatcgccaaagtggcgtttaccggctcaacggaagtgggccaacaaattatgcaatacgcaacgcaaaacattattccggtgacgctggagttgggcggtaagtcgccaaatatcttctttgctgatgtgatggatgaagaagatgcctttttcgataaagcgctggaaggctttgcactgtttgcctttaaccagggcgaagtttgcacctgtccgagtcgtgctttagtgcaggaatctatctacgaacgctttatggaacgcgccatccgccgtgtcgaaagcattcgtagcggtaacccgctcgacagcgtgacgcaaatgggcgcgcaggtttctcacgggcaactggaaaccatcctcaactacattgatatcggtaaaaaagagggcgctgacgtgctcacaggcgggcggcgcaagctgctggaaggtgaactgaaagacggctactacctcgaaccgacgattctgtttggtcagaacaatatgcgggtgttccaggaggagatttttggcccggtgctggcggtgaccaccttcaaaacgatggaagaagcgctggagctggcgaacgatacgcaatatggcctaggcgcgggcgtctggagccgcaacggtaatctggcctataagatggggcgcggcatacaggctgggcgcgtgtggaccaactgttatcacgcttacccggcacatgcggcgtttggtggctacaaacaatcaggtatcggtcgcgaaacccacaagatgatgctggagcattaccagcaaaccaagtgcctgctggtgagctactcggataaaccgttggggctgttctga

SEQ ID NO: 460809 - DNA, 759 bp, Shigella boydii
atgaagcttttgaagacagttcctgccatcgttatgttggcggggggcatgtttgcgtcactgaatgcagctgccgatgattccgtttttactgtcatggacgatcctgccagcgctaaaaaacctttcgaaggtaatctgaacgcaggatatcttgcacaatcaggcaatacgaaaagctcctcacttacggctgacaccaccatgacctggtatggacaaaccactgcctggtcgctgtgggggaacgccagtaatacttcttctaatgatgagcgttcttcagaaaaatatgcggcgggcgggcgtagccgctttaatttaactgattatgactatttatttggtcaggcaagctggctgacagaccgttataacggctatcgagagcgcgatgtgttgaccgcgggttatggtcgtcagtttttgaatggcccggtacacagtttccgctttgaattcggtccaggtgtgcgttacgacaaatataccgacaatgccagtgaaactcagccgctgggctatgcctccggggcttatgcatggcagttgactgacaacgctaaatttacgcagggtgtttcggtctttggcgcggaagacacaacgctgaactccgaaagcgcattaaatgttgctattaatgaacattttggactgaaggtggcttacaacgttacatggaactctgaacctccagagtctgcaccggaacataccgaccgtcggacaaccttatcgctgggctacagcatgtaa

SEQ ID NO: 460810 - DNA, 930 bp, Shigella boydii
atggtacgtatctatacgttgacacttgcgccctctctcgatagcgcaacaattaccccgcaaatttatcccgaaggaaaactgcgctgtaccgcaccggtgttcgaacccgggggcggcggcatcaacgtcgcccgcgccattgcccatcttggaggcagtgccacagcgatcttcccggcgggtggcgcgaccggcgaacacctggtttcactgttggcggatgaaaatgtccccgtcgctactgtagaagccaaagactggacccggcagaatttacatgtacatgtggaagcaagcggtgagcagtatcgttttgttatgccaggcgcggcattaaatgaagatgagtttcgccagcttgaagagcaagttctggaaattgaatccggggccatcctagtcataagcggaagcctgccgccaggtgtgaagctggaaaaattaacccaactgatttccgcttcgcaaaaacaagggatccgctgcatcgtcgacagttctggcgaagcgttaagtgcagcactggcaattggtaacatcgagttggttaagcctaaccaaaaagaactcagtgcgctggtgaatcgcgaactcacccagccggacgatgtccgcaaagccgcgcaggaaatcgttaatagcggcaaggccaaacgggttgtcgtttcccttggtccacaaggagcgctgggtgttgatagtgaaaactgcattcaggtggtgccaccaccggtgaaaagccagagtaccgttggcgctggtgacagcatggtcggcgcgatgacactgaaactggcagaaaatgcctctcttgaagagatggtccgttttggcgtagctgcggggagtgcagccacactcaatcagggaacacgtctgtgctcccatgacgatacgcaaaaaatttacgcttacctttcccgctaa

SEQ ID NO: 460811 - DNA, 291 bp, Shigella boydii
atggccagtggcgatcttgtccgttatgtcataaccgtcatgttgcatgaggatacattgactgaaattaacgagttgaataattacctgactcgcgacggttttttgctcaccatgacggatgatgagggaaatatccatgagctggggactaacacttttggacttatcagtacccaaagtgaagaagaaattagagaactggtttcggggcttacccaaagtgcaaccggcaaagatcctgaaatcaccatcacgacctgggaggaatggaatagcaacagaaaataa

SEQ ID NO: 460812 - DNA, 861 bp, Shigella boydii
atgtggcaggcaatcagtcgtcttttgagcgagcagttaggtgaaggcgaaatcgaactgcgtaatgaactgcctggcggagaagtccatgccgcatggcatttgcgctatgcaggacatgactttttcgtcaaatgtgatgaaagggaactgcttcccggttttaccgccgaagccgaccaactggagttactgtcgcgtagtaaaaccgtcaccgtgcctaaggtttgggcagtaggcgctgaccgtgactacagttttctggtgatggattatctcccacctcgtccgctggatgcgcatagcgcatttattcttggtcagcaaattgcgcgtttacatcaatggagtgaccaaccacaatttggcctcgattttgataactcgctctccacaactccacagcccaacacctggcaacgtcgctggtcaacgttttttgctgaacaacggattggctggcagttggaactggcagcagagaaagggatcgctttcggcaatatcgacgccatcgtcgagcatattcagcagcgtctggcctcgcatcaaccgcagccttctctgttgcacggcgatttatggtccggcaactgtgcgctgggtccggatggcccgtacattttcgaccctgcctgctactggggtgaccgagagtgcgacctggcgatgttaccgctgcatactgaacagccgccacaaatctatgacggctatcagtcagtatccccgctacctgccgatttccttgaacgtcaaccggtttaccaactctacacgctgttaaatcgtgcaaggttatttggcggtcagcatttggttattgctcagcagtcactggatagattattagcagcatga

SEQ ID NO: 460813 - DNA, 537 bp, Shigella boydii
atgacgtatcaacaagctggacgcattgctgttttgaaaaggattttgggttgggtgatttttatacctgcattgatctctacattgatttctttgctgaaatttatgaatacccggcaggaaaaccaggaaggcattaatgcggtcatgctcgactttactcatgtcatgatcgatatgatgcaggcgaatacgccttttttgaatctgttctggtataactccccgacgcccaattttaatggtggcgtgaacgttatgttctgggtgattttcatcctgatttttgtcggactggcgttgcaggattccggtgcccgaatgagtcgccaggcgcgcttcttgcgggaaggtgttgaagatcaactcattctggaaaaagccaaaggggaagaggggctaacgcgtgaacaaattgagtcccgtattgttgttccgcaccatactattttcctgcagtttttctcactgtatatcctgccggttatttgtattgctgcaggttatgtgttcttttctctgcttgggtttatttaa

SEQ ID NO: 460814 - DNA, 669 bp, Shigella boydii
atgtcaaccccgcgtcagattcttgctgcaatttttgatatggatggattacttatcgactcagaacctttatgggatcgagccgaactggatgtgatggcaagcctgggggtggatatctcccgtcgtaacgagctgccggacaccttaggtttacgcatcgatatggtggtcgatctttggtacgcccggcaaccgtggaatgggccaagccgtcaggaagtagtagaacgggttattgcccgtgccatttcactggttgaagagacacgtccattattaccaggcgtgcgcgaagctgttgcgttatgcaaagaacaaggtttattggtgggactggcctccgcgtcaccactacatatgctggaaaaagtgttgaccatgtttgacttacgcgacagtttcgatgccctcgcctcggctgaaaaactgccttacagcaagccgcatccgcaagtatatctcgactgcgcagcaaaactgggcgttgacccactgacctgcgtggcgctggaagactcggtaaatggcatgatcgcttctaaagcagcccgcatgcgttccatcgtcgttcctgcgccagaagcgcaaaatgatccacgttttgtattagcaaacgtcaaactctcatcgctgacagaactcaccgcaaaagaccttctcggttaa

SEQ ID NO: 460815 - DNA, 591 bp, Shigella boydii
atgacggcggaaggtcaccttctcttttctattgcttgtgcggtatttgccaaaaatgccgagctgacgcccgtgctggcacagggtgactggtggcatattgtcccttccgcaatcctgacgtgtttgttaccggacatcgatcacccaaagtcgtttcttgggcagcgattaaaatggatatcaaaaccgatcgcccgcgcttttgggcatcgtggttttacccacagtctgctggcggtatttgcgctgctggcaaccttttaccttaaggttccggaaggctggttcattccggctgatgcgctacaaggaatggtgctgggttatttgagccacatacttgccgatatgctgacacccgccggtgttcccctgctctggccatgccgctggcgtttccgcttgccgatcctagttccccaaaagggcaaccaactggaacgttttatctgcatggcattatttgtctggtcggtatggatgccccattcattacccgagaacagcgctgttcgttggtcatcgcaaataatcaataccttgcagatccagtttcatcggcttattaagcatcaggttgaatactaa

SEQ ID NO: 460816 - DNA, 1392 bp, Shigella boydii
atgaactttccattaattgcgaacatcgtggtgttcgttgtactgctgtttgcgctggctcagacccgccataaacagtggagtctggcgaaaaaagtgctggtgggtctggtgatgggtgtggtttttggccttgccctgcataccatttatggttctgacagccaggtacttaaagattctgtacagtggtttaacatcgttggtaacggctatgttcaactgctgcaaatgatcgttatgccgttagtcttcgcctctattctgagcgcggttgcccgtctgcataacgcatctcagttaggcaaaatcagttttctgaccatcggtacgcttttgtttaccacgctgattgcggcgctggtcggtgtgctggtcaccaacctgtttggtttgacggctgaaggtctggttcagggtggtgcagaaactgcacgtctgaacgccattgaaagtaactatgttggtaaagtctttgatctgagcgttccgcagctggtcttgtcctttatcccgaaaaacccgtttgccgatcttaccggagccaatccgacgtcaattatcagcgtggtaatttttgccgcattcctcggcgtagctgcattgaaactgctgaaggatgatgcgccgaaaggtgaacgcgtcttagccgctatcgataccctacaaagctgggtgatgaaactggttcgccttgtcatgcagttgaccccttacggcgttctggctctaatgaccaaagtggttgcaggttctaacttgcaagacatcatcaaactgggaagtttcgttgtcgcgtcctacctcggtctgctgattatgtttgcagtgcatggcattctgctgggcattaatggcgtgagtccgctgaagtacttccgtaaggtatggcctgtgctgacgtttgcctttaccagccgttccagtgctgcgtctatcccactgaatgtggaagcacaaacgcgtcgtctgggcgttcctgaatcaatcgccagtttcgccgcctctttcggtgcaaccattggtcagaacggctgcgccggtttgtatccggcaatgctggcggtgatggttgcgcctacggttggcattaacccgctggacccgatgtggattgcgacgctggtcggtattgttaccgttagttccgcaggcgttgccggtgtcggtggtggtgcaactttcgctgcactgattgtgctgcctgcgatgggcctgccagtaaccctggtggcgctgttaatctccgttgaaccgcttatcgacatgggccgtacggcgctaaacgttagtggctcgatgacagctggcacgctgaccagccagtggctgaagcaaaccgataaagccattctggatagcgaagacgacgccgaactggcacaccgttaa

SEQ ID NO: 460817 - DNA, 276 bp, Shigella boydii; identical to SEQ ID NO: 458859

SEQ ID NO: 460818 - DNA, 732 bp, Shigella boydii
gtgctggatgaatttcagactcatcgcccgttaattgcctgtacggtgattggtttaattctcggtgatttaaaaaccggaataatactcggtggtacgctggaattgatagctctcggctggatgaacgtcggcgcggcgcaatctccggattctgcactcgccagcataatctccgccattctggttatcgttggtcagcaaagcatcgccaccggaatcgccatcgcgttgcctgtggctgcggcaggccaggtgctgactgtgtttgcccgtaccatcaccgtagtgttccagcacgcggcggataaagcagcggaagaagcacggtttcgcactctcgatattctgcatgtctccgcgtttggcgtgcaggcgctgcgcgttgctattccggcactgattgtctcactgttcgtcagcgccgatatggtgagcaatatgctgagcgcgataccggaattcgtgacgcgcggtctgcaaattgctggcggttttatcgtggtggtcggttacgccatggtgctacgtatgatgggcgtgaaatatttgatgcctttctttttcctcggtttcctcgcaggtggctacctcgatctcagtctgctggcgttcggtggcgtcggcgtgatcatggccctggtctacatccagctaaatccacagtggcgtaaagctgaacctcaactccaggccaccgcctccaccgcccttgaccaacttgacgattaa

SEQ ID NO: 460819 - DNA, 1113 bp, Shigella boydii
atggaacagagaaaaattacacgcagcgatctggtgagcatgtttctgcgctccaacctgcaacaggcgtcctttaactttgaacgtattcacgggctgggtttttgctacgacatgatccccgccatcaaacgactttacccattaaaagaggatcaggttgcggcgctcaggcgacacctggtgttcttcaataccacgccagccgtatgtggcccggtcatcggcgtcactgccgccatggaagaggcgcgggccaacggcgcggaaattgatgacggtaccattaacggcatcaaagtcggtctgatgggactattggcaggagttggcgatccactggtctggggaacgctgcgcccgattaccaccgcgctcggcgcatctctggcactttcgggcaacattctcggcccgctgctgttcttctttattttcaatgcggtgcgtctggcgatgaagtggtatggcctacagctcggctttcgcaaaggggtgaatatcgtcagcgatatgggcgggaatgtgctgcaaaaactcaccgaaggcgcgtcgattctcgggctgtttgtgatgggcgtgctggtcaccaaatggacgtcaatcaacgtaccgttggtggtttcacaaacgcatgccgccgatggctccaccgtcaccatgaccgtgcagaacattctcgaccaactttgccctggtttgctggcgctcggtctgacgctgcttatggttcgtctgctcaacaaaaaaattaacccggtatggctgattttcgccctgtttggcttagggattatcggtaatgcgctgggcttcctgtccagattcttcgccccggcacgactgccggggccatcgctcaacatgaggtggtttatgaaaacaacagctctgcgtctttatggtaaacgtgatttacgcctggaaacctttgaccttcctgaaatgcaggaggatgaaatcctcgcgacggtggtcactgacagcctgtgcctctcttcctggaaagaggccaatctgggtgaaaaccataaaaaagtacccgacgatgtggcgacccccccccatcatcatcggccacgagttttgcggcgatattctggccgtgggtaa

SEQ ID NO: 460820 - DNA, 690 bp, Shigella boydii
atggaactgcttttattgagtaactcgacgctgccgggtaaagcctggctggaacatgcactgccgctaattgctgaacagttgcagggtcgccgctcagcggtgtttatccctttcgctggcgtaacgcagacctgggatgattacacagcgaaaacggctgcggttctcgctccgctgggtgtttctgtcaccggtattcatagcgttgtcgatcccgttgccgcgattgaaaatgctgagatcgtgattgtcggcggcgggaatactttccagttgctgaaacagtgccgcgagcgcgggctgctggcaccaattactgacgtggttaaacgtggtgcgctgtatattggctggagcgcaggcgctaaccttgcttgcccaaccattcgtaccaccaacgatatgccgattgtcgatccgcaaggtttcgatgcgctaaatctgttcccgttgcaaatcaacccgcacttcaccaacgcgctgccggaaggccataaaggtgaaacccgtgagcagcgtattcgcgaactgctggtcgtcgcgccagaactgacgattattggtctaccggaaggtaactggatcacagtgagtaaaggtcacgctacgctgggtggcccgaacaccacctatgtgtttaaggccggtgaagaagcggttccgctggaagctggtcaccgtttttaa

SEQ ID NO: 460821 - DNA, 1632 bp, Shigella boydii
gtgttaacgctgcttcacctgctttctgccgtcgccctgctggtctgggggactcatattgttcgaaccggcgtaatgcgcgtcttcggcgcgcgtttgcgtactgtccttagccggagcgtcgaaaaaaagccgctcgccttttgcgcggggatcggcgttaccgcactggtacagagcagtaatgccaccaccatgctggtgacctcgttcgtcgctcaggatctggtagccctcgcaccggctctggtcattgtgctgggggcagatgtcgggacggcgctaatggcgcgtattctcaccttcgacttatcctggctgtcaccgttacttatttttatcggcgtgatttttttcctcggacgcaaacagtcacgcgccgggcaactgggccgcgtcggtattggtcttgggctgattttgctggcgctggagttgattgtgcaggccgtaacgccgatcacccaggcaaacggcgttcaggtgatctttgcctcgctgaccggcgatattctgctggatgcgctgattggcgcgatgttcgccattatcagctactccagccttgctgctgtactgctgaccgcgactctgaccgccgcaggcattatctccttccccgtggcgctctgtctggtgattggtgctaacctcggttccggcctgctggcgatgctcaacaacagtgccgccaatgccgcagcccgccgtgtcgcgctgggtagtctgctgtttaagctggtgggtagcctgattatcctgccgtttgtccatttgctggcagagacaatggggaagctgtcattgccaaaagcggaactggtgatctatttccacgtcttctacaaccttgtacgttgcctggtcatgctgccatttgttgacccgatggcacggttttgcaaaacgattattcgcgatgaaccggaactggatacccagctacggcctaaacatctggatgtcagcgcgctggatacgcccacgcttgctctggcgaacgccgcgcgcgaaaccctgcgcattggcgacgccatggaacagatgatggaagggttgaataaagtgatgcacggtgagccacggcaggagaaagagctgcgtaagctggcagatgatatcaacgttctctacaccgccattaagctgtatctggcgcggatgccaaaagaagagctggcggaggaagagtcgcgccgctgggcggagattattgaaatgtcgctcaaccttgaacaggcctccgatatcgtcgagcgcatgggcagcgaaattgctgacaaatcactggcagcacggcgggcattttcgcttgatgggttgaaggaactggatgcgctctatgagcaattgctcagtaatttaaagctggcaatgtcggtgttcttctctggcgatgtcaccagcgctcgtcgtttgcgccgtagtaagcatcgctttcgcattcttaatcgcagctattcccacgcccacgtcgatcgcctgcatcagcaaaacgtgcagagcattgaaaccagttcgctacatttaggcttactgggagatatgcagcgcctgaactcgctgttttgttcggtggcttacagtgtgctggaacagtcggatgaagatgaaggatgggacgagtattaa

SEQ ID NO: 460822 - DNA, 693 bp, Shigella boydii
gtggtgggcctgttcccggcaaaccgtgtgggcgatgacattgaaatctaccgtgacgaaacgcgcacccatgtgatcaatgtcagccaccatctgcgtcaacagaccgaaaaaacgggattcgctaactactgtctcgctgacttcgttgcgccgaagctttctggtaaagcagattacatcggcgcatttgccgtgactggcgggctggaagaggacgcactggctgatgcctttgaagcgcagcacgatgattacaacaaaatcatggtgaaagcgcttgccgaccgtttagccgaagcctttgcggagtatctccatgagcgtgtgcgtaaagtctactggggctatgcgccgaacgagaacctcagcaacgaagaactgatccgcgaaaactaccagggcatccgtccggcaccgggctacccggcctgcccggaacatacggaaaaagccaccatctgggagctgctggaagtggaaaaacataccggcatgaaactcacagaatctttcgccatgtggcccggtgcatcggtttcgggttggtatttcagccacccggacagcaagtactacgccgtggcgcaaattcagcgcgatcaggttgaagactatgcccgccgtaaaggtatgagcgtctcagatgttgagcgctggctggcaccgaatctggggtatgacgcggactga

SEQ ID NO: 460823 - DNA, 534 bp, Shigella boydii
atgatgcacttaaaaaacattactgctggcaaccctaaaacaaaagagcaataccagctaacaaagcaatttaacatcaaatggctttattcagatgatggaaaaaactggtatgaggagcaaaagaatttccagccagacactttgaaaatggtctatgaccataacggcgttattatttgtattgaaaaggatgtttcagcaattaatccggaaggcgcaagcgtcgttgaattacctgatattacagcaaatcgccgggctgatatttcggggaaatggttgttcaaagatggcgtagtgataaagcgaacttataccgaggaagagcagaggcaacaagcggaaaatgaaaagcaaagcctgttgcaacttgtcagggataaaacccagctatgggactcacagctacggctgggcatcatttccgacgagaataaacaaaaattaaccgagtggatgctctatgcgcagaaagtcgaatctacagacacctccagcctgccagtaacgtttcccgaacaaccagaatga

SEQ ID NO: 460824 - DNA, 564 bp, Shigella boydii
atggcacatggtataacgtcgcacaggtgtaaattatgcagcatattaaaaaatattaagtccggaaatccaaaaacaaaagaacaatatcagctaacaaagaattttgatgttatctggttatggtccgaagacggtaaaaactggtatgaggaagtaaataactttcaggacgacaccataaagattgtatacgacgaaaataatattattgttgccataaccaaagatgcctcaacgcttaatcccgaaggctttagtgtcgttgagattccagatataacagccaatcgtcgcgccgatgattcagggaagtggatgtttaaggacggaactgtggttaagcggatttatacagcagacgaacagcaacaacaggccgaatcacaaaaggtcgcgttgctttctgaagctgaaagcgttattcagccactggaacgcgctgtcaggctgaatatggcgatggatgaggaacgcacacgactggagtcatgggaacgctacagcgttctggtcagccgtgtggatacagcaaatcccgaatggccacaaaagcctgagtaa

SEQ ID NO: 460825 - DNA, 837 bp, Shigella boydii
gtgcaaaaaaatggcgataccttgtccggtgggcttacttttgaaaatgactcaatccttgcctggattcgaaatactgactgggcgaagattggatttaaaaatgatgccgatggtgacactgattcatacatgtggtttgaaacaggcgacaacggcaatgaatatttcaaatggagaagccgccagagcaccacaacaaaagacctgatgacgctgaaatgggatgcactaaatattcttgttaatgctgtcattaatggcagtcttggagttggttcgacgaatgcgttaggtggtagctctattgttcttggtgataatgacaccggatttaaacagaatggagacggtattctggatgtttatgctaatagtcagcgtgtattccgctttcagaatggagtggctattgcttttaaaaatattcaggccggggatggtaaaaaattcacgctatccagctccaacaacttcacaaagaatgcaacgtttaatttatggggtgcttcaacccgtccagtagttgcagagttaggcgatgaggcaggatggcatttctatagccagcgaaatacagataactcggtaatattttctgttaacggtcagatacagcccagcaactgggggaattttgattcacgctatgtaaaagatgttcgcctgggtacgcgtgttgttcaattgatggcgcgtggtggtcgttatgaaaaagccggacacgcaattaccggattaagaatcattggtgaagtagatggcgatgatgaagccatcttcagaccaatacaaaaatacatcaatggcacatggtataacgtcgcacaggtgtaa

SEQ ID NO: 460826 - DNA, 645 bp, Shigella boydii
atggccgtttctggcctgcatggcatgatttgcgcttttggacgggagattcagtgtgctgattggctatgtaagggtatcaacaatacagacctgcaacgaaacgctcttgtttgtgcaggatgtgaacaaatatttgaagataaattaagcgggacaaagacagaccgaccgggattaaaacgcgctttaaagcgccttcaaaaaggtgacacgctggttgtctggaaactggatcgcctcgggcgaagcatgaaacatctgatttctctcgtcggggaactacgggagcgagggattaattttcgcagtctgaccgacagcatagacacatcttctccaatggggcgttttttcttccacgtgatgggtgccctggctgaaatggaacgtgaattaattgttgaacgtacactggccgggctggcggcagcgcgcgcaagggggcgcacaggcggacgtcgaccgaagctgacaaaagaacagcatgagcaaatagcaaggctaatcaaaaacgggcacgacagaaaacaactggcaataatttacggcattggcacatcgacgatttatcgttatcaccctgtaggcgatatacagactgaagaaacaaccgggcagactcaggaaaatgaaaaccgctaa

SEQ ID NO: 460827 - DNA, 489 bp, Shigella boydii; identical to SEQ ID NO: 7427

SEQ ID NO: 460828 - DNA, 2808 bp, Shigella boydii
atgaagactcttgatatccgggtcgctttcagcgccgttgacaggctgacccggcctgccgaaaacgcccgccgcctgatggggcagtttggtgactccatccagcgaacgcagggggcgatcaaaaatctcgagcgtcaggcgcgatcatttgagcgcgcccgtgacgctgtcagtaaagcggatgcgggcatcgtgaaagcacgacgccagcttaacgcccttaatcagttacaacgcacgggtacagtgctcagcgaaaaacaacaaaagctgatgcagcagttaagcacccggcttgaacgcctgaatgaatcgcgcacacgggaaattcagaaaatgcgggagcttggcggagagctgaaacgccacggcatttccctgacaggcagcgataacaccatccagcaggccatcagacgcaccgaacagtacaacaaccagcttgaacgcgaacggcaggcgcttgcgcgtgtaacacgggcgcgtgagcggtattcgcgcgcgcaggaaacagcgggaaaactgaaaacaggtggtgcgctggcaattggtgcggcagcggcgggcggctatgctgccgggcgttttttgcagcctgcgatcgggttcggcaaagagatgttccgcgttcaggcactgacgcgaatcgaccagaacagcccgcagtttaaggcgctgcgtgagcaggcgttaaaacttggctctgaaacgcagttcaccgcaggcgatgccgccagtggacaggcatttcttgcaatggctggctttacaccacaggccattcaggctgcgctccctggcgtactgagcatggcaacggctggcggtatggacctcggtgagacggcggatattggctcaaatattctgacgcagttcggtctttctgctgaccagatggaccgggtcggcgacacactcaccgcagcgtttacccgtaccaacactgaccttcgcgcactgggtgaaaccatgaaatatgcaggtccggtggcgggtaagctgggaatatctctggagcaggccgcagcgatggcgggcgtgctggcgaatatgggtatcagggggagtgatgctggtacggcaatgcgtgccagcctggctcgtctggcatcaccgccaaaggcggcagcagaggcgctgaaagagcttggcgtgtctgtctcggatgccgggggcaaaatgcgcccgatggaggatgtgctggctgacctttataaagctacccgcaaatacggggaagttgaccgggtatcgttctttaaggacattgccggagaagaggctttcacatcatttatggccctcgttgatgcggcaggtgacggctccttacccaaactgagaaaagaacttgaaggcgcgcgcggtgaggctgaacgcacggcaaaggttatggccaacaaccttgacggcgatctgaaatcactcagcagtgcatgggaagggttgcgcatccgcattgcagatctgattgacggtccgctgcgttctgtcacgcagtggctcacgcgtgtggtatcaaaggtgacggcgctggcgcaggcccatcccgcactgacgcgccagctactgattgcaggcggtgcattgctggcaatgactgcaacggttggctcgttgtcgctggctattggtgtgcttgctggcccgctggcaaaactgcgtcttggtttttccctcctgaccggatcaatgaatgctgtcagggttctgccagcactatggggaatggtgacgggttccgtttctttactgggaggcgctatcggggcgttgttcagtccggttggtcttatcgtggctgcgcttgccggagctgccgttcttatctggaaatactgggatcccatcagggcattttttgccggggtgttcagcgggattatggaaaggctgaccccgttgcgcgaaacatttgaacggtttggtcctgtttttgacgcaatcgggagtgggatcagccaggtgtttaactggtttaaatcgctgctgtcaccgatggagtccagcaaggaaactctggataaatgtaccagtgctggcgagatattcggtaacgttcttggcggtgcgttacaacttgttctgacacctgcaaaaatgttgctggatacgctggcgtggatacttgaaaagcttggtgtgcttccggatgaagcggaaagggcgcgcaagaaaatcgaagacgcacagcgtgcggccattcttcaggacaaggttgccttgcttcagggggacctggcgaaaatcaatccgccgaagcctgtggaaaatggcaatggcaccggaggtgataaccccaaagacaataaaccgctcacagacagcaataccggtacgctgcgcagactcagcaaaattgctgataacacaggtaagctggttgaggagacgaaaaaacgcattggccccggcgatattgtctttaaaaacctgccccgagcacttgctgttcgtggggagtggcaggagcggaagattgcgcaggtcagtaagcctgcccccgcaattaatatcacacccgtggttccggctccgctgcctccggcgctggtccctgttgttgcggccagctcccgcccggtggcggaggctatacgatctccagtggcatcagttcctgtaacttcccgtaaccgggagcctgttgcctccggatttggtggtgaaattcatgttcatctgcataacgttgttacgcagaatccccgcgaactggcgaaactggtcggtgaaatggtcagggcagaaatggaacggcgcgcccgtgccgggcgtggctgtttttacgataaagattga

SEQ ID NO: 460829 - DNA, 375 bp, Shigella boydii
atgaaagacatcgatactgaaacccggaataacaccgtggcggataatgtgacggcagttgaggatatggctgtcgaacgtggcgtaaaactgacccgaccaattgagcgtggtggcgaaaaaatcacgtatgtggagatcaccggggctattgagcaggctggatccctgcgtggtctgtcgctgtctgatgtgctgaatctgaaagcggataccatgttcacgctgttgcctcgcgtgacctcgccacgactggatgaagtgatgattaaaaaaatgtcgtcacgcgattttattcagttgtgcgctgtggctgtaaattttatgagcgagccagactctggcgcgaagagcgtgcaggagacggcagcgtaa

SEQ ID NO: 460830 - DNA, 342 bp, Shigella boydii
gtggctgagataaaaacgctgcatctggtcccgcgtgaagggatgcaggtgagtgagaaaccgtcggtggcgagggtacggtttggtgacggttatgaacagcgccgcccgacgggacttaatgcccgactgaagacgtttcaggcggtgttccgggtgacggatgaggcgacccggcgatggctggaagagtttttatcgtggcatggtggttaccgtgcctttttgtggcgaccgccgaaacataaccggacggtgagggtggtatgccgggagtggagcgtcacagataacgccaggtacagtgatttcagttgtacgattgagcaggtggtgaactga

SEQ ID NO: 460831 - DNA, 1503 bp, Shigella boydii
gtggcgttaattcgtcagcaggcggcagagcagaataaggtgtaccagtccatgctggttatgaacggtcagcatacggaattcaaccgtctgctggggctgggtaatgaactgcttcagcagcggcagggactggtgaatgtgccgttacggctgccacaggccactctggatgataaacagcagagtgccctgacaaaaacagagcgtgtccgactggggtatgcggcggatgacctcggttttgtgggtgatccgtatcaggaggcgagacaacgttatatcagtaatgccctggaagcctggcgcaataacgaggcgaataaacccaaatcccggggtggaaaatcagagacggaaaaagcggaagacagtttttcccggctgctgaagcagcagaaagagcaactggcactggcggggcagaatacagagctggcgaagctgaaataccagactgcgcagggcgaactgaaaaccctgacggagatgcagaagcaggaactgctgcgcaatgcggccctgattgaccagcaaaaaatccgggagcagttgcggtcccgggaagagaccctgaagaatgataatgtggctgcgcgtgcatcaaatgaagcggaactgctggggtacgggcagggagagcggctccgtgaacgcatgcgggagttgcagcagatccgcgacagtttccgccagaaggatgcggaccttcagtctcagtatcagaccggggatatcagtgaggatttttacagacaggctctggcacagaacgcgcagtatctgagtgaacgtctgaaagagcaggaagccttttatgccgaatcggatgtgcagcgtgcggactggcagaaagggctgcaggagggattcagtaactgggtggataatgcgtccgattacgcctcacaggcagtaccgcttgcgacggagggtatctcagggatggtgaataacatcacggagatgctgaacggaaataaagtggaatggcgcagctgggcctcatcagtgctgcaggaaatatcaaaagttcttatgaatgccgcgattgtcaacgggatcaagacggcggcaaacagtatgtccggagcgggaggatttatcggcagtattggtagctggctgggcggtgcggtggccaatgcaaaaggcggtgtgtatacctcggcaaacctgagtgcgtacagcaacagtattgtggatacgcccacgtactttgcctttgcaaaaggggcgggactgatgggggaggccggtcctgaagccattatgcccctgacccgggcggcggatggctcgctgggtgtgcgagcggtgggcagtatgaacggcagtgcaggtctggtgtattccccggtctaccatatcgccattcagaatgacgggactaatggccagatagggccggaagctgcgggcagccttgtgcaactgattgaccagcgggtgcaggcggtgatgctgtccatgcgacgtgacggaggaatgctgagtggctga

SEQ ID NO: 460832 - DNA, 1470 bp, Shigella boydii
atgggcagtgaatattaccggaccctacagaatggcggacgtcatgccgctgctgccgcacgggaacagcgccgcgcccttgcagaactgaacagtcagttgacggaaattcgcggttctgctgtcggaatggctggcgcatttgccggtgcctttgccaccggacacctgatttcgctggccgatgagtggggttccgtgaatgcccgtctgaaacaggcatctcagtcatcggatgaattctcgtcatcacagaaagtgctgatggatatcagtcagcgaacaggtaccgcgttttcggataatgcggccctgtttgcccgttcggctgcctcgatgcgtgaatatggttacagtgctgatgatgtgctgaaggtgacggaggccatttcgacaggactgaaactgtcaggggctggagttgcggaatccggttcggtgatcacccagttcagccaggcactggcacagggtgtactgcgtggcgaagaatttaatgctgttaacgaaaatggcgaccgggtgatccgcgcgcttgctgcggggatgggtgtggcccgtaaagatctgaaggcaatggcggatgacggaaaactgacagcggataaagtggtccctgcgttaatcagccagctggggatattacgtgatgaatatgcggccatgccggaaacggtttccggtagtatcacgaaggtggaaaacgcctttatggcctgggtgggcgaagtgaatgaggcctgcggggtgacaaaaacgctctccggcgtgctgaacggtgttgccggacagattgataatgtggcaacagctgtgggggcgctggttgccgtcggggttgcccggtactttggcaatatggcctccggagcgatgtctgccacggcaggacttgtgacggctgcacgtaatgaagttgcactggcggaagcacagttcaggggaacgcagattgccacggcgcgggcaagggcagccgtgtaccgtgctcagcaggccgtggcggcagcccgcgggacggagatgcagattgctgcagaggcccgtctggcggccacacaggaacgcctgaacagaaatattgctgccagaagcgccgcccagaatgcgctgaacagtacaacggcggtgggctcacgtctgatgagcggtgcgctggggctggttggtggcgtacccggactggtgatgctgggggctgcagcatggtacacgctgtaccagaatcaggagcaggcctgggagtctgcgcgccagtatgcactgacgatagatgaaatcgcgcataaaacgccgtcaatgtctttgcctgaagcctcagataatgaaggacgaacacgggcggcgctgacagagcagaaccggctgattgatgaacaggctagtcgggtgaaatccctgcaggaaaaaatcgcagaatatcagtatgttctggcgaacccgggctggacgaccgtcgtgtggcgttaa

SEQ ID NO: 460833 - DNA, 330 bp, Shigella boydii
atgtcaaaaccccgatggaccattgaacagaaaaggcagcacgttgctgcctggcgcgccagtggtcttacacgtcagcaatactgtgaactcaacgatattcccttcacatcacttcgcgaatggccgcaggatgtcgcaaaagctgaacgccgggcaaatgaaccgaccgttcttcccgttcatattgcgccaccactgcatgctgatgtaccacagcccgtcacgaatgagccagtcacgctcttccttcccggtggagtacggatgtgctgtcagccgtcacaacttaccgatgtcttcagggcactcaaatatgctcagtcctga

SEQ ID NO: 460834 - DNA, 393 bp, Shigella boydii
atgctcagtcctgataatgtcttcatcgcaattaaacctgttgacatgcgccggggcatcgactcactgacgcagtatatacaggatgaactccggtcgacatggcatgagggagccgccttcgtctttgttaacaaagcccgttcgcgtatcaaagttctccggtgggataaacacggggtgtggttgtgtacccgccgtctgcacaaaggcagcttccgctggccacgtgcaaatgacgctgcctggcacctcactcccgacgagtttaactggctgattgccggtgttgactggcagcaggttaagggacatgacctgacgaaatgggtctggctgaatgaacctgaactgcgccctgaaaacacgcaaaatacactgctaactcagtga

SEQ ID NO: 460835 - DNA, 1602 bp, Shigella boydii
atgaatatccgtatctggagtggtatactcccctgtatggatatctccgctctcaacaccacgaatgacatcgaaaaactgcgtgctatggcacttgccatggtacaagaagtcatgtcggagaatgccgaaaaagagcgggaattactggagaaaagccggcgcatccagcttctggaagaaatgctgaaactggttcgtcaacagcgcttcggaaaaaaatgtgaaacgctggctggtatgcaacgctccctattcgaagaggatgttgatgccgatatcgccgcgcttaccgcacatctggataaactgctcccgcaatcccctgaagaagatgaaaaagcgtcccgttcacgcccgatacgcaaacccttaccggttcatcttccacgggtggaaaaaattatccagccggacactgaccattgccctgaatgtgacgagccgctgcactatatccgcgatgcggtgagtgaaaagctggagtatattcccgctcactttgtggtgaaccgttatgtccgtccgcaatacagttgtccctgttgccagaaggtgttcagcggtgaaatgccggcacatatcctcccgaaaagtgccgttgagccatcagtcatcacacaggtgatcatcaataaatacggtgaccacctgcctctgtatcgccagcaacaggtctttgcccgttcagatgtcgggctgcccgtcagttcgatggctgacatggttggcgcggcgggtgccgcattatctcccctggcggcgttactccatcgcgagttgataaaccgtccggtggtgcatgcagatgagactaccctgaagatcctgaacacgaagaaaggcggtaaatcctgctccggttatctgtgggcatacgtcagtggagaaaggacgggaccgtcagttgtgtgcttcgactgccggaccggacgtagccatgagtatcctgaaaactggcttcagggctggggcgggacgctggttgtcgacggacataaagcttaccggactctggcaaacaaagtgccggagatcacgctggccggatgctgggcccatgcccgcaggggcttcgccgacctgtataaaatcagtaaagatccacgggctgccatagccgtgaagaaaatcgcggggttgtaccgtcttgagaagaagatcagtagccgccccgtggaaaaaatccgccagtggcgacagcgttatgcccgtccgatactggaagaactgtggtcatggcttgaagagcaggaaccgcaatgttctccgggaaaggcattacacaaagccattgcctatgcgctgtctcatcgcgtggaactgagccgcttcctggaagatggtgcggtgccgctggataataatgtgtgtgaacgggccatcaaaaacgtggttctgggcagaaaatcgtggctgttcgccggttcgcagatggcgggagaacgcgccgcgcaaataatgagcttgctggaaaccgcgaaacgcaacggtctggagccgcatgcctggttgacagacgtcctgatgcgtctgccggagtggccggaggagcgactggcagagttgctgcctcttgagggatttaccttctccgggtga

SEQ ID NO: 460836 - DNA, 261 bp, Shigella boydii
atggcgacgttacgtgaactgattatcaaaattgtaagcttccggggaactcatattgacgcatttttcaggcgcgcgtcatcggcggcgcatacgaacgctcgtggtttgataacggttgatttattttgttgcacagaggcgatcgccaggcaggtaccggaggcgggctctgaagtactgagtagcgtgatcgcgtcaggccgcgaagtactgactcggggattaattgcaggtgatgatgtactgacccgggaatga

SEQ ID NO: 460837 - DNA, 282 bp, Shigella boydii
atgcgacttgcgctccgtctggggcgcaccttatccgaactgcgccacagcctgagtgcgagcgaggcgatgatgtggatggagttcgacaggatatccccgctgggtgatgagcgcggggatatccgtaatgcacagatcgtgaaagcggttttcggggcacaggggatgaatgttgcactgaaggacgtcatgctctgctggggcgaggatgaggataagccggaggtggatccgtttgcggcgctggaagacgcgctgagctttgcagcacagtcatga

SEQ ID NO: 460838 - DNA, 375 bp, Shigella boydii
atgaaaaaggatctgaaaacgctggcgctggccagactgtcagggtttcgtcataaaacggtgaaggtgccggaatgggggaatgtcagcgtggtgctgcgggagccttcggcagaggcctggtatctgtggcaggaagtgctcaatggtgatggagaggatgacgataccctgtcggtggtggcgaaaccccgccgtaacctggaagcggatgtgacgctgttctgcgatgtcctgtgtgatacggacctgcagcgggtgttcactccggacgaccgtgagcaggtgctggccgtctatggtccggtacatgcccggttgctgcgtcaggcactggaactgatcgctgatgcagagtcggccagaaaaaagtag

SEQ ID NO: 460839 - DNA, 405 bp, Shigella boydii
ttggagtcattacctaaattcctggcggaagtgcgtcagcacacctggtcatccggtaccaacggtgtggtggctgcaacgttctcactgcgtctgaaaggcaaaccggtgtcctttgtggtaccgctggcgtttgtgaaaaatctggataagacacttaccgtgaataccggtgcgctgctgacaatgtcagtcagtgccaacgggggaatgccgccgtataaatacgcctggaagaaggatggtcagccggttgacgggcagacgacagacaccttcagtaagccaggtgcgcagtccgctgatgcggggaaatatacctgcgtggtgaccgattcggcagagaaagcacagagtgtgacgtctgttgaatgcaccgtgacagtgagcgcagctgccggataa

SEQ ID NO: 460840 - DNA, 207 bp, Shigella boydii
atgctgtgctgcacggcgcaggcaaacgaccataaactcctcggcgtcattgcaatgccgcgtaacgaaaccaacgatctggcgctgaaacttcctgtttgtcgcattgtgaaacgcatacaactctctgccgaccatggcgatttacagttaagcggtgcatcggtttatttcaaagccgcccgggtaatgctgccaacttactga

SEQ ID NO: 460841 - DNA, 1917 bp, Shigella boydii
atgggtaaaataattggtatcgacctgggtactaccaactcttgtgtagcgattatggatggcaccactcctcgcgtgctggagaacgccgaaggcgatcgcaccacgccttctattattgcctatacccaggatggtgaaactctggttggtcagccggctaaacgtcaggcagtgacgaacccgcaaaacaccctgtttgcgattaaacgcctgattggccgccgcttccaggacgaagaagtacagcgtgatgtttccatcatgccgttcaaaattattgctgctgataacggcgacgcatgggtcgaagttaaaggccagaaaatggcaccgccgcagatttctgctgaagtgctgaaaaaaatgaagaaaaccgctgaagattacttgggtgaaccggtaactgaagctgttatcaccgtaccggcatactttaacgatgctcagcgtcaggcaaccaaagacgcaggccgtatcgctggtctggaagtaaaacgtatcatcaacgaaccgaccgcagctgcgctggcttacggtctggacaaaggtactggcaaccgtactatcgcggtttatgacctgggtggtggtactttcgatatttctattatcgaaatcgacgaagttgatggcgaaaaaaccttcgaagttctggctaccaacggtgatacccacctgggtggtgaagacttcgacagccgtctgatcaactacctggttgaagaattcaagaaagatcagggcattgacctgcgcaacgatccgctggcaatgcagcgcctgaaagaagcggcagaaaaagcgaaaatcgaactgtcttccgctcagcagaccgacgttaacctgccgtacatcactgcagatgcgaccggtccgaaacacatgaacatcaaagtgactcgtgcgaaactggaaagcctggttgaagatctggtaaaccgttccattgagccgctgaaagttgcactgcaggacgctggcctgtccgtatctgatatcgacgacgttatcctcgttggtggtcagactcgtatgccaatggttcagaagaaagttgctgagttctttggtaaagagccgcgtaaagacgttaacccggacgaagctgtagcaatcggtgctgctgttcagggtggtgttctgactggtgacgtgaaagacgtactgctgctggacgttaccccgctgtctctgggtatcgaaaccatgggcggtgtgatgacgacgctgatcgcgaaaaacaccactatcccgaccaagcacagccaggtgttctctaccgctgaagacaaccagtctgcggtaaccatccatgtgctgcagggtgaacgtaaacgtgcggctgataacaaatctctgggtcagttcaacctggatggtatcaacccggcaccgcgcggcatgccgcagatcgaagttaccttcgatatcgatgctgacggtatcctgcacgtttccgcgaaagataaaaacagcggtaaagagcagaagatcaccatcaaggcttcttctggtctgaacgaagatgaaatccagaaaatggtacgcgacgcagaagctaacgccgaagctgaccgtaagtttgaagagctggtacagactcgcaaccagggcgaccatctgctgcacagcacccgtaagcaggttgaagaagcaggcgacaaactgccggctgacgacaaaactgctatcgagtctgcactgactgcactggaaactgctctgaaaggtgaagacaaagccgctatcgaagcgaaaatgcaggagctggcacaggtttcccagaaactgatggaaatcgcccagcagcaacatgcccagcagcagactgccggtgctgatgcttctgcaaacaacgcgaaagatgacgatgttgtcgacgctgaatttgaagaagtcaaagacaaaaaataa

SEQ ID NO: 460842 - DNA, 1131 bp, Shigella boydii
atggctaagcaagattattacgagattttaggcgtttccaaaacagcggaagagcgtgaaatcaaaaaggcctacaaacgcctggccatgaaataccacccggaccgtaaccagggtgacaaagaggccgaggcgaaatttaaagagatcaaggaagcttatgaagttctgaccgactcgcaaaaacgtgcggcatacgatcagtatggtcatgctgcgtttgagcaaggcggcatgggcggcggcggttttggcggcggcgcagacttcagcgatatttttggtgacgttttcggcgatatttttggcggcggacgtggtcgtcaacgtgcggcgcgcggtgctgatttacgctataacatggagctcaccctcgaagaagctgtacgtggcgtgaccaaagagatccgcattccgactctggaagagtgtgacgtttgccacggtagcggtgcaaaaccaggtacacagccgcagacctgtccgacctgtcatggttctggtcaggtgcagatgcgtcagggtttctttgccgtgcagcagacctgtccacactgtcagggccgcggtacgctgatcaaagatccgtgcaacaaatgtcatggtcatggtcgtgttgagcgcagcaaaacgctgtccgttaaaatcccggcaggggtggacactggagaccgcatccgtcttgcgggcgaaggtgaagcgggccagcatggcgcaccggcaggcgatctgtacgttcaggttcaggttaaacagcacccgattttcgagcgtgaaggcaacaacctgtattgcgaagtcccgatcaacttcgctatggcggcgctgggtggcgaaatcgaagtaccgacccttgatggtcgcgtcaaactgaaagtgcctggcgaaacccagaccggtaagcttttccgtatgcgcggtaaaggcgtcaagtctgtccgcggtggcgcacagggtgatttgctgtgccgcgttgtcgtcgaaacaccggtaggcctgaacgagaagcagaaacagctgctgcaagagctgcaagaaagcttcggtggcccaaccggcgagcacaacagcccgcgctcaaagagcttctttgatggtgtgaagaagttttttgacgacctgacccgctaa

SEQ ID NO: 460843 - DNA, 210 bp, Shigella boydii; identical to SEQ ID NO: 263769

SEQ ID NO: 460844 - DNA, 1167 bp, Shigella boydii
gtgaaacatctgcatcgattctttagcagtgatgcctcgggaggcattattcttatcattgccgctatcctggcgatgatgatggccaacagcggcgcaaccagtggatggtatcacgactttctggagacgccggttcagctccgggttggttcactcgaaatcaacaaaaacatgctgttatggataaatgacgcgctgatggcggtatttttcctgttagtcggtctggaagttaaacgtgaactgatgcaaggatcgctagccagcttacgccaggccgcatttccagttatcgccgctattggtgggatgattgtgccggcattactctatctggcctttaactatgccgatccgattacccgcgaagggtgggcgatcccggcggctactgacattgcctttgcacttggtgtgctggcgctgttgggaagtcgtgttccgttagcactgaagatctttttgatggctctggctattatcgacgatcttggggccatcattatcatcgcattgttctacactaatgacttatcgatggcctctcttggcgtcgcggctgtagcaattgcggtactcgcggtattgaatctgtgtggtgtacgccgcacgggcgtctatattctggttggcgtagtgttgtggactgcggtgttgaaatcgggggttcacgcaaccttggcgggggtaattgtcggcttctttattcctttgaaagagaagcatgggcgttctccagcgaagcgactggagcatgtgttacacccgtgggtggcgtatctgattttgccgctgtttgcatttgctaatgctggcgtttcactgcaaggcgtcacgctggatggcttgacctccattctgccattggggatcatcgctggcttgctgattggcaaaccgctggggattagtctgttctgctggttggcgctgcgtttgaaactggcgcatctgcctgagggaacgacttatcagcaaattatggcggtggggatcctgtgcggtatcggttttactatgtctatctttattgccagcttggcctttggtagcgtagatccagaactgattaactgggcgaaactcggtatcctggtcggttctatctcttcggcggtaattggatacagctggttacgcgttcgtttgcgtccatcagtgtga

SEQ ID NO: 460845 - DNA, 900 bp, Shigella boydii
atgtctcatatcaattacaaccacttgtattacttctggcatgtctataaagaaggttccgtggttggcgcagcggaggcgctttatttaactccacaaaccattaccggacagatccgggctctggaagagcgcctgcaaggcaaattatttaagcgcaagggacgtggtctcgaacccagcgagctgggagaactggtctatcgctatgccgataaaatgttcaccttaagccaggaaatgctggatattgtgaactatcgcaaagaatccaatttattgtttgacgttggcgtggctgatgcactttccaaacgcctggtcagtagcgtgctgaatgctgcagtggtagaaggcgagccgattcatcttcgctgcttcgaatccacccacgaaatgctactggagcaattaagccagcataaactggatatgatcatttccgactgtccgatagactctacgcagcaggaaggcctgttctccgtgagaattggcgaatgtggcgtgagtttctggtgtacaaatccaccaccagaaaaaccgttcccggcttgtctggaagaacggcgacttttgattcctgggcgacgttcaatgttagggcgcaaattgcttaactggtttaactcccagggattaaacgtagaaatcctcggcgagtttgatgatgccgcgttgatgaaagcttttggtgcaatgcacaatgcaatcttcgttgccccaacgctttatgcatatgacttttatgccgataaaactgtcgtagaaattggtcgcgtcgagaatgtgatggaagagtaccatgctatttttgctgagcggatgattcagcacccggcggtacagcgaatctgcaatacggattattctgcgctttttagtccagcggcgcgttaa

SEQ ID NO: 460846 - DNA, 426 bp, Shigella boydii
atgacctgtggttttgaagatcaatccatcgacactggacgatttgtactgtctcgtatcaataatgaaaattatcagtttcatcatataagatttgactgcatccagggcgagcaaggtgaattagtttttgaacccagtgatgttgaatattactttgaaccagtgacgatacaggagtcaggaaccagcatattaaaaaatgagttagaaaacagtgaggacggtgcgggtcaagtaggctttcaactctccaatgatggtacgaatgaaatccagtatggtaaaagcaattactactcttttcagcatccccatgaaggaagtaatcagattcctctatttattcgcccgcgtacatatggaaataatgtctcaagcgggcaaataatgagccgagtcaaaatcgtggttatgtacaactaa

SEQ ID NO: 460847 - DNA, 1599 bp, Shigella boydii
atgcgtaaaacagtagcttttggctttgtcggaacggtgctggattatgccgggcgcggcagtcagcgctggtcaaaatggcgtccgacactctgtttatgccagcaagaatcgttggtcatcgatcgactggaattattgcatgacgcccgctcgtgctcgctatttgaaacgcttaaacgcgatatcgccagcgtttcgccagaaacagaagtggtgagcattgagattgaactgcataacccgtgggatttcgaagaggtttacgcctgcctgcatgatttcgcccgtggttacaagtttcagccagaaaaagaagactatttaattcacatcaccaccggcacccacgtcgcgcagatttgctggtttctgctggcggaagcgcgttatctacccgcccggttgatacaaacttcaccaccgcgcaaaaaagaacaaccgcgcggtgccggtgaagtgacgattatcgatctcgatctaagccgttataacgccatcgccagccgctttgccgaggaacgccagcaaacgcttgattttcttaagtccggcattgccacgcgtaacccccacttcaaccgcatgattgagcagattgaaaaagtggcgattaaatcccgcgcaccgatcctgcttaacggcccaaccggtgcgggaaagtcatttctggcgcgacgtatatttgaattaaaacaggcgcggcatcagtttagcggcgcgtttgtggaagtgaactgcgccaccctgcgcggcgataccgccatgtcgacgctgtttggtcatgtgaaaggcgcgtttaccggggcgcgggaatctcgtgaaggtttattacgcagcgccaacggcggaatgttgttttttgatgagattggcgaactgggcgcagacgaacaggcaatgctgctaaaagccattgaagagaaaaccttttacccgtttggcagcgatcgccaggtgagcagtgattttcagcttatcgccggaacggtgcgcgatttgcgccagctggttgccgaaggcaaatttcgcgaagatctgtacgcgcggatcaatctctggaccttcaccctgccgggtctacgccagcgccaggaagatattgaaccgaaccttgattatgaagtggagcgccacgccacactcactggcgacagcgtgcgttttaacaccgaagcgcggcgcgcctggttggcttttgcgacctctccccaggcaacatggcgcggtaactttcgcgaactttctgccagcgtcacgcggatggccacctttgccactagcggacgcatcactctggacgtggttgaagatgagataaaccgtctgcgctataactggcaggagagccgcccctccgcgcttacggcgttgctgggcgcagaggcagaaaacatcgatctcttcgaccgtatgcaactggaacacgttatcgctatctgccgccaggcaaagtcgctttctgcagccggacgacagctttttgatgtttcgcgccagggcaaagccagcgtcaatgacgcggatcggctacgcaaatacctggcgcgttttggtctgacgtgggaagccgtgcaggatcagcacagctccagttga

SEQ ID NO: 460848 - DNA, 759 bp, Shigella boydii
atgaaacaaacacaacgtcacaacggtattatcgaactggttaaacagcagggttatgtcagtactgaagagctggtagagcatttctccgtcagcccgcagactattcgccgcgacctcaatgagctggcggagcaaaacctgatcctgcgtcaccatggcggtgcggcgctgccttccagttcggttaacacgccgtggcacgatcgcaaagccacccagaccgaagaaaaagagaggattgcccgcaaagtggcggagcaaatccccaacggctcgacactgtttatcgatatcggcaccacgccggaagcggtggcgcacgcgctgcttaatcacagcaatttgcgtattgtcaccaacaatctcaatgttgctaacacgttgatggtaaaagaagatttccgcattattctcgccggtggcgaattacgcagccgcgatggcgggatcattggcgaagcgacgctcgattttatctcccagttccgccttgatttcggcattctggggataagcggcatcgatagcgacggctcgctgctggagttcgattaccacgaagttcgcaccaagcgcgccattattgagaactcgcgccacgttatgctggttgtcgatcactcgaaatttggccgtaacgcgatggtcaatatgggcagcatcagcatggtagatgccgtctacaccgacgccccgccgccagtaagcgtaatgcaggtgctgacggaccatcatattcaactggagctgtgctga

SEQ ID NO: 460849 - DNA, 831 bp, Shigella boydii
atgttgatgattacctcttttgctaacccccgcgtggcgcaggcgtttgttgattacatggcgacgcagggtgttatccttacgattcaacaacataaccaaagcgatgtctggctggcggatgagtcccaggccgagcgcgtgcgggcggagctggcgcgttttctcgaaaacccggcagatccgcgttatctggcggccagctggcaggcgggccataccggcagtggtctgcattatcgccgttatcctttctttgctgccttgcgtgaacgcgcaggtccggtaacctgggtggtgatgatcgcctgcgtggtggtgtttatcgccatgcaaattctcggcgatcaggaagtgatgttatggctggcctggccattcgatccaacactgaaatttgagttctggcgttacttcacccacgcgttaatgcacttctcgctgatgcatatcctctttaacctgctctggtggtggtatctcggcggtgcggtggaaaaacgcctcggtagcggtaagctaattgttattactctcattagcgccctgttaagcggctatgtgcagcaaaaattcagcgggccgtggtttggcgggctttctggcgtggtgtatgcgctgatgggctacgtctggctacgtggtgagcgcgatccgcaaagtggcatttacctgcaacgtgggttaattatctttgcgctgatctggattgtcgccggatggtttgatttgtttgggatgtcgatggcgaacggagcacacatcgccgggttagccgtgggtttagcgatggcttttgttgattcgctcaatgcgcgaaaacgaaaataa

SEQ ID NO: 460850 - DNA, 327 bp, Shigella boydii
atggatctgttcgaatgtattaacgttgccgacgcgcaccagaagttgcaggaaaaagaggcggtgctggtcgatattcgcgatccacagagtttcgcaatgggacatgcggtgcaggctttccatttaaccaacgacacgctgggcgcgtttatgcgtgataacgactttgacactccggtgatggtgatgtgttatcacggcaatagtagcaaaggcgcggcgcagtatctgctgcaacagggctacgatgtggtctatagcattgacggcggttttgaagcctggcagcgtcagtttcccgcagaggtggcgtacggcgcgtaa

SEQ ID NO: 460851 - DNA, 1506 bp, Shigella boydii
atggaaaccaaagatctgattgtgataggtggcggcatcaatggtgctggtatcgcggcagacgccgctggacgcggtttatccgtgctgatgctggaggcgcaggatctcgcttgcgcgacctcttccgccagttcaaaactcattcacggtggcctgcgctaccttgagcactatgaattccgcctggtcagcgaggcgctggctgaacgtgaagtgctgctgaaaatggctccgcatatcgccttcccaatgcgttttcgcctgccacatcgtccgcatctgcgcccggcgtggatgattcggattggtctgtttatgtacgatcatctgggtaaacgcaccagcctgccgggatcaaccggtttgcgttttggcgcaaactcagtgttaaaaccggaaattaagcgcggattcgaatattctgactgttgggtagacgacgcccgtctggtactcgccaacgcccagatggtggtgcgtaaaggcggcgaagtgcttactcggactcgcgccacctctgctcgccgcgaaaacggcctgtggattgtggaagcggaagatatcgataccggcaaaaaatatagctggcaagcgcgcggcctggttaacgccaccggcccgtgggtgaaacagttcttcgacgaggggatgcatctgccttcgccttatggcattcgcctgatcaaaggcagccatattgtggtgccgcgtgtgcatacccagaagcaggcctacattctgcaaaacgaagataaacgtattgtgttcgtgatcccgtggatggacgaattttccatcatcggcaccaccgacgtagagtataaaggcgatccgaaagcggtgaagattgaagagagtgaaatcaactatctgctgaaagtgtataacgcgcactttaaaaaacagcttagccgtgacgatatcgtctggacctactccggtgtgcgtccgctgtgtgatgatgagtccgactcgccgcaggctattacccgtgattacacccttgatatccatgatgaaaacggcaaagcaccgctgctgtcggtattcggcggtaagctgaccacctaccgaaaactggcagaacatgcgctggaaaaactgacgccgtattatcagggtattggcccggcgtggacgaaagagagcgtgctgccgggtggtgccattgaaggcgaccgcgacgattacgcagctcgtctgcgccgtcgctatccattcctgactgaatcgctggcgcgtcattacgcacgcacttacggcagcaacagcgagctgctgctcggcaatgcgggggcgataagcgacctcggggaggatttcggtcatgagttctacgaagcggaactgaaatacctggtggatcacgaatgggtccgccgcaccgacgatgccctttggcgtcgcacaaaacaaggcatgtggctgaatgcggatcaacaatctcgtgtgagtcagtggctggtggaatatacgcagcagaagttgtcgctggcgtcgtaa

SEQ ID NO: 460852 - DNA, 606 bp, Shigella boydii
atgattagattccggctttatattccccctgtaattctcggttttgttatcgtgtcattattggtatggctgacggttattgtcttagccgtacttatattcacgttaacttttctggcagaaataatattctcctttccgctcctggttgtgcgtatttctcttcaggaattacaacttgagttaatggttgaatatgcactttttttcagtgtaatggctggcatcggttggcaattctcccgcagaacgcctcctgaattaaaaaacagactgcattgctggctggtcttttcgccggtctatttctggttaattctctcgaatttcattctttatatttctccagagaaatcagcgttgctggaaaatatccgaaatttctttctgacgtttgtctggcctcccctgaatttttcccctttttggccgcagccttggactgattttgtcggcccgattagtgcacagcttggttttgcattgggatattattgccattggtgcagaaaaaatagaaaccagaggaagaagtggggcgattgggtaacgtgcttaagtttggcgattttagctcaggggccgttattcaattatttacaatga

SEQ ID NO: 460853 - DNA, 768 bp, Shigella boydii
atgcaacccagccccgccatgcaggcattaattgagcagatttatcacacctttcgtcgttatcgggtgccgcagaaatttgtggtttgttgtgaatattgcctgagtcagcaggaacaaaaggcattacggagtacatcgttacgagcgatcccgtattccttaatcaatgcctggaatagtagcccagggcctgatccgcaaaatagcgatgaggtccgctattttctgccgcgtttactggaatttgttgcacaggggcattttgacaatattcacgtagttttttctctgcgccgtatcaaccttgccaacaaagaaaactggcgtgcggatgaacgggcaattttacagcgatttgcctgccagtatatgactgattgggtatccggcgatgaagctgtcgaattacagtatatgctggaaatgtttttccgtgccgatatcgctcttgcgccattgctggatgccattaattcagttcccggcttttggtcgaccgtttctcttgcctgtttattgaacagatattgtgaggattatatcagagataaccaggacgatatcgataacgtcattaccacccaaatcaatgcctgggctagaaataatcatcctttactgaaagaaagagcgcggcaagcgattgagaacccgctaaaacagcccgaaccaatgacagaatatcaggtctgggaagatgactggataattgatgagtgtttatgcgcgatgtatgacgcatcatccgaatcaccaggaaaataa

SEQ ID NO: 460854 - DNA, 726 bp, Shigella boydii
atgagtgaacgtctgagcattaccccgctggggccgtatatcggcgcacaaatttcgggtgccgacctgacgcgcccgttaagcgataatcagtttgaacagctttaccatgcggtgctgcgccatcaggtggtgtttctgcgcgatcaagccattacgccgcagcagcaacgcgcgctggcccagcgttttggcgaactgcatattcaccctgtttaccctcatgccgaaggggttgacgagatcatcgtgctggatacccataacgataatccgccagataacgacaactggcataccgatgtgacatttattgaaacgccacccgcaggggcgattctggcagctaaagaattaccttcgaccggcggtgatacgctctggaccagcggtattgcggcctatgaggcgctctctgttcccttccgccagctgctgagcgggctgcgtgcggagcatgatttccgtaaatcgttcccggaatacaaataccgcaaaaccgaggaggaacatcaacgctggcgcgaggcggtcgcgaaaaatcctccgttgctacatccggtggtgcgaacgcatccggtgagcggtaaacaggcgctgtttgtgaatgaaggctttactacgcgaattgtcgatgtcagcgagggtaatgactccaacttattgatagtgttttatgttcagataatgcccgatgactttgtcatgcagctccaccgattttga

SEQ ID NO: 460855 - DNA, 828 bp, Shigella boydii
atgagtgtgctcattaatgaaaaactgcattcgcggcggctgaaatggcgctggccgctctcgcgtcaggtgaccttaagcattggcacgttagcggttttactcactgtatggtggacggtggcggcgctgcaactgattagcccgctgtttttgccgccgccgcaacaagtactggcaaaactgctcaccattgccggaccgcagggatttatggacgccacgctgtggcagcatctggcagccagcctgacgcgcattgtgctggcgctactcgcggcggtggtgatcggtattccggtcgggatcgccatggggctaagcccgacggtgcgcggcattctggatccggtaatcgaactttatcgtccggtgtcgccgctggcttatttgccgctgatggtgatctggtttggtattggtgaaacctcgaagatcttactgatctatttagcgatttttgcaccggtggcgatgtcggcgctggcgggggtgaaaagcgcgcagcaggttcgcattcgtgccgcccagtcgctgggtgccagccgtgcgcaggtgctgtggtttgtcattttgcccggcgcgctgccggaaatcctcaccggattacgcattggtctgggtgtgggctggtctacgctggtagcggcggagctgattgccgcgacgcgcggtttaggatttatggttcagtcagcgggtgaatttctcgcgactgacgtggtgctggcgggaatcgcggtgattgcgattatcgcctttcttttagaactgggtttgcgcgcgttacagcgccgtctgacgccctggcatggagaagtacaatga

SEQ ID NO: 460856 - DNA, 768 bp, Shigella boydii
atgctgcaaatctctcatctctatgccgattatggcggcaaaccggcactggaagatatcaacctgacgctggaaagcggcgagctactggtggtgctggggccgtccggctgcggtaaaaccacgttgctgaatctgattgccggttttgtgccttatcagcatggcagcattcaactggcgggtaagcgtattgagggaccgggagcagagcgcggggtggtttttcagaatgaagggctgctaccgtggcgcaatgtacaggacaacgtggcgttcggcctgcaattggcaggtatagagaaaatacagcgactggaaatcgcgcaccaggtgctgaaaaaagtggggctggaaggcgcagaaaaacgctatatctggcagctttccggtggtcaacgtcagcgggtggggattgcccgcgcgctggcggcgaatccccagctgttattactcgacgaaccgtttggtgcgctggacgccttcacccgcgaccagatgcaaactctgctgctgaaactctggcaggagacgggcaagcaggtgctgttgattacccacgatatagaagaagcggtgtttatggcgactgaactggttctgctttcatccggccctggccgtgtgctggagcggctgccgctcaactttgctcgccgctttgttgcgggagagtcgagccgcagcatcaagtccgatccacaattcatcgccatgcgcgaatatgttttaagccgcgtatttgagcaacgggaggcgttctcatga

SEQ ID NO: 460857 - DNA, 963 bp, Shigella boydii
atggcaatttcatcgcgtaacacacttcttgccgcactggcattcatcgcttttcaggcacaggcggtgaacgtcaccgtggcgtatcaaacctcagccgaaccggcgaaagtggctcaggccgacaacacctttgctaaagagagcggggcgagcgtggactggcgtaagtttgacagcggagccagcatcgtgcgggcgctggcttctggcgacgtgcaaatcggcaacctcggttccagcccattagcggttgcagccaaccaacaggtgccgattgaagtcttcttgctggcgtcaaaactgggtaactccgaagcgctggtggtaaagaaaactatcagcaaacccgaagatttgattggcaaacgcattgccgtaccgtttatctccaccacccactacagcctgctggcggcgctgaaacactgggggattaaaccagggcaagtggagattgtgaacctgcagccgcccgcgattatcgccgcatggcagcggggtgatattgatggtgcttatgtctgggcaccggcggttaacgccctggaaaaagacggcaaggtgttgaccgattctgaacaggtcgggcagtggggtgcgccaacgctggacgtctgggtggtgtgcaaagattttgccgagaaacatcctgaggtagtgaaagcgttcgctaaaagcgccatcgatgctcagcaaccgtacattgctaacccagacgcgtggctgaaacagccggaaaacatcagcaaactggcgcgtttaagcggcgtgccggaaggtgacgttccggggctggttaaggggaatacctatctgacgccgcagcaacaaacggcagaactgaccggaccggtgaacaaagtaatcatcgacaccgcgcagtttttgaaagagcagggcaaggtcccggctgtagcgaatgattacagccagtacgttacctcgcgcttcgtgcaataa

SEQ ID NO: 460858 - DNA, 519 bp, Shigella boydii
atgactaccggcaactctggtacagatggaataatcgatcgccatgaagaatcgcgcaacgccccaaagatattagggtgccaccaaactattcatcttaattttgctgacacccgcgctcatttacagctcaatgatatgatttccgccctggaagacatcattaaaaatcaaattccttctgatgttgaaatcatgcgggtatataccatgcatgatgccgaccgccatcaggatcatctcgctgtttatcaagcttcaatggttgcctgccgcactattccacaaattctcggctacgaaacctcaagtacctggctttcatttatgcctcaggtttttgaatccgttaaagaagaatatttcacagtcaaacttgctgcattaaaaaaacataaaagccaggaacgacgtgattatatgcgtcatgatcgcctgcgtgcagttgcacaatttcgcgggcaacaggtcaatagcgatctgggtgaaggctttgtaattcataaaatgattctttga

SEQ ID NO: 460859 - DNA, 540 bp, Shigella boydii
atgaaaacctggatatttatctgtatgtccatagcaatgttgctatggtttttaagtacgctaagacgtaaacccagtcaaaagaaaggctgtattgacgccattatacctgcgtataacgaaggcccgtgtctggcgcagtcactggataatctactgcgtaacccttatttttgccgggtaatttgcgttaacgacggctccacggacaataccgaagcggtcatggcggaagtcaaacgcaaatggggcgaccgctttgttgccgtcacgcaaaaaaataccggtaaaggtggtgcgctgatgaatggcctcaattatgccacctgcgaccaggtttttttaagtgatgccgacacctatgttccgcccgatcaagacggaatgggctatatgctggcagaaattgagcgcggggctgttaccgcacatccgcgcgaccgtaaagttgccgatgattgttatgaagcgcacgctacagcagctcctgggcggcgcaccgtttattatcagcggtgcctgcggaatgttccgtactga

SEQ ID NO: 460860 - DNA, 423 bp, Shigella boydii
atgttccgtactgatgtattgcgtaagttcggtttctcggatcgtactaaagtcgaagaccttgatctcacctggacattagtggcaaacggctaccgtattcggcaggcgaatcgctgcatcgtatacccacaggaatgcaacagtccgcgtgaggagtggcgtcgctggcggcgttggattgtgggctacgcggtctgtatgcgcctgcataaaaggcttttatttagccgcttcggtatcttcagtatatttcctatgctgttggttgtgatttatggcgttgggatttatctcactacctggtttaatgaattcatcaccaccgggccgcatggtgtggtgttggcaatgtttccgcttatctgggtcggcgtagtttgtgttattggtgcttttagcgcctggtttcatcgttgctag

SEQ ID NO: 460861 - DNA, 693 bp, Shigella boydii
atggacttattgccttttttactggacgcgaacctcagcgcgacaaacccacccgctattccgcactggtggaagcgtcaaccacttattcccaaccttctgtcacaggaactgaaaaactatctgaagcttaatgttaaagagaaaaatattcagattgcagaccaggtaattattgatgaaactgcaggtgaagttgttatcggcgcgaatacccgtatttgtcatggtgccgttattcagggtccggtagtgattggcgcaaactgcctgataggtaattatgcgtttattcgtcctggcacaataatcagcaatggtgtaaaaattggttttgccaccgaaattaaaaatgcggttattgaagcggaagcaacgattggtccgcaatgttttattgccgactcggtagttgcaaaccaggcatatttgggcgcacaagtacgtaccagtaatcatcgtctggatgaacagcctgtgtctgttcgaactccagagggaattatcgctaccggatgcgataaattaggttgttatatcgggcagcgttcacgccttggcgtacaagttattattttgcctgggcgaattatttccccgaacacgcaacttggcccgcgcgtgattgtagaacgtaatttacctaccggaacttattcactccgacaagaacttatccgtacaggagattaa

SEQ ID NO: 460862 - DNA, 774 bp, Shigella boydii
atgataaaacggacgttattagcggcggccatttttagcgcattgcccgcttatgccgggttaacgtccattaccgcgggctacgattttaccgattattctggcgatcatggcaaccgtaatttagcgtatgctgaactggtggcgaaagttgaaaacgcaacgctgctttttaatctttcccaggggcgtcgtgattatgaaactgaacatttcaatgccactcgcggtcagggtgcggtctggtataaatggaataactggctgacaacccgaacgggtattgcctttgcggataatacgccggtctttgcccgccaggattttcgtcaggatattaacctggccctgttgccaaaaacgcttttcacgaccggttatcgctacactaaatattacgatgatgtcgaagtcgatgcctggcaaggcggcgtatcactctatactggcccggtgatcaccagctaccgctatacccattatgactccagcgatgcaggtggtagttatagcaatatgatttccgtgcgtctgaatgacccgcgcggcactggttatacgcaactatggctaagccgcggaacaggcgcttacacctatgactggacgccagaaacacgctacggcagcatgaagagcgtcagtctgcaacgtattcaaccgctgactgagcaacttaatctcgggctgacggcaggtaaagtgtggtacgacaccccaaccgatgattataacggtctgcaacttgcagcccatctgacctggaaattctga

SEQ ID NO: 460863 - DNA, 237 bp, Shigella boydii
atgttccgttgtccgctttgtggcgcatctgcccgtatccgcaccagtcgtccggaaaatgattcaaacaccgtgagacaaaagtattatcagtgtaacaatctagaatgcggcgtatgtttctcaacactggaagccttccacaaattcacttcaaagcacgcctcccccattcactcatcagagggcatcccgttggatttgcccctatatttccagacatctgttatcacttaa

SEQ ID NO: 460864 - DNA, 3120 bp, Shigella boydii
atgattggacaatttttaagtgcaacagagattttagcaaagaactatgttcgtaataaaatggttaaaaatccattttattcgaatttaaaatggaattttattgaaaaaaacatcataagattaacatcctcaccggttaaatcagtactttgcatatcagctttttcatttgtactactttatgttggatatttaaacgaattatttataaaaaataatcttttacattatttcccgtttaggcattcattaaccgaatggcaaacaaccattttaagtggccaattgacaattattggtattgtatacccccttgttataggtttagtaagtatcttattccaaaaaaaggcagatagaaaaatagcccaaactgcttatcagcgttactcaggattcatgcttgctggactcagcgggcttttcttatcaggatttatacttctcagtgtactaattaaaactgtctttggaagttatctttatggtatagcttgtctaatcagcatattatggcttttgataaacatagttctttctatttggttctttatcgtgagtcttgaaattcttgatgatgtaaaacggcaaataattataaagcgatacattgccttcgaaatagtaatgccccatatttgtaacaaaatctcagccaagcttaggttataccctatctatcaaaaacataactattcaaatttagaaatcaagcaagccgattacaaaggagaatacatatctgtggctagcagttattctaaggaagatgagttaagtttatatcaccgtccttttcaacttactcttaatcttattaattaccaactaaaaaagaagaatcattttgcgtcatttgtcattggtgataatcgtacaaaagaaacagaatccacgggtaagatactttttagcgttaaaaatatcaaaccagacagcttattaataaaaatacttaagcaatgtttttatagggctccgattaaaggaggagatttttccgtaagtcttacaatgcaggctataacagcagatacgtatatgtatctgcgggattctgatctcattagttttgacaatgctatctctgcattaattaataactttaataatctctgcgatttgtatttttttcaagatgataataccaacaataacttcttactgatcactacagaattatttgaacggagttttcaatatgagttttcagatgaagtttataaaatatcaaataattccatggataaaattaatctttctgaaagattttttgaattatgtctttggagcggagtgcgtattatcaataatagaaaacatcttatcagcaatgaactttgtatctatatgggaattactcgttcacaatggtcaatattaacagaatggttccgaaacaaccaatcactcttaaatgcctcgcttcgttcacgttataatcgtatattaagaacctataccactgtttgggagcaatatcaagaaagcataaactttcgtttctgcaatacagagaattcagatttatttgaattattttgcaaaacgcaactacaagaacttccatcgatgattattgatgcaacacagactcgcgatccttctactattgatacagccgtcgatcttattaaccgatggcagcactcaatgaatattgacagccattcggtagaaaaatacagttacaaaggccagctttttaacccgggttttttcatatccaaaaaactaaacttcaattcagacagagagtggttcaatattgccatcataaatgcgttgactgacatgcgtatatgcacatgtctttatctgacatcaagaatcaatacttctgacaaactaatgacacattacattaaacttattttagagggtaaacttattgaccaaaccggtggatatgaaactcccactgaagaaattgataatgcaagccaactaatcaagatattaattagaatctgcctgtggacatggtctgaaaatatggaacacaatgggtggatgaatagtttagcaaggcgtttacgtgactatgataaaacagacatggtgatgggcagagtttacagtaatgtttttgactgtggatttattgatatggaacaatcatgggttcagctattattaatttttcctaacaagaacgatagcgtatcaaaagaaataaaagaagcaatagaaaacaactatataacatatcgtgagaagcaacgactcattggagtattatcaaaaatttgtaactccatcgaatatactaaaatcaagctgactttaacattggacgatctccaaacaaaaaaagaaaacttaagaaagttgcttcaagagcatattaacatgctaaagaaagatcttgatatgagacttcaggatgctgccatagatgtacatcgactagatagcactgcacgtaaaacatcagaacatcttcgtaaacgcatcaagaaaacgctccctctttcacttttcaaatctattgattttaagcaggctagcgattgtttcacaaaacataagatatctattaagatagataaagaaccgtatgccgaaggaatagaatccatcccttatatcaatgaaggtgatattcaagcagacttaattctcaaggacatccagagaataatactttcaaatttatttagcactggctgttcgcaacataccgtaatagaagatttcaatatgttgattgatcacataaaatcatctgctgacttggctggcaaactggttcttgtgatgagtaaagagatctttcagcaatataatcgtatgcttttcgataatcccaacctcagagaactaatgagaaaaaatgatgatggctctatgaacataactactgaatccggtacccgtaaggtttacttcttaccatttgttaatcaaccattttctcttgtggtaaaggataactacttcactaaattaattattagagaatatgataataataagttagtaaatgtcacttcagagaatatcaaaagtgactcagataaattcaagctaactcttaactatgagttgaatgtagtatttgaaggaaacgctgatttaaaaatagctcactcgcaaagagtgacatcagaataa

SEQ ID NO: 460865 - DNA, 921 bp, Shigella boydii
ttgcagctaccgccacggggcgcgcgtctgacggttctcattggctggaaaggggaaccgctgacagaaaaaggcacttacattgttgatgaaatcgctcacgaaggaccgccggacaggctgactgtttcagccagaagcgcagattttcgggatgaatttaacgttaaacgtgaggtgtcctggcatgatgtgaccgttgagcgtgtggtatccgccatcgctcatcgatacggtctgaaaccgcaaatcagcgaaatgctgatggatatcgaaatcgaccacgccgaccagaccgaagaaagcgacatgtcctttcttacgcgcatggcggaaatgctgggagcaatcgccacggtaaaaagcggcaatctgttattcatcatgccaggtggtggcgtgaacgcacaggggcagccgttgccctcgttcgccattacacgcagcagcggcgatcgccatcagttccgcattgctgaccgcgaggcgtatacgggggtacgcgcctactggcttgatcttaattacgggaaaaagaaaaaagtcagcgtgaaacgccgcaaaccgccaaaacccaaaaaggagaaaagcagcagtcgggaaggcgactatatggaaggtgcggaaggcaacgtgtttgtgttacgcaagacttatcagaacgagcaggcagcaagacgcgcagcggcggcaaagtggcagcagctacaacgcggagccgcatcattttccatcacgctggcgcgtggtcgtgcagaactctatcccgaaatgcatggcacagtgacaggctttaaaagcgagattgattatcaggactggattattgcaaaagccgagcacaccattgataacagcggctttaccacgcagcttgaacttgaagcaaaaatcccggaatggatagcagaaacagaataa

SEQ ID NO: 460866 - DNA, 123 bp, Shigella boydii
atgaccgacaccaccatgcaattgctcagtcagggcacggcccccgtgaaaatgccggattttgatattctctcggagggtaaaacgctgtcaggcgtggcggagcgcctgatgagcctgtaa

SEQ ID NO: 460867 - DNA, 1185 bp, Shigella boydii
atgagtgaaactcgttttcatggtgcccgtgttacggagaataccgacctggtaacagcgattaacgatgttgattccagcgttatcggtatcgtggcaacggcggatgatgcggacgcgaagctgttcccgctgaacaagcccacactgctgacccgcgtcaatgacgtgctgggaaaatgcgggacaacggggacgctttatcgtgcgcttaaggccatcgcagaccaggtgagcacaaaggtgatcgtcgttcgcgtggctgaacacaaagaagaagacggaaagacgcaggatcaactggttatcggtggttctgaggatgacggcagctatacggggatgtatgcgctgcttgttgcagagcaggatgaaagcatcggataccgtccgcgtattctggccgcgccggagctggacacggaggcggtaacaaaatccctgtgcgtgattgcagataaactgcgcgcgtttgtgtatgcctcatgtcatggctgtaacacgatggccgaggcaattacctaccgccagaaattcaacgaacgtgaggtgatgctcttatggccggacttcatcgcctacaacccgaaaaatggcaaaaacgaaacgttccccgcgcctgcctatgcgtgcggccttcgtgcgtacattgaccatgaacagggatggcacaaatcgctgtccaacgttccggttaaaaatgtgctggggatgtcgaggcatgtgttctggtcgttgcaggccgaagacagcgatgccaacagcctcaacaacaaagaaatcacgaccattattcgtcgcaacggggtccgcttctggggtaaccgcacaccggaaacgaacgcctacatctttgaggtgtatacccgaaccgcacaggtgctggctgattcaattgcggaagcgcagtttgaaaccatcgacagtccactgacgcctgcgaatgtgaaggatgttatcagtgccatcagggcaaaactggattcactggtgactgccgggaaactgattggcgcggagtgctggtatgacgtggtggataacagcaccacggatttacgtcagggacgtgtgcgtattcgctacaaatatacgcccgttccgccactggaagacatggagctttaccagacgtttactgatgaatactttgaacccgcatttgcggtgctgggaggtgcctga

SEQ ID NO: 460868 - DNA, 321 bp, Shigella boydii
atggctgtgccaaaacatcttcgcttttttacgctgtttgtggatggtgaaaacgaagtgggtaatgtgacgtccgtcactctgcctaagctgacgcgcaaaaccgacagctaccggggtggtggcatgatgggtgcggtaagtattgatctcggtctggacgactccgcgcttgatgcgagctttgtcatgggggcgcagttcgtgagctgttccttaagtatggcggcacgattgacggcacgctgctgcgttttgcgggtgaatactacaccgatgcagaaagcgacctgtatgaagtcgaaatgcgcggacgtgtga

SEQ ID NO: 460869 - DNA, 1440 bp, Shigella boydii
atggaaacaaatgggaaggtaaactatcagcttcttagcacccctgatgctattgcaaaaaatgtatgtttggaaaaaacggaagatttttcaaaatcaccagcttatatttattttgtggaaaataaaaagtggggaacagttattactaattttttttataacatgaaaaaaaatggagactttgtcagaacattatcagcatgcacattaaaccaccaaatggcgttagggttgaaaataaagcgcgtacaagaaagtgaaaaatgggttgttcagtttttcgatcctaatcgaactgttactcataaacgtactgtatttacttgtgatagccatttcgaactgagtcaattatccgctaaggatttttttgatgatttttattggaaaatttatggtctggagcaacccgggcaggtaatatttgaagataggcataattcccctctaacaaacacagtgaaacttttaccagatgaattgatcaattccagagttatatatcatgcgataacaaagaatctgacagaagtattatttatactgatggaaaaatacaaaaatggtgaaatttctcaatctaaactggtgaaccttctggccacgagaagctctgatggtactcctgcattttatatagcacttcaaaacggatgttcagacattattcaagtatatggtaagatattaaatatgtgcaatcttagtcaagaaacaatacttacattgcttgctgcggtaggggcaaacaatgtgccgggtttatgcatgtcttttatgaacggacatgtagacacaataaaagcctatggggaaatagtctttaaaaccccgttaacttccgataagagattatatctattagctgcgaaagacagccatgatttacctgggttattttttgcattgcagaatggacatgcagatagtattcgtatgttcggaagtctgcttaataagaaaatgcttagtagtgaacaaattaaagaattattgaaagtaaagcatgggttgtttatggcacttcaaaatgggcacacaaaggccattatggcgtatggagatatactaaaaatactcccccctcaccaggaatatatagatgaattattatggataaaaaatcccaacggtacatcaggactttttatggcattttataatggccataccgaaacaatacgtgccttttgtaatattctaaaaaactatagttttaccacaagacgattggtcgaaatgctgtccgcaactaataaagatggtattcctggtgtatttgcatctgtagtaaatagagacaaagaaacaatattagagtattgtagaataataaaagagaacaatctggaaccggatactatagcagaacaattttcaaagaagatgaaaaaaacgtttattgaaataataaatagatttaatcattttttatga

SEQ ID NO: 460870 - DNA, 720 bp, Shigella boydii
atgcccataaaaaagccctgtctaaaactaaatttagattctttgaatgttgtgaggtctgaaataccgcagatgctttctgcgaatgaaagattgaaaaataacttcaatatattgtacaaccaaatacggcaatacccagcgtactatttcaaagtagcatcgaacgtgccaacttactctgatatatgtcaatttttttctgtcatgtaccaaggattccagattgtgaaccatagtggagatgtgtttattcatgcatgtcgtgaaaatcctcagagtaagggggattttgttggggacaagtttcatattagtatagctagggagcaagttcctctggcattccaaattttgtctggtttattattttcagaggacagtcctatagataaatggaagataactgatatgaatcgagtttctcagcaatctcgtgtggggataggagctcagtttacgctatatgtaaaatcagatcaggaatgctcgcaatatagtgctttattacttcataaaatacgacaatttataatgtgtctcgagtctaatctattaagaagcaaaatcgctcccggggagtatccggcgtcagatgttagacctgaagactggaaatatgtcagctatcgtaatgaactacgaagcgatcgagatggaagtgaaaggcaagagcaaatgttacgagaggaaccattttatcgtttgatgatagagtag

SEQ ID NO: 460871 - DNA, 585 bp, Shigella boydii
atgctaaactggctcagcaaactaagagcagcgcgcatccacttacccaatgcggttgagaaaatagccttcgatcgctttcatgtggcgaaacaaccgggtgaggtggtggataaaacccgccagaatgaacatccgcatcttcctgttgaaagtcgtcgtcaggcaaagggaactcgcttcctgtggcagcacagcgataaatggatgaccgaatccaggcaggaaaagctgatatggctgcgtgcgcagatgaagctgacgagcctgtgctgggcgctgaaagaactggcaaaggatatctggagcagaccatggagcgaggaaagacgcaacgactggcagagatggctgtcgctggcggccaacagtgacgtccccatgatgaagaatgtggctaaaacgatagggaaaaggttgtacggtatcctgaacgccatgcgccatggcgtatcaaacggaaatgcggaagcactgaacagcaagatcaggctgctgagaataaaagccaagggctaccgcaaccgggagcgctttaagctgggagtgatgttccactatgggaaactgaatatggcgttctaa

SEQ ID NO: 460872 - DNA, 579 bp, Shigella boydii
atgaaagtctcgtttaagtctttaggctatatttttcatgatatatataataaaaaacacactatcgatgagttcaacgatgtggtaagaaaagcagttttatcaggtaaaattaacgagctgaatgcatgtcataaagtggcaatttttcttgccgaaaaagacaatgagataacaaagaaagacaaagccaagataatagatacattaactgaaaactattccattgaatttcaacaattaatgaatattagtgagcgcacgttaaattcatctttatatattactcctggtgaaagtggttttgtcagttttgttaatcgtgaaggaaaaatatgtcatactgcatatgtaaaatcatcagataatagcatggcatattaccatgcaaattatagcagcattgacaaatatattacggatatgtgcggccttatttgtatgaggcatattgagtctacttgcattattttttatatgcttgatgaaaaagttttatctgccattgctgaatttatgaatgaaaaaggatggcgggctgcgttttgttcagcaaagaacttatataaatgtgtttaa

SEQ ID NO: 460873 - DNA, 288 bp, Shigella boydii
gtgcagatgagccgcctggaacattatgccggtcaggatgaaattggcctgcgttacaacagccaccggacaaaacgagaagaaaaccttgtgatgagtggcgacgagtttatggaaaggttctcctggcatgtggcggataaggggttccggatggtgatacgggatcctgagtccggtgaagcggcgattactggaagatgtggtgtacgccataacggagacagtgagaaaaacggcgaggcaaatcacaaggagagggatgtatcagcagtgactgaaggttga

SEQ ID NO: 460874 - DNA, 285 bp, Shigella boydii
atggaataccggacctggatcactgaagctttacgccttcatttcgaagaacatttaccacgggttgtggccggacgtcgcctgggcgtaccaaaatcaactgtctgtggtatgttcgtgcgcttccgcaacgctggcctttcatggcctctgcccgcaggtatgtcggagcaggaacttgatgcccttctttacggaagtgcctccacagtacctgtcgtacttactgaaagcaccgttatgcccaaactcccggtggtaaaaaaacgtccccggcggccttaa

SEQ ID NO: 460875 - DNA, 1362 bp, Shigella boydii
atgaacgcctgggaagttaatttcgacgggctggtagggctgacgcatcattacgctggcctgtcgtttggtaatgaagcctctacccgtcaccgttttcaggtgtctaacccgcgactggcggcgaaacagggcttactgaaaatgaaaacccttgccgatgcgggattcccccaggccgtgatcccgccgcacgagcgtccgtttattccggtgctgcgtcagttgggattcagtggtagcgatgagcaggtactggaaaaagttgcacgccaggcaccgcactggctttccagcgtcagctccgcttcgccaatgtgggtagccaatgcggcaacgatcgcgccatctgccgatacgctggatggcaaagtgcatctcaccgttgccaacctgaacaataaatttcaccgttcgctggaagcgcccgtcactgaatcgctgttaaaagctatttttaacgacgaagagaaatttagcgtccattcggcgttgccgcaggtagcgttgctcggtgatgagggggcggcaaaccacaatcgtctcggcggtcattacggtgagccgggtatgcaactttttgtctacgggcgagaagaaggcaatgatacccggccttcccgttatccggcgcgacagactcgcgaagccagcgaggcggtggcaaggcttaatcaggtgaatccccaacaggtgattttcgcccagcaaaacccggacgttatcgaccagggtgtttttcataatgacgtgattgccgtaagtaaccgccaggtgctgttttgccaccaacaggcgttcgctcgccagtcacagttactggcaaacctgcgggcgcgggtgaacggttttatggcgatagaagttccggcaactcaggtttccgtgtcggatgcggtgtctacctatctgtttaacagccaactgttgagccgcgatgatggttccatgatgttggtgctgcctcaggagtgtcgggaacacgccggagtatggggttatctcaatgaactccttgccgctgacaacccgattagcgaactaaaagtctttgacttacgtgaaagcatggcgaatggcggcggcccggcgtgcctgcggttgcgggtggtattgacagaagaagaacgccgggcggtgaatccggcggtgatgatgaacgataccttgtttaatgcgctcaatgactgggtggatcgttactaccgcgatcgtcttactgctgccgatctggccgacccgcaattgctgcgcgaagggcgggaagcactggatgtattgagccaattactgaatctcggttcggtttatccgttccagcgcgagggaggtgcccctattaagttgtcaagcatgttatga

SEQ ID NO: 460876 - DNA, 1479 bp, Shigella boydii
atgactttatggattaacggtgactggataacgggccagggcgcatcgcgtgtgaagcgtaatccggtatcgggcgaggtgttatggcaaggcaatgatgccgatgccgctcaggtcgaacaggcttgtcgggcagcccgtgcggcgtttccgcgctgggcgcggctctcattggctgaacgtcaggtcgttgtcgaacgctttgccggattgctggaaagcaataaagccgaattaaccgcgattattgccagagaaacgggtaagccgcgctgggaagcggcaaccgaagtgacggcgatgatcaataaaatcgcgatatcaattaaggcgtatcacgttcgtaccggcgagcagcgtagtgaaatgccggacggtgcggcgagcctgcgacatcgcccgcacggcgtgctggcggtgtttgggccgtataatttccctggtcatttgccgaacggacatatcgttccggcattgctggcaggtaacaccattatctttaaacccagcgaactgacaccgtggagtggcgaagcggtaatgcgtttatggcagcaggctggcttgccgccgggcgtgctgaacctggtgcagggcgggcgtgaaacgggtcaggcgctgagtgcgctggaggatctcgacggtttgctgtttaccggtcgcgccaataccggctaccagctgcatcgccagctctccggtcagccggagaaaattctcgcccttgagatgggcggtaataatccgctaattatcgatgaggtggcggatatcgacgcggctgtccatctgaccattcagtcggcgtttgtcacagccgggcaacgctgcacctgcgcccgccgtttattgctcaaaagcggagcgcagggcgatgcgtttcttgctcgtctggttgccgtcagccagcgattaacgccgggcaactgggatgacgaaccgcagccgtttattggcgggctgatttctgaacaggccgcacagcaggtggttactgcctggcagcaactggaagcgatgggcggacgaaccctgcttgcgccgcgcttattacaatcagagacatcgttgctgacgccggggatcattgaaatgacaggcgttgctggcgtaccagatgaagaggtgttcggaccgttattgcgcgtctggcgttatgattctttcgaggaagcgattctaatggcgaataacactcgcttcggactctcttgcggtctggtttcccccgagcgggaaaaattcgatcaactgttgctggaggcgcgggcggggattgttaactggaacaaaccgcttactggtgctgccagtaccgcgccattcggcggcattggtgcatccggtaaccatcgccccagcgcctggtatgccgcagattactgcgcatggcctatggcgagcctggagtcggactcgttaactttgcccgcaacgcttaaccccgggctggatttttccgatgaggtggtgcgatga

SEQ ID NO: 460877 - DNA, 1035 bp, Shigella boydii
atgatggtcatccgtcccgttgagcgctcagatgtctcggcgctgatgcagcttgccagcaaaacgggcggcggcctgacgtcgcttcccgctaatgaagccacgctttccgcgcgtatcgaaagggcaatcaaaacctggcaaggcgaactgcccaaaagcgagcagggctatgtgttcgtgctggaagatagcgagacaggcaccgtggcggggatttgcgccattgaggtggcggttgggctgaacgatccctggcacaactatcgggtcggcacgttggttcacgcctcaaaagagctgaatgtctataacgcattgccgacgctgtttcttagtaacgatcacaccggcagcagcgagctgtgcacgctgtttctcgacccggactggcgcaaagagggcaacggctatttgctgtcgaaatcgcgctttatgtttatggcggcttttcgcgacaagtttaatgacaaagtggttgctgaaatgcgcggggtgattgacgaacacggctattcaccgttctggcaaagcctcggtaaacgcttcttttcgatggattttagccgcgccgattttctctgcggcaccgggcaaaaggcatttattgcagaactgatgccgaaacatccgatctatacccactttttatcccaggaagcccaggacgtcatcggtcaggtacatccgcaaaccgcgcctgcccgcgcggtgctggagaaagaaggttttcgttaccgcaactatatcgacatcttcgacggcgggccaacgcttgagtgtgacatcgaccgcgtgcgcgccatccgtaaaagtcggctggtggaagtggcagaagggcagcctgcgcagggcgattttccggcctgcctggtcgccaatgaaaattatcaccatttccgcgtggtgctggcgcgtaccgatccggcaaccgagcgtttgattttaaccgccgcacaactggatgccctcaaatgccacgcaggggagcgcgttcgtctggtgcgcctgtgcgcagtggagaaaacagcatga

SEQ ID NO: 460878 - DNA, 1221 bp, Shigella boydii
atgtctcagccaattacgcgtgaaaactttgatgaatggatgatacctgtttacgctccggcaccctttataccggtacgtggcgaaggttcgcgcttgtgggatcagcaggggaaagagtatatcgacttcgcgggtggcattgcggtgaacgcgctgggccatgcgcatccggaactgcgtgaagcgctgaacgaacaggcgagtaagttctggcataccggcaacggttacaccaacgagccggtactgcgactggcgaaaaaattgatcgacgccacgtttgccgatcgcgtcttcttttgtaactccggtgcggaagccaacgaagcggcgctaaaactggcgcgtaaattcgctcacgaccgctacggcagccataagagcggtatcatggcgtttaaaaatgcgtttcatggtcgcacgctgtttactgtcagtgcgggtgggcagccagcctattcacaggattttgcgccactgccaccagatatccgtcatgctgcatataacgatattaactctgccagcgcgctgattgacgacgccacctgtgcggtgattgtcgaacccatccagggggaaggcggtgtggtgccagccagcaacgcgtttttacaaggtctgcgtgaattgtgtgaccgccacaatgcgctgttgatttttgatgaagtacaaaccggcgtcgggcgcaccggggaactgtatgcctatatgcactacggcgtgacacctgatctgttaactaccgccaaagcgctgggcggcgatttcccggtcggtgcgttgttaacaaccgaagagtgcgccagcgtgatgaccgttggcactcatggcaccacctatggcggcaatccgctggcctcggcggtggcgggcaaagtgctggagctcatcaacacaccagagatgcttaatggcgttaaacagcgtcacgactggtttgttgagcgtcttaataccattaatcaccgctacggtttgttcagtgaagttcgcggcttaggtttgttgattggctgtgtactgaatgccgattacgccggacaagcgaaacagatctctcaggaggcggcgaaagcaggcgttatggtactgattgcgggtggcaacgtggtgcgttttgcgcctgcgctcaatgtcagcgaagaagaggtgacgaccggactggatcgctttgcagctgcttgcgaacactttgttagccgaggttcatcatga

SEQ ID NO: 460879 - DNA, 807 bp, Shigella boydii
atgaaatttgtctcttttaatatcaacggcctgcgcgccagacctcaccagcttgaagccatcgtcgaaaagcaccaaccggatgtgattggcctgcaggagacaaaagttcatgacgatatgtttccgctcgaagaggtggcgaagctcggctacaacgtgttttatcacgggcagaaaggccattatggcgtggcgctgctgaccaaagagacgccgattgccgtgcgtcgcggctttcccggtgacgacgaagaggcgcagcggcggattattatggcggaaatcccctcactgctgggtaatgtcaccgtgatcaacggttacttcccgcagggtgaaagccgcgaccatccgataaaattcccggcaaaagcgcagttttatcagaatctgcaaaactacctggaaaccgaactcaaacgtgataatccggtactgattatgggcgatatgaatatcagccctacagatctggatatcggcattggcgaagaaaaccgtaagcgctggctgcgtaccggtaaatgctctttcctgccggaagagcgcgaatggatggacaggctgatgagctgggggttggtcgataccttccgccatgctaatccgcaaacagcagatcgtttctcatggtttgattaccgctcaaaaggttttgacgataaccgtggtctgcgcatcgacctgctgctcgccagccaaccgctggcagaatgttgcgtagaaaccggcatcgactatgaaattcgcagcatggaaaaaccgtccgatcacgcccccgtctgggcgaccttccgccgctaa

SEQ ID NO: 460880 - DNA, 579 bp, Shigella boydii
atgaatgctgagcgtaaatttcttttcgcctgtcttatttttgcgctggtcatttacgctatccacgctttcggtttattcgatctgctcaccgatttaccccacttacagacactcattcgccagagcggattgttcggttatagcctctatattctgttattcatcattgccaccctctttctgttaccaggaagcatactggtgatcgctggaggaatagtttttggcccgctcttagggacactactctcattaattgccgccacgctggcctcctcgtgctcattcctgctggcgcggtggctgggacgtgatttactgctgaaatacgtgggccatagccataccttccaggccattgaaaaaggcattgcgcgtaacggtattgattttcttattctgacccgcttaatcccgttgtttccttacaatattcaaaattacgcttacggattaaccaccatcgccttctggccttatacccttatttcggcactcacgaccctgcccggtattgttatttataccgtgatggcaagcgatctcgccaatgaaggcattacgctgcgctggtaa

SEQ ID NO: 460881 - DNA, 210 bp, Shigella boydii
atggatttttggcaacacaaagcgccacaaaaatactctgcctttgagttggcttttgaatttggtcaccgggttattgctgaattaatccttaatacattaaataagatggctgaaagctttggctttacggataaccctcgatacattgcggagaaaaattatatggaagctttactcaaaaaagcatctccccataccgtacgctaa

SEQ ID NO: 460882 - DNA, 1737 bp, Shigella boydii
atgccgcgtggcctggaattactgattgctcaaaccattttgcaaggcttcgacgctcagtatggtcgattcctcgaagtgacttccggggcgcagcagcgtttcgaacaggccgactggcatgctgtccagctggcgatgaaaaaccgtatccatctttacgatcatcacgttggtctggtcgtggagcaactgcgctgcattactaacggccaaagtacggacgcggcatttttactgcgcgttaaagagcattacacgcggctgttgccggattacccgcgcttcgagattgcggagagcttttttaactccgtgtactgtcggttatttgaccaccgctcgcttactcccgagcggctttttatctttagctctcagccagagcgcagctttcgtaccattccccgcccgctggcgaaagactttcaccccgatcacggctgggaatctctactgatgcgcgttatcagcgacctgccgctgcgcctgcgctggcagaataaaagccgtgacattcattacatcattcgccatctgacggaaacgctggggacagacaacctcgcggaaagtcatttacaggtggcgaacgaactgttttaccgcaataaagccgcctggctggtgggcaaactgatcacgccttccggcacgttgcccttcttactgccgatccaccagacggacgacggcgagttatttattgatacctgcctgacgacgaccgccgaagcgagcattgtttttggctttgcgcgttcttattttatggtttatgcaccgctgcccgcagcgctggtcgagtggctacgggaaattctgccaggtaaaaccactgctgaattgtatatggctatcggctgccagaagcacgccaaaaccgaaagctaccgcgaatatctcgtttatctacagggctgtaatgagcagttcattgaagcgccgggtattcgtggaatggtgatgttggtgtttacgctgccgggctttgatcgggtattcaaagtcatcaaagacaagttcgcgccgcagaaagagatgtctgccgctcacgttcgtgcctgctatcaactggtgaaagagcacgaccgtgtgggccgaatggcggacacccaggagtttgaaaactttgtgctggagaagcggcatatttccccggcattaatggaattactgctccaggaagcagcggaaaaaatcaccgatcttggtgagcagattgtaattcgccatctctatatcgagcggcggatggtgccgctcaatatctggctggaacaagtggaaggtcagcagttgcgcgacgccattgaagaatacggtaacgctattcgccagcttgccgctgctaacatttttcctggcgacatgctgtttaaaaacttcggtgtcacccgtcacgggcgtgtggttttttatgattacgatgaaatttgctacatgacggaagtgaatttccgcgacatcccgccgccgcgctatccggaagacgaacttgccagcgaaccgtggtacagcgtctcgccgggcgatgttttcccggaagagtttcgccactggctatgcgccgacccgcgtattggtccgctgtttgaagagatgcacgccgacctgttccgcgctgattactggcgcgcactacaaaaccgcatacgtgaagggcatgtggaagatgtttatgcgtatcggcgcaggcaaagatttagcgtacggtatggggagatgcttttttga

SEQ ID NO: 460883 - DNA, 1305 bp, Shigella boydii
atgaaaacccgtacacaacaaattgaagaattacagaaagagtggactcaaccgcgttgggaaggcattactcgcccatacagcgcggaagatgtggtgaaattacgcggttcagtcaatcctgaatgcaccctggcgcaactgggcgcggcgagaatgtggcgtctgctgcatggcgagtcgaaaaaaggctacatcaacagcctcggtgcactgactggcggtcaggcgctgcaacaggcgaaagcgggtattgaagcagtctatctgtcgggatggcaggtagcggcggacgctaacctggcggccagcatgtatccggatcagtcgctctatccggcaaactcggtgccagctgtggtggagcggatcaacaatactttccgccgtgcggatcagatccaatggtccgcgggcattgagccgggcgatccgcgctatgtcgattacttcctgccgatcgttgccgatgcggaagccggttttggcggtgtcctgaatgcctttgaactgatgaaagcgatgattgaagccggtgcagcggcagttcacttcgaagatcagctggcgtcagtgaagaaatgcggtcacatgggcggcaaagttttggtgccaactcaagaagctattcagaaactggtcgcggcgcgtctggcagctgacgtgacgggcgttccaaccctactggttgctcgtaccgatgccgatgcagcggatctgatcacctccgattgcgacccgtatgacagcgaatttattaccggcgagcgtaccagtgaaggcttcttccgtactcatgcgggcattgagcaagcgatcagccgtggcctggcgtatgcgccatatgctgacctggtctggtgtgaaacctccacgccggatctggaactggcgcgtcgctttgcacaagctatccacgcgaaatatccgggcaaactgctggcttataactgctcgccgtcgttcaactggcagaaaaacctcgacgacaaaactattgccagcttccagcagcagctgtcggatatgggctacaagttccagttcatcaccctggcaggtatccacagcatgtggttcaacatgtttgacctggcaaacgcctatgcccagggcgagggtatgaagcactacgttgagaaagtgcagcagccggaatttgccgccgcgaaagatggctataccttcgtatctcaccagcaggaagtgggtacaggttacttcgataaagtgacgactattattcagggcggcacgtcttcagtcaccgcgctgaccggctccactgaagaatcgcagttctaa

SEQ ID NO: 460884 - DNA, 996 bp, Shigella boydii
ttggcaaagggcagtggtccctatttctatctgccgaaaacccagtcctggcaggaagcggcctggtggagcgaagtcttcagctatgcagaagatcgctttaatctgccgcgcggcaccatcaaggcgacgttgctgattgaaacgctgcccgccgtgttccagatggatgaaatccttcacgcgctgcgtgaccatattgttggtctgaactgcggtcgttgggattacatcttcagctatatcaaaacgttgaaaaactatcccgatcgcgtcctgccagacagacaggcagtgacgatggataaaccattcctgaatgcttactcacgcctgttgattaaaacctgccataaacgcggtgcttttgcgatgggcggcatggcggcgtttattccgagcaaagatgaagagcacaataaccaggtgctcaacaaagtaaaagcggataaatcgctggaagccaataacggtcacgatggcacatggatcgctcacccaggccttgcggatacggcaatggcggtattcaacgacattctcggctcccgtaaaaatcagcttgaagtgatgcgcgaacaagacgcgccgattactgccgatcagctactggcaccttgtgacggtgaacgcaccgaagaaggtatgcgcgcaaatattcgcgtagccgtgcagtacatcgaagcgtggatctctggcaacggctgtgtgccgatttatggcctgatggaagatgcggcgacggctgaaatttcccgtacctcaatctggcagtggatccatcatcaaaaaatgttgagcaatggcaaaccggtaactaaagccttgttccgccagatgctgggcgaagagatgaaagtcattgccagcgaactgggcgaagaacgtttctcccaggggcgttttgacgatgccgcacgcttgatggaacagatcaccacttccgatgagttaattgatttcctgaccctgccaggctactgcctgttagcgtaa

SEQ ID NO: 460885 - DNA, 537 bp, Shigella boydii
atgactgaacaggcaacaacaaccgatgaactggctttcacaaggccgtatggcgagcaggagaagcaaattcttactgccgaagcggtagaatttctgactgagctggtgacgcattttacgccacaacgaaataaacttctggcagcgcgcattcagcagcagcaagatattgataacggaacgttgcctgattttatttcggaaacagcttccatttgcgatgctgattggaaaattcgcgggattcctgcggacttagaagaccgccgcgtagagataactggcccggtagagcgcaagatggtgatcaacgcgctcaacgccaatgtgaaagtctttatggccgatttcgaagattcactggccccggactggaacaaagtgatcgacgggcaaattaacctgcgtgatgcagttaacggtaccatcagctataccaatgaagcaggcaaaatttaccagctcaagcccaatccagcggttttgatttgtcgggtacgcggtctgcacttgccggaaaaacatgtcacctag

SEQ ID NO: 460886 - DNA, 930 bp, Shigella boydii
atgccgattcgtgtgccggacgagctacccgccgtcaatttcttgcgtgaagaaaacgtctttgtgatgacaacttctcgtgcgtctggtcaggaaattcgtccacttaaggttctgatccttaacctgatgccgaagaagattgaaactgaaaatcagtttctgcgcctgctttcaaactcacctttgcaggtcgatattcagctgttgcgcatcgattcccgtgaatcgcgcaacacgcccgcagagcatctgaacaacttctactgtaactttgaagatattcaggaacagaactttgacggtctgattgtaaccggtgcgccgctgggcctggtggagtttaatgatgtcgcttactggccgcagatcaaacaggtgctggagtggtcgaaagatcacgtcacctcgacgctgtttgtctgctgggcggtacaggccgcgctcaatatcctctacggcattcctaagcaaactcgcaccgacaaactctctggcgtttacgagcatcatattctccatcctcatgcgcttctgacgcgtggctttgatgattcattcctggcaccacattcgcgctatgctgactttccggcagcgttgattcgtgattacaccgatctggaaattctggcagagacggaagaaggggatgcatatctgtttgccagcaaagataagcgcattgcctttgtgacgggccatcccgaatatgatgcgcaaacgctggcgcaggaatatttccgcgatgtggaagccggactagacccggaagtaccgtataactatttcccgcacaatgatccgcaaaatacaccgcgagcgagctggcgtagtcacggtaatttgctgtttaccaactggctcaactattacgtctatcagatcacgccatacgatctacggcacatgaatccaacgctggattaa

SEQ ID NO: 460887 - DNA, 174 bp, Shigella boydii
atggttattagtattcgccgctcacggcatgaggaaggggaggaactcgttgcgatttggtgtcgatctgtcgatgccacacacgattttttatcagcagagtatcgggccgagctggaggtgctagctagttcgttccttcctgccggaagcgccgttgtgggtcgcggttaa

SEQ ID NO: 460888 - DNA, 291 bp, Shigella boydii
ttgtgggtcgcggttaatgaacgggatcagccggttgggtttatgttgttaagtgggcagcatatggatgcgctgtttatcgatcctgatgtgtgcggctgcggcgtgggtcggatgctggtggagcatgcgctctcgatggcaccggaactgacaaccaacgttaatgagcaaaatgagcaggcggttgggttctataagaaggtgggttttaaggttacgggacgctctgaggtggacgatttggggaaaccgtatccgttgctgaatctggcgtatgtgggggaataa

SEQ ID NO: 460889 - DNA, 363 bp, Shigella boydii
atgaaagaagtcgaaaaaaacgaaatcaaacgtctcagcgatcgcctggacgccatccgccaccagcaggccgatctgtcgctggttgaagccgcagacaaatatgccgagctggaaaaagagaaagccacgctggaagcagaaattgctcgcctgcgtgaggttcatagccaaaaactgagtaaagaagcacagaagctgatgaagatgccgtttcagcgcgcaattaccaaaaaagagcaggctgatatgggcaagctgaagaaaagtgttcgcggactggtggttgtgcacccaatgaccgcgctgggccgtgaaatgggcctgcaggagatgactggattctctaagactgcgttttaa

SEQ ID NO: 460890 - DNA, 210 bp, Shigella boydii
atgggaaaattaggtgaaaacgttccgcttcttatcgataaagccgtagatttcatggcatcaagccaggcgttccgggagtatctgaaaaaacttcctccccgtaacgcgattccgtccggaatacccgatgaaagcgtgccgttatatctacaacgtctggagtattatcgtcggctttatcggccgaagcaggtagaggggcagtaa

SEQ ID NO: 460891 - DNA, 588 bp, Shigella boydii
atggtggaccaggcgcaggacaccctgcgcccgaataacagattgtcagatatgcaggcaacaatggaacaaacccaggcctttgaaaaccgtgtgcttgagcgtctgaatgctggcaaaaccgtgcgaagctttctgatcaccgccgtcgagcttttgaccgaggcggtaaatcttctggtgcttcaggtattccgcaaagacgattacgcggtgaagtatgctgtagaaccgttactcgacggcgacggtccgctgggcgatctttctgtgcgtttaaaactcatttacgggttgggcgtcattaaccgccaggaatacgaagatgcggaactgctgatggcattgcgtgaagagctaaatcacgacggcaacgagtacgcctttaccgacgacgaaatccttggaccctttggtgaactgcactgcgtggcggcgttaccaccgccgccacagtttgaaccagcagactccagtttgtatgcaatgcaaattcagcgctatcaacaggctgtgcgatcaacaatggtcctttcactgactgagctgatttccaaaatcagcttaaaaaaagcctttcaaaagtaa

SEQ ID NO: 460892 - DNA, 1149 bp, Shigella boydii
atgaaagcattacattttggcgcaggtaatatcggtcgtggctttatcggtaaactgctggcagacgcgggtatccaactgacgtttgccgatgtcaatcaggtggtacttgatgccctgaatgcccgtcatagctatcaggttcatgtggttggtgaaaccgagcaggtagataccgtttccggcgtcaatgctgtcagcagcattggtgatgatgtcgttgatctgattgctcaggtcgatttagtcactaccgccgttggcccggttgtgctggaacgtattgctccggctatcgccaaagggctggtgaaacgcaaagaacaaggtaatgaatccccgctgaacatcatcgcctgtgaaaacatggtacgcggtaccacgcagctgaaaggccatgtgatgaacgccctgccggaagacgccaaagcgtgggtagaagaacacgttggctttgtcgattccgccgttgaccgcatcgtaccgccttcggcttcggcaactaacgatccgctggaagtgacggtagaaactttcagcgaatggattgtcgataaaacgcagttcaaaggcgcactgccgaacatcccaagcatggagttaaccgacaacctgatggcatttgtcgaacgtaaactcttcaccctgaacacgggtcatgctataaccgcgtacctcggaaaactggccggtcatcagaccattcgtgacgctattctcgacgagaaaatccgcgcggtggtaaaaggtgcgatggaagaaagtggtgcggtactgatcaagcgctacggctttgacgcagacaaacatgcggcgtacatccagaaaatcctcggtcgttttgagaacccgtatctgaaagatgatgtagagcgcgtaggccgtcagccgctgcgtaaactgagtgctggcgaccgtctgatcaagccactgctcggtacgctggaatacagccttccgcacaagaatctgattcagggaattgctggtgcaatgcacttccgcagtgaagatgatccgcaggctcaggaactggcagcactgatcgctgacaaaggtccgcaggcggcgctggcacagatttccggtcttgatgccaacagtgaggttgtatccgaggcggtaaccgcttataaagcaatgcaataa

SEQ ID NO: 460893 - DNA, 1914 bp, Shigella boydii
atgtcatccgatattaagatcaaagtgcaaagctttggtcgtttcctcagcaacatggtgatgccaaatatcggcgcgtttatcgcgtggggtatcatcaccgcgttatttattccaacagggtggttaccgaacgagacgctggcgaagctggtcgggccgatgatcacttatctcctgccgctgctgatcggttataccggtggtaagctggtaggcggcgaacgtggcggcgtagtcggtgccatcaccaccatgggcgttatcgtcggcgcagacatgccgatgttcctcggttctatgattgcaggtccgctgggcggctggtgcattaagcacttcgaccgctgggtagacggtaagatcaaatccggttttgagatgctggtgaataacttctccgcaggcatcatcgggatgatcctcgctattctggcattcctcggcattggcccgattgttgaagccctgtccaaaatgctggctgcgggcgttaacttcatggttgtccatgacatgctgccgctggcgtctatctttgttgaaccggcgaaaatcctgttcctcaacaacgccattaaccacggtatcttctcgccgctgggtattcagcagtcccatgaactgggtaaatcaatcttcttcctgattgaagctaacccaggtccaggtatgggcgtgctgctggcgtacatgttctttggtcgtggtagcgctaaacagtctgcgggcggtgcggcaatcatccacttcctgggtggtatccacgaaatctacttcccgtatgtgctgatgaatccgcgtctgatcctcgcagtcatcctcggcggtatgactggcgtgttcacgctgactatcctgggcggtggtctggtttctccggcatctccgggttctatccttgctgtactggcgatgacaccaaaaggtgcttatttcgctaacatcgcgggtgtgtgtgcggcgatggctgtctccttcgttgtctctgctattttgctgaaaaccagcaaagtgaaagaagaagatgatattgaagcagcaactcgtcgtatgcaggacatgaaagctgagtctaaaggcacatctccgctgtctgcgggcgatgtgactaacgacctgagccacgtacgtaaaatcatcgttgcctgtgacgccggtatgggttcaagtgcgatgggcgcaggcgtgctgcgtaagaaaattcaggatgcaggtctgtcgcagatttcggtcactaacagcgcgatcaacaacctgccgccagatgtggacctcgtcatcactcaccgtgacctgaccgaacgcgctatgcgccaggttccgcaggcacagcatatttcgctgaccaacttcctcgacagcggcctgtacaccagcctaaccgaacgtctggttgctgcccagcgccatactgaaaacgaagtgaaagtgaaagacagtctgaaagacagctttgacgattccagtgctaacctgttcaaactgggcgcggagaacatcttcctcggtcgcaaagcagcaaccaaagaagaagcgattcgttttgctggcgagcagctggtgaaaggcggttacgttgagccggaatacgttcaggcgatgctggatcgtgaaaaactgaccccgacttatctgggtgagtctatcgcggtgccacacggtacggttgaagcgaaagatcgcgtactgaaaacgggcgtggtgttctgccagtacccggaaggcgtgcgcttcggtgaagaggaagatgacattgcccgtctggtgattggtattgcagcccgtaacaacgagcacattcaggttatcaccagcctgaccaatgcactggatgatgagtccgtcatcgagcgtctggcacacaccaccagcgtggatgaagtgctggaactgttggcaggtcgtaagtaa

SEQ ID NO: 460894 - DNA, 363 bp, Shigella boydii
atgtttctaaactatttcgcgttgggagtgctgatcttcgtctttctggtgattttttatggaatcatcgcgatacatgacatcccttatctgattgccaaaaagcgcaatcacccccatgccgacgctattcatacggcgggctgggtgagcctgtttactctgcatgttatctggccgtttctgtggatctgggcgacgctctatcaaccggagcgtggctggggtatgcagtcacatgttgcgtcgcaggagaaagcgactgacccggaaatcgcctcactttctgaccgaatttcccggctggagcatcaactcgccgccgagaaaaagactgactattccacgttcccggagatctaa

SEQ ID NO: 460895 - DNA, 1137 bp, Shigella boydii
atggatctattgattgttttaacttacgtggcgctggcgtgggcggtctttaaaatcttccgcattccggtaaatcagtggacgctggcgacggcggcgctgggaggcgtgtttctggtgagtggtttgattttgttgatgaactacaaccacccttacacttttaccgcgcaaaaggcagtgatagcgatccctatcacgccacaggtgacgggaattgttactgaagtcactgacaagaataatcagcttattcaaaagggcgaggtgctttttaagctcgacccggttcgttaccaggcgcgagttgacagacttcaggctgacctgatgacggcgacgcataatataaagacgctgcgtgcgcagctcactgaagcgcaggccaacaccacccaggtttcagcggagcgcgaccgtctgtttaaaaattatcaacgttacttgaaaggcagccaggcggcggtgaatccgttctcggaacgtgacatcgacgatgcgcggcaaaatttcctcgcgcaggatgcgctggtgaaaggctcggtggcggagcaggcgcagatccagagccagctcgacagtatggttaacggcgagcaatcgcagattgtgagcttaagagcgcaacttactgaagcaaaatataaccttgagcagactgtcattcgcgcgccgagcaatggctacgttactcaggtactgatccgcccaggtacatacgcagctgccttgccgctgcgtccggtgatggtcttcatccccgagcaaaaacggcaaattgtcgcccaatttcggcaaaactcgctgttacgtctgaaacccggcgatgatgcggaagtggtgtttaacgcgctacctaggcaggtgtttcacggcaaactgactagtattttacctgtcgtgccaggcggttcttatcaggcgcaggggggattgcaatcattaacggtcgtgcccggcacggacggtgtgctgggaaccattgaactggaccctaacgatgatatcgatgccttactcgacggcatctacgcccaggtggcggtttactccgaccatttcagccatgtttcggtgatgcggaaagtgctgctaagaatgaccagctggatgcattatctttatttggatcattga

SEQ ID NO: 460896 - DNA, 1287 bp, Shigella boydii
atgaaacgtgtttctcaaatgaccgcgctggcaatggctttagggctggcttgcgcttcttcgtgggccgctgaactggcgaagcctcttacacttgaccagcttcaacaacaaaatggcaaagcgatagatactcgccccagcgcgttttataacggctggccacaaaccttaaatggcccttctggtcatgaacctgccgccttaaacctctctgccagctggctcgacaaaatgagcaccgaacagctcaacgcgtggatcaagcaacataacctgaaagccgatgccccggtggcgctgtacggtaatgacaaagatgtcgacgccgtcaaaacgcgactgcaaaaagcaggttttacgcatatctccattctgagtgacgcgctaagcgaaccttcccgtctacaaaaactgccgcactttgagcagctggtttatccgcaatggctgcacgacctgcaacaaggtaaagaggttacggcgaaacctgccggtgactggaaagtcattgaagcggcctggggcgctcctaagctttaccttatcagccatattcccggtgctgactacatcgataccaacgaagtggaaagcgaaccgctgtggaacaaagtttctgatgaacaactaaaagcgatgctggcaaaacacggcattcgccatgacaccacggtcattctgtacgggcgtgacgtatacgctggagcgcgtgtggcgcaaattatgctctacgcaggcgtgaaagatgtgcgtctgctggatggcggctggcaaacctggtccgacgcgggactgcctgttgagcgaggaacgccaccgaaagtgaaagcggaaccggatttcggcgtgaagatcccggcacaaccgcagttgatgctcgatatggaacaggcccgtggactgctgcatcgccaggatgcatcgctggtgagcattcgttcgtggccagaatttatcggtacgaccagcggttacagctatattaaaccaaaaggtgaaatagccggagcacgttggggacacgctggtagcgactcgacgcatatggaagattttcataacccggatggcaccatgcgcagcgccgatgatattaccgctatgtggaaagcgtggaatatcaaaccagagcagcaagtttcattctactgcggcaccggctggcgcgcgtccgaaacctttatgtacgcacgcgccatgggttggaagaatgtttccgtgtatgacggcggctggtacgaatggagcagcgatccaaaaaatccggtagcaaccggtgggtaa

SEQ ID NO: 460897 - DNA, 654 bp, Shigella boydii
atgctctgcgtgaaaaatgtttcgctacgtttaccagaaagccgcttgctgacaaacgttaactttacggttgataaaggtgacatcgtcacgttaatggggccgtctggctgtggaaaatccactctgttttcatggatgattggtgcactggctggacagttttcttgtacaggtgagctatggctcaatgagcaacggattgacatgctacccaccgcacagcgtcagattggcattcttttccaggatgcactgttatttgaccagttcagcgtcgggcaaaatttactgctggcgctaccgtcgacgctcaaggggactgccaggcgcaatgccgtgaaagacgcgcttgatcgagcgggactggctgaaacttatcaccaggaccctgcgacattatcaggcggtcagcgagcgcgggtggccctgctgcgcgcccttctcgctcagccaaaagcgttactcctggatgagccattcagccgtcttgatgtggctctgcgcgataattttcgccagtgggtgttcagcgaagttcgcgaactggcgatccccgtcgttcaggtaacgcacgatctccaggatgttcctgctgatagttctgttctggatatggcgcagtggtcagaaaattacaacaaactgcgataa

SEQ ID NO: 460898 - DNA, 1536 bp, Shigella boydii
atggttacgccgttacggtacgcattaatctttttgctgtgggcgatggtggcggtgatttatgcaccgctgatcccggcagctctcacgctgatatcgcctgcgttgtcgttgacacactggcaggcgttatttgccgatccacagttaccgcatgcattactggcaacgctggtgtcgacaaccatcgcggcggtcggggcattgttgattgccctgctggtgattgtggcgctatggcctgggccgaaatggcagcgtatgtgcgcccgtctgccgtggctgctcgccattccccatgtggcttttgccaccagcgccctgctgctctttgctgacggagggctgctatatgactatttcccgtatttcactccgccaatggaccgatttggcatcggtctgggcctcacccttgcagtgaaagaaagcgcatttctgctgtggatcttagcggcagtattgagcgaaaaacggctgttgcagcaggtcattgtgctggattcgctgggctacagccgctggcaatgcctgaactggctgctgttgccctccgtcgcgccttcgctggcaatggcgatgctggcgattgttgcctggtcgctttcggtcgtggatgtggcgattattcttgggccaggtaatccaccgacgctggcagtaattagctggcagtggttaactcagggcgacgcggatcaacaaacgaaaggcgcactcgccagtctgctgctgatgctgttactcgccgcctacgttttgctgagctatctgctatggcgcagctggcggcgcactattccccgcgtagatggcattcgcaagcctgccacacctttattaccaggcactacgctggcgagttttttacccttaaccggtgtgctgtgtgtggttctgctggcgatcctcgcggatcagtcgacgatcaatagtgaagcactcatcaacagtctgacaatggggctggtagcaacattcatcgctttgctcctgttactgctgtggctggaatgggggccacagcgtcgccagttgtggctatggttgcccattctattgcccgctctgccactggtggcgggccagtacacgctggcgctatggctgaacctggatggaagctggacggcggtggtctgggggcatctgctgtgggtaatgccgtggatgctgtttatcctgcaacccgcctggcagtgcattgattcacggttaattttgattgcgcaaacactgggctggtcgcgggccaaaatcttcttttacgtgaaatgcccactcatgttgcgccctgtgctgattgccttcgcggtgggattttcagtcagtattgcgcagtatatgccgacgctgtggctgggcgcggggcgttttccgacgctcaccactgaggcggtggcattaagcagcggcggcagcaacggtattctcgccgcccaggctttatggcaactgttgttaccgcttattatttttgccctgaccgcgttagtcgcaaaatgggtaggttatgtcagacaaggactccgctaa

SEQ ID NO: 460899 - DNA, 1167 bp, Shigella boydii
atgcgccattgtgggtggttgctgggattgttatcgctgttttctttggcaacacatgccagtgactggcaggaaattaaaaatgaggccaaagggcaaaccgtctggtctaacgcctggggcggcgataccgcaattaaccgctatctcgactgggttagcggcgagatgaaaacccattacgctataaacctgaagattgttcgtctcgcggatgccgcagacgcggtgaagcgcattcagaccgaagctgctgccggtcgtaaaacgggcggctcggtggatctgctctgggtgaacggcgaaaacttccgcaccttaaaagaggccaatttattacaaacgggctgggcggagactctgcccaactggcgctatgtcgacacacagctgccggtgcgggaagatttttcagtgccgacacaaggtgcggaatcgccctggggcggcgcacaactgacgtttatcgcccgccgcgatgttacgccacagccaccacaaacgccgcaagccttactggagtttgctaaagccaatcccggcacggttacttatccgcgcccaccggactttaccggcacggcgtttcttgaacagttgctgattatgctgacgccagatcccgccgcattaaaagaagcgccggacgatgcgactttcgcccgtgtcactgcgcccttgtggcaatatcttgatgcactgcatccgtatttgtggcgcgaaggaaaggatttcccgccttcgcccgcgcggatggatgctctgctgaaagccggcacattgcgcctgtcgctgacctttaaccccgcgcatgcgcagcaaaaaatcgccagctgcgatttgccggcaagcagttacagttttggctttcgcgaggggatgattggcaacgtgcatttcgtcaccattccagccaacgcgaatgccagtgctgcggcgaaggtagttgccaattttctgctctcacccgatgcgcaactgcgtaaagcagatcccgttgtctggggcgatccttctgttctcgatccgcaaaaactgcctgacgggcagcgcgaaatattgcaatcaagaatgccgcaggatctgccgccggtactggctgaaccgcacgcaggatgggtgaatgcactggaacaagaatggttacgccgttacggtacgcattaa

SEQ ID NO: 460900 - DNA, 549 bp, Shigella boydii
atgggtttaccgccgcttagcaaaattcctttcattttacgtccgcaggcgtggctgcatcgtcgccattacggcgaggtgctaagcccgattcgctggtgggggcggatcccgtttatcttttatttggtgtcaatgtttgttgggtggctggagcgcaaacgctcaccgctcgatccggtagtgcgatcgcttgtcagcgcgcgcattgcgcaaatgtgcctgtgtgagttttgtgtggatatcaccagtatgaaagtcgccgagcgtaccggcagcaccgataaactgctggcagtggctgactggcggcaaagcccgctctttagcgatgaagaacggctggcgctggagtacgccgaagccgcaagcgtcacaccgccaacagtcgatgatgccctgcgtacccgactggctgcgcattttgacgctcaggcgctcaccgaactgacggcattgatcggcctgcaaaacctgtcggctcgttttaattctgccatggacattcccgctcaggggctgtgccgtattccggaaaaacgttcttaa

SEQ ID NO: 460901 - DNA, 708 bp, Shigella boydii
atgatgaagatgcaatcgcgtaaaatctggtactaccgtataaccctcatcatcctgttgttcgctatgctgctcgcatgggcgctgcttcccggcgtccatgagtttatcaatcgcagcgttgcggcgtttgccgccgtggaccaacagggtatagaacgctttattcagtcttacggcgcactggcggcagttgtctcgttcttgttgatgactttacaggccattgctgcaccgctacctgcgtttttgatcacctttgccaatgcgtcgctgtttggcgcgttctggggcggcttgctgtcgtggaccagttcgatggccggcgcggcgctgtgcttttttatcgccagagtgatgggccgcgaagtggtggaaaaattaaccggcaaaaccgtgcttgacagtatggacggctttttcactcgctacggcaaacacaccatcctggtctgtcggttattgccttttgtccctttcgatccaatcagctatgctgccggtctgacttcaatacgttttcgctcgttttttatcgccaccgggcttggtcaattaccggcgactattgtttattcctgggcgggcagcatgttaacaggcggtactttctggtttgtcaccggactgtttattctgtttgccctgaccgtggtgatttttatggcgaagaaaatatggcttgagcgccagaagaggaatgactga

SEQ ID NO: 460902 - DNA, 519 bp, Shigella boydii
atgtcgcaacattattcagtgtcatggaaaaaaggactggctgcactctacttactggctgttgccgggcttagcggctgcgatcaaaaagagaatgcggcggcaaaagtggaatacgacggactttcgaacagccaaccgctgcgcgtcgatgccaataaccatacggtaaccatgctggtgcaaattaatggtcgtttcctcaccgacgacactcgtcacggtattgtgtttaaagatggctccaacggacataaatcgctgtttatggcttatgcgaccccgaaagcattttatgaagccctgaaagaggcaggtggtacgccgggcgaaaacatgacgatggataataaagaaacgactcatgtcacaggcagcaaactggatatttcggtcaactggcaaggggcggcaaaagcgtattccttcgatgaagtgattgttgacagtaatggcaagaaactggacatgcgctttggcggtaatttaacggcagcagaagagaagaaaacgggttga

SEQ ID NO: 460903 - DNA, 1089 bp, Shigella boydii
atgagaaatcgattgattgcggcgatattgggcttgtttggcacgctcactggcgttcaggcagctcctgacgtgaccagtgaaattacgtatgatttggcatctggtagagcggattattacttctggaaggatgaagcgtcggcaggaaataatggatatatgtggtatgaatgttcgtatcctgacctccaacaaacctgtacagctaatggaaatatatcgacagtacaaatctatttaactgaacaacgcagtgggatgcgttggccggtaaaactcaaaggatttaaaacagccattgtaagtagcgatgaagcgccgccaggatgcaaggggggcaaagggcttcagacgaatcttaaggattctaatagatcttcatgtacagaagatggtcaacattattatatatacgatacaaagtttcttacgctctaccttgagcagacagagatgaagaatttgccgattggtggcgtctggaaggggaaagttaaattacattcgaacagcccggcccaggactatttcgcaaatattaccctgaatacgctcgaccccaaccatattgacgtgttcttcccggagttcgcccacgccacgccaagggtgcagttagacttgcatccaacaggaagcgttaacggcagcaactacgcgcaagatctgaccatgttggacatgtgcctgtacgatggttttaacggtaatgccatcagttatgaaatcatgctcaaagatgaagggcgaccagctgcagggcgcagagacggtgacttctctatctatcgtcagggaggaacctctaccgacgagggagaacgcattgattaccgggtcaaaatgtacaacccggaaaccggtgggcaaattgatgtgcgcaataatgaaaatatggtctggaacagcattaacctgaaaagtgtgcgtccggtggtactgcccggtattcgctatgccgtgatgtgtgtgccgacacccttgactctggcagtcgataaattcagcgtgatggataaacaggccgggtactacatgggcaaattgtcagtaatctttacgccttccttgccaaccatcaattaa

SEQ ID NO: 460904 - DNA, 1299 bp, Shigella boydii
atgcgtaaaattaaagggttacgttggtatatgatcgcactggtgacgcttggcaccgtgcttggttacctgacgcgtaacactgtggcggcagctgagccaactctgatggaagagttaaacatctccacccaacagtattcctatatcatcgcagcctattctgctgcttatacggtcatgcaaccggtagcgggctatgtactggatgtgctgggtacgaaaatcggttatgcaatgtttgctgtactgtgggccgtattctgtggtgcaaccgcgctggctggtagcaggggtggcctggcgattgctcgtggtgcagtcggtgccgcggaagcagcgatgatcccggcgggtctgaaagccagctccgaatggttcccggcgaaagagcgttccatcgcggtaggttactttaacgtaggttcttcgattggtgcgatgattgcgccgccgctggtggtatgggcaatcgtaatgcacagctggcagatggcatttatcatctccggtgcattgagctttatctgggcgatggcatggctgattttctataaacatccgcgcgaccagaagcatctgaccgatgaagaacgcgactatattattaatggtcaggaagcccagcaccaggtgagcacggcgaagaaaatgtccgttggtcagatcctgcgtaaccgtcagttctggggtatcgcgctgccgcgtttcctggcagaaccagcctggggtacttttaacgcgtggatcccgctgttcatgtttaaagtttacggctttaacctgaaagagatcgcgatgttcgcctggatgccgatgctgtttgctgacctcggttgtatcctcggtggttacctgccgccgctgttccaacgttggtttggtgtgaacctgatcgtttcccgtaagatggtcgtaacgctgggtgcagtgctgatgattggcccgggtatgatcggcctgttcaccaacccgtatgtcgcaattatgctgctgtgtatcggtggttttgctcatcaggcactgtctggcgcgctgattacgctctcttctgacgtgttcggtcgtaacgaagtggcgacggcgaacggtttaaccgggatgtccgcatggctggcaagtacgctgttttcgctggttgtcggtgcactggctgacaccatcggcttcagcccgctgttcgcagtactggcagtgttcgacctgttaggtgcgctggttatctggaccgtgttgcagaacaaaccggcgattgaggtagcgcaggaatcacataacgatcccgcaccgcaacattaa

SEQ ID NO: 460905 - DNA, 1413 bp, Shigella boydii
atgactccgtttatgactgaagatttcctgttagataccgaatttgcccgccgtctgtatcacgactacgcaaaagaccagccgattttcgattaccattgccatttgccgccgcagcagattgcggaagactatcgttttaaaaacctgtatgacatctggctgaaaggcgatcactacaaatggcgcgctatgcgtaccaacggtgtggccgagcgtctgtgtaccggtgatgcgtctgaccgtgaaaaatttgacgcctgggcggcgactgttccgcacactatcggcaacccgttataccactggacgcacctcgaactgcgtcgtccgtttggtatcactggcaaattgctttctccgtcaactgccgatgaaatctggaacgaatgtaacgaactgctggcgcaggataacttctccgcgcgcggcatcatgcagcagatgaacgtgaaaatggtcggcaccaccgatgacccgatcgattctctggagcatcacgcagagatcgccaaagacggctctttcaccatcaaagtgctgccgagctggcgtccggacaaagccttcaacatcgaacaggcgacctttaacgactacatggcgaagctgggcgaagtttccgataccgacattcgccgctttgctgacctgcaaactggcttgaccaaacgtctggatcacttcgccgctcacggctgtaaagtgtctgaccatgcgctggacgtggtgatgtttgctgaagcgaacgaagcggaactggacagcattctggcgcgccgtctggctggcgaaaccctgagcgagcacgaagtggcacagttcaaaactgcggtactggtgttccttggtgccgaatatgcacgtcgcggctgggtacagcagtaccacattggcgcgctgcgtaataacaacctgcgtcagttcaaactgctggggccggatgtaggctttgactccatcaacgaccgtccgatggcagaagagttgtctaagctgctgagcaagcagaacgaagaaaacctgctgccgaaaaccattctgtactgcctgaacccgcgcgataacgaagtgctgggcaccatgatcggtaacttccagggcgaaggtatgccgggcaaaatgcagttcggttccggctggtggtttaacgatcagaaagacggtatggaacgtcagatgacccaactggcgcagctcggtttgctgagccgctttgtcggtatgctgactgacagccgtagcttcctgtcatacacccgtcacgaatacttccgccgcattctgtgccagatgatcggtcgctgggtggaagcgggcgaagcaccggcggacatcaacctgctgggcgagatggtgaaaaatatttgctttaacaatgcgcgtgactacttcgccattgaactgaactaa

SEQ ID NO: 460906 - DNA, 1488 bp, Shigella boydii
atgcaatacatcaagatccatgcgctggataacgtcgcggtcgctttagcggatttggctgaaggcacagaagtcagtgtcgataaccagactgttacgctgcgccaggatgttgctcgtggacataaatttgcgttaacggatatcgcaaaaggggccaatgtcatcaaatatggcctgccgattggttatgcattggcggatattgcggcgggggaacacgtccacgcccacaatacgcgcacgaatctgagcgatctggatcagtatcgctatcaacctgattttcaggatctgcctgcgcaagcggcagatcgtgaagtgcagatctatcgtcgcgctaacggcgatgtcggggtgcgtaacgagctgtggatcctgccaaccgtgggctgtgtcaacggcatcgcgcggcagatccagaaccgttttctgaaagagaccaacaacgctgaaggtaccgacggtgtgttcctcttcagccacacctacggctgctcacagctgggcgacgatcacattaatacccgcaccatgctgcaaaacatggtgcgccacccgaacgcaggcgcagtgctggtgattggtctgggctgtgaaaacaaccaggttgccgcattccgtgaaacgctgggcgatatcgatcctgaacgcgttcatttcatgatctgccaacagcaggatgatgagatcgaagccgggatcgagcatttgcatcagctgtataacgtgatgcgcaacgataaacgcgagccaggcaaactcagcgaactgaagtttggtctggagtgcggtggttctgacggtctttctggtattactgctaacccgatgctggggcgtttctctgactacgtgattgctaacggcggtactaccgtactgaccgaagtgccggagatgtttggcgcagagcagttgctgatggaccattgccgcgacgaagcaacgtttgaaaaactggtcaccatggtcaacgactttaaacagtactttattgcccatgatcagccgatctacgaaaacccatcaccggggaacaaagcgggcggtatcaccacgctggaagacaaatcacttggctgtacccagaaagcgggttccagtgtcgtggttgacgtgctgcgttacggcgagcgtctgaaaacgccagggctgaacttgttaagtgcgccgggtaacgatgccgtagcgaccagcgccctggcgggtgcgggctgccatatggtgctgttcagtactggtcgcggcacgccatacggtggatttgtgccgacggtgaaaatcgccaccaacagtgaactggcggcgaagaaaaaacactggctcgactttgacgcgggtcagctgatccacggtaaagcgatgccgcagttgctggaagaatttatcgacaccatcgttgagtttgccaacggtaaacaaacctgcaacgagcgtaacgacttccgcgaactggcgatcttcaaaagcggcgtaacgctataa

SEQ ID NO: 460907 - DNA, 237 bp, Shigella boydii
atgtacgccaataacggcgctatagaccgaaagctgctttttgaagcgacgttcgtcacgattgaaaaatgttgtgataccaatcagaaaggcgatgaaacccacgccctgggccagccaatacgcggtcatgataaatccttatcaggtatggaaaagcaaacggcgcttcacattatgaaacgccgttttttattaacaactcatttcgactttatagcgttacgccgcttttga

SEQ ID NO: 460908 - DNA, 651 bp, Shigella boydii
ttggcgattcgtcttcacaaactggctgttgcgttaggtgtctttattgttagcgctcctgccttttcgcatggtcatcactcacacggcaaacccttaacagaggtcgaacaaaaagctgctaatggtgtttttgatgatgccaatgtacaaaaccgaacgctcagtgactgggatggagtctggcaatccgtttatcctttactgcaaagtggcaaacttgaccccgtctttcagaagaaagcggatgcagataaaactaaaacatttgctgaaattaaagattattatcacaaaggttatgcaacagatatcgagatgattggcattgaggacggcattgttgaattccatagaaataatgaaacaacatcctgtaaatatgattacgatggatacaaaatactcacctataaatcaggcaagaaaggcgttcgttacttattcgaatgtaaagatcctgaaagcaaagcccctaaatatatacaatttagcgatcatataattgcaccacgaaaatcatctcattttcacatttttatgggtaatgattcacagcaatctttattaaatgaaatggaaaactggccaacgtattatccatatcagttgagtagcgaagaagtggtcgaggaaatgatgtctcattga

SEQ ID NO: 460909 - DNA, 636 bp, Shigella boydii
atgcgtctgacagcaaaacaggtgacatggctgaaagttagcctgcatcttgccggattgttgccgtttctctggctggtctgggcgatcaatcacggtggactgggtgccgatccggtgaaagatattcagcattttaccggtcgcactgcactgaaatttttgctggcgaccttgttaatcacacctctggcacgctacgcaaaacagccgttattgatacgcactcgccgcctgttaggcttatggtgctttgcctgggcgacactgcatttaaccagttacgcattgctggagctgggcgtgaataatctggcgttattaggcaaggagttaattacccggccttatttaacgttaggaattatcagctgggttattttgcttgctttagcgtttacttcaacccaggcgatgcagcgaaaactcggcaagcactggcaacagttgcataatttcgtctatcttgtcgcgatcctggccccaatacattatctgtggtcagtgaagattatttcaccgcagccgctcatctacgctgggctggctgtactgcttttagccttacggtataagaagttgcgttccctttttaaccggttacgcaagcaggttcacaacaaattatctgtataa

SEQ ID NO: 460910 - DNA, 1005 bp, Shigella boydii
atgaaaaagaatcaatttttaaaagaatcagatgttacggccgagtcggtattctttatgaagcgtcggcaggtgttaaaagcactgggcatcagtgcagctgcactttctttgcctcacgctgcgcatgccgatctgcttagctggtttaaagggaacgatcgcccgcccgcccccgccggaaaaccgctggagttcagcaagcctgccgcctggcaaaataacctgccactgacgccagtagataaagtctccggttataacaacttctatgaattcgggctggataaagccgatcccgccgctaatgctggtagcctgaaaaccgatccatggacactgaaaatcagcggcgaagtggcaaaaccattgaccctcgatcacgatgatttaacccgtcgcttcccgctggaagagcgtatttatcgtatgcgctgcgtggaggcatggtcgatggtggtgccgtggattggttttccgctgcacaaattgctggcgcttgccgaactcaccagcaatgcgaagtatgtcgctttcgaaacaatttatgcaccggaacaaatgccaggccagcaggaccgctttatcggcggcgggctgaaatatccttatgtcgaaggattgcgtctcgacgaagcaatgcatccgctcacactgatgaccgtgggtgtttatggcaaggcgttaccgccacaaaatggcgcgccggtacgactgattgtgccgtggaaatatggctttaaagggattaaatcgatagtcagtattaagctgacccgcgagcgtccgccaaccacctggaatctggcagcgcctgacgaatacggtttttacgccaacgttaatccgcatgttgatcacccgcgctggtcacaggctaccgaacgatttattggttcaggcggcatcctcgatgttcagcgccagccaacgctactgtttaatggttacgccgaccaggtggcatcgctgtatcgtggcctggatttgcgggagaatttctga

SEQ ID NO: 460911 - DNA, 414 bp, Shigella boydii
atgttaaagcgttatttagtactctcggtagcaacggcagcattttcattaccttctttggtttatgccgcacaacaaaacattcttagcgtgcacattttgaaccagcaaataggaaaacccgctgccgacgtgacagtcactcttgaaaagaaatcggacaacggctggttacaacttaataccgccaaaacagataaggatggacgaattaaggcactgtggcccgagcaaactgcaactacgggcgattaccgtgtcgtatttaaaaccggggactatttcaagaaacaaaatcttgaaagtttcttccctgagatccccgttgaatttcatattaataaagtgaacgagcattatcatgtgcctttattacttagccaatatgggtattcaacctatcgtggcagttaa

SEQ ID NO: 460912 - DNA, 759 bp, Shigella boydii
atgtccagggtaaccttacagcagcattacaattttgtaatgaaccaggctgtttctataacatatgatttatggcatattattttcatgaagattttacttattgaagataatcaaaggacccaggaatgggtaacacaagggctttccgaagcgggttatgtcattgatgccgtttctgatggcagagatgggctttatcttgcgctgaaggatgattatgcattgatcattctggatattatgcttccgggtatggatggctggcagatcttacaaacgttaagaacagcaaagcaaacccctgttatttgccttactgcaagggattctgtcgatgacagagtcagagggctggacagtggagcaaatgattatctggtaaaacctttttcattttctgagttgctggcaagggttcgggcacaattaaggcaacatcacgctttgaattcaacattagaaatcagtggcttaagaatggactctgtaagtcaaagtgtgagcagggacaatatcagtattacactgacgcgcaaggagtttcagttactttggctactggcctccagagctggcgaaattatacccagaacggttattgcgagtgaaatttggggaatcaactttgatagtgataccaatacggtggatgtcgccattcgcaggctccgcgcaaaagttgatgatccttttcctgaaaagctaatcgccacaatacgggggatgggctattcattcgtagcggtaaaaaaataa

SEQ ID NO: 460913 - DNA, 1359 bp, Shigella boydii
atgaaaagattgtctataaccgtccgtttaaccttgctttttatattgctgctgtctgttgctggcgctggaattgtatggactctctataatggcctggcaagtgagttgaaatggcgcgatgatacaacactcattaaccggacagcgcagatcaagcagttgttaattgatggggtaaatccagatacgttacctgtgtactttaaccggatgatggatgttagtcaggatatcttgatcattcatggtgatggtatcaataaaattgttaaccggacaaatgtcagtgatggcatgttaaataacatacctgctagtgagacaatcagcgcagctggcatttacagaagcattattaatgacactgagattgatgctttacgaattaatattgatgaagtttcgccatcattaacggttactgtggctaaattggcttcagccagacataacatgcttgaacagtataaaattaatagcattataatttgcattgtcgccattgtactttgctcagtattaagtccgctgttaatcagaacgggattacgagagatcaaaaagttgagtggtgtaacggaagcgctgaattataacgatagccgggagcctgttgaggttagcgtattaccgagagaactaaaacctcttgggcaggcgttgaataaaatgcatcaagccttagtcaaagattttgaacgcctaagtcaatttgctgacgatctcgctcatgaacttagaacgcccattaatgcattactgggtcagaatcaggttacgctcagtcaaaccagaagtatcgctgaatatcaaaaaacaattgccggtaacattgaagagctggaaaatatttcgcggttaacagagaacatactgtttcttgcccgggcagataaaaacaatgttttggtgaaactggactcgctttctctcaataaggaagtcgaaaatttgttggattatcttgaatacctttcagacgagaaagagatttgctttaaggtcgagtgcaatcagcaaatctttgcggataaaattttactgcaacgaatgttatcgaatcttattgttaatgccattagatattcaccagaaaaatcgcgtattcatataaccagttttcttgataccaacggctatcttaatattgatgtcgccagtcctggaacgaaaattcatgagcctgaaaaactcttccgtagattttggcggggagataattcgcgtcattccgtaggtcagggacttggtctttctttagtcaaagcgattgccgaattacatgggggaagtgctacgtatcactatctcaataaacataatgtgttccggattatgttaccgcaaagaaattaa

SEQ ID NO: 460914 - DNA, 852 bp, Shigella boydii
atgactgttcaaacaagtaaaaatccgcaggtcgatattgctgaagataatgcgttcttcccttcagaatattcgcttagccaatataccagtcccgtctctgatcttgatggcgtggactatccaaaaccgtatcgcggtaagcataaaattctggtgatcgccgcggacgaacgttatttgccaaccgataacggaaaactgttctcgaccggtaaccatccgattgaaacgttgctgccgttgtatcatctccatgctgcaggtttcgaattcgaagtggcgaccatttccggtctgatgaccaagtttgaatactgggctatgccgcacaaagatgaaaaagtaatgccattctttgagcagcataaatcgttgttccgcaatccgaagaaactcgcggatgttgtcgccagcctcaacgctgatagcgaatatgcagcaatctttgttcctggtggtcatggcgcacttattggtttacctgaaagccaggacgtagctgccgctttacagtgggcaatcaaaaatgaccgttttgttatctccctttgccacggcccggcggcttttctggcgcttcgccacggcgataacccactgaatggttattccatttgcgcattcccagacgccgcagacaaacaaacgccagagataggctatatgccgggtcatctcacctggtacttcggcgaagagctgaagaaaatgggcatgaacattattaatgacgacatcaccgggcgagtacataaggaccgtaaagttctcaccggcgacagtcctttcgcagcgaatgcgttgggtaaactggcggcgcaggaaatgctggcagcttatgcgggttaa

SEQ ID NO: 460915 - DNA, 366 bp, Shigella boydii
gtggatgagaacaacagcgcagcaggctatggagatggtccttccactgcggcgggtggctttatgtatctcggcttaagtgaagttacctttgatattgccgacggaaaaacgctggttatcggcaatacagagaatgacggagctgttgactctattgctggtaccgggttgatcaccaaaacaggttccggcgatctggtacttaatgcagataacaatgactttactggcgagatgcagattgaaaacggtgaagttaccctgggccgcagcaactccctgatgaatgtcggcgatacgcattgccaggacgatccgcaagactgctacggtctgacgatagggagtattgataagtactag

SEQ ID NO: 460916 - DNA, 453 bp, Shigella boydii
gtggatcgttaccattcgtcggggattatcgcctcgctggaagccgggtatcagtggttaccggggcgtggtgtggtgattgaaccgcaggcgcaggtgatttatcaggacgtgcagcaggatgattttaccgccgctaaccatgcgcgcgtgtcacaatcgcagggggatgatattcagacgcggctgggtttacacagcgaatggcgtaccgcggttggtgtcacaccaacattagatctgaattattatcacgatccccatgcgacggaaattgaagaagatggcagcactatcagtgacgatgcggtgaagcgacggggtgaaataaaagtgggagtcacgggcaatatcagtcagcgagtgtccctgcgcggcagcgtggcgtggcagaaagggagtgatgattttgcccagacggcagggtttttgtcgatgacggtgaaatggtaa

SEQ ID NO: 460917 - DNA, 723 bp, Shigella boydii
atgaatgccgaaaaatcgccggaaaaccataacgtagaccacgaagagatcgctaaatttgaagccgtcgcctcccgctggtgggatcttgaaggtgagttcaaaccgttgcaccgcattaacccgctgcgtctgggctatattgccgagcgtgctggcggtttatttggcaaaaaggtgctcgatgtcggttgtggcggcggcattctggccgagagtatggcgcgcgaaggcgcgacggtgaccggtctggatatgggctttgagccattgcaggtggcaaaactgcacgcgctggaaagcggcattcaggtggattatgtgcaggaaaccgtggaagagcacgcggcaaaacatgccgggcagtatgatgtggtgacctgcatggagatgctggagcacgtccccgatccgcagtcagtggtcagagcctgtgcgcaactggtgaaaccaggcggcgatgtctttttctcgacgcttaaccgcaacggcaagtcatggctgatggcggtggttggcgcggaatatattttgcgcatggtgcccaaaggcacgcatgatgtgaagaagtttattaaaccggcagaactgcttggctgggtagatcagacaagccttaaagagcgacatataaccgggctacattacaacccgctcactaatacttttaaactcggccccggcgtggatgtgaactatatgctgcacacgcagaataagtga

SEQ ID NO: 460918 - DNA, 2628 bp, Shigella boydii
atgagcgaccttgcgagagaaattacaccggtcaacattgaggaagagctgaagagctcctatctggattatgcgatgtcggtcattgttggccgtgcgctgccagatgtccgagatggcctgaagccggtacaccgtcgcgtactttacgccatgaacgtactaggcaatgactggaacaaagcctataaaaaatctgcccgtgtcgttggtgacgtaatcggtaaataccatccccatggtgactcggcggtttatgacacgatcgtccgtatggcgcagccattctcgctgcgttacatgctggtagacggtcagggtaacttcggttccatcgacggcgactctgcggcggcaatgcgttatacggaaatccgtctggcgaaaattgcccatgaactgatggccgatctcgaaaaagagacggtcgatttcgttgataactatgacggcacggaaaaaattcccgacgtcatgccaaccaaaattcctaacctgctggtgaacggttcttccggtatcgccgtaggtatggcaaccaacatcccgccgcacaacctgacggaagtcatcaacggttgtctggcgtatatcgatgatgaagacatcagcattgaagggctgatggaacacatcccggggccggacttcccgacggcggcaatcattaacggtcgtcgcggtattgaagaagcttaccgtaccggtcgcggcaaggtgtatatccgcgctcgcgcagaagtggaagttgacgccaaaaccggtcgtgaaaccattatcgtccacgaaattccgtatcaggtaaacaaagcgcgcctgatcgagaagattgcggaactggtaaaagaaaaacgcgtggaaggcatcagcgcgctgcgtgacgagtctgacaaagacggtatgcgcatcgtgattgaagtgaaacgcgatgcggtcggtgaagttgtgctcaacaacctctactcccagacccagttgcaggtttctttcggtatcaacatggtggcattgcaccatggtcagccgaagatcatgaacctgaaagacatcatcgcggcgtttgttcgtcaccgccgtgaagtggtgacccgtcgtactattttcgaactgcgtaaagctcgcgatcgtgctcatatccttgaagcattagccgtggcgctggcgaacatcgacccgatcatcgaactgatccgtcatgcgccgacgcctgcagaagcgaaaactgcgctggttgctaatccgtggcagctgggcaacgttgccgcgatgctcgaacgtgctggcgacgatgctgcgcgtccggaatggctggagccagagttcggcgtgcgtgatggtctgtactacctgaccgaacagcaagctcaggcgattctggatctgcgtttgcagaaactgaccggccttgagcacgaaaaactgctcgacgaatacaaagagctgctggatcagatcgcggaactgttgcgtattcttggtagcgccgatcgtttgatggaagtgatccgtgaagagctggagctggttcgtgaacagttcggtgacaaacgtcgtactgaaatcaccgccaacagcgcagacatcaacctggaagatctgatcactcaggaagatgtggtagtgacgctctctcaccagggctacgttaagtatcagccgctttctgaatacgaagctcagcgtcgtggcgggaaaggtaaatctgccgcacgtattaaagaagaagactttatcgaccgactgctggtggcgaacactcacgaccatattctgtgcttctccagccgtggtcgcgtctattcgatgaaagtttatcagttgccggaagccactcgtggcgcgcgcggtcgtccgatcgtcaacctgctgccgctggagcaggacgaacgtatcactgcgatcctgccagtgaccgagtttgaagaaggcgtgaaagtcttcatggcgaccgctaacggtaccgtgaagaaaactgtcctcaccgagttcaaccgtctgcgtaccgccggtaaagtggcgatcaaactggttgacggcgatgagctgatcggcgttgacctgaccagcggcgaagacgaagtaatgctgttctccgctgaaggtaaagtggtgcgctttaaagagtcttctgtccgtgcgatgggctgcaacaccaccggtgttcgcggtattcgcttaggtgaaggcgataaagtcgtctctctgatcgtgcctcgtggcgatggcgcaatcctcaccgcaacgcaaaacggttacggtaaacgtaccgcagtggcggaatacccaaccaagtcgcgtgcgacgaaaggggttatctccatcaaggttaccgaacgtaacggtttagttgttggcgcggtacaggtagatgactgcgaccagatcatgatgatcaccgatgccggtacgctggtacgtactcgcgtttcagaaatcagcatcgtgggccgtaacacccagggcgtgatcctcatccgtactgcggaagatgaaaacgtagtgggtctgcaacgtgttgctgaaccggttgacgaggaagatctcgataccatcgacggcagtgccgcggaaggggacgatgaaatcgctccggaagtggacgttgacgacgagccagaagaagaataa

SEQ ID NO: 460919 - DNA, 258 bp, Shigella boydii
atggtggcgaaaattaatctcttatcacggcttacgccgcttttattcgtgttcgctccttttttggcacagtcaaatatgactgtttatcctatggctgtttccattaatagtcaggatgaaggcaacgttcgcgtaatatctaaaagtaatgaagttcagtacatcaaggcgacagtattccgtatcgataatccatctacgcctcaggaaaatgaagttgagattaaatccggggtaatgctgccaacttactga

SEQ ID NO: 460920 - DNA, 777 bp, Shigella boydii
atggaaatcactgaaccacgccgtttgtatcaacaacttgccgctgacctgaaagagcgcattgaacagggcgtctatctggtgggtgataaactgcctgccgaacgctttattgccgatgaaaagaacgtcagccgaacggtagttcgtgaagccatcatcatgctggaagttgaaggctatgtggaggtgcgtaaaggttcaggtattcatgtggtttccaaccagccgcgccatcagcaggcggctgacaataatatggaattcgccaattacggtccgtttgagttgcttcaggctcgccagctcatcgaaagtaatattgccgagttcgcggcaactcaggtaacgaaacaagacatcatgaaactgatggccattcaggaacaggcgcgcggcgaacaatgcttccgtgattccgagtgggatttacagttccacattcaggtagccctggcgacgcagaactccgccctggcggccatcgttgaaaaaatgtggacccagcgtagccataacccgtactggaaaaaactacacgaacacattgattcccgtaccgttgataactggtgtgatgaccacgatcaaattctcaaggcgttaattcgcaaagatccccatgctgctaagctggcaatgtggcagcatctggaaaacaccaaaatcatgttatttaacgaaaccagcgaggatttcgagttcaatgccgaccgctatctattcgccgaaaacccggtagtgcatctcgatacggccaccagtggcagtaaatga

SEQ ID NO: 460921 - DNA, 663 bp, Shigella boydii
atggaacttttgacccaattgctgcaagccctgtgggcgcaggattttgaaaccctggccaatccatcgatgattggcatgttgtattttgtcttgtttgtaattttgttccttgaaaacggcttgcttccagcggcctttttaccgggcgacagtttactggtattggtcggcgtgttgattgcgaaaggcgcgatgggttacccgcaaacgattctgctgctgaccgttgccgccagcctcggctgctgggtcagctatattcaggggcgatggctgggcaatacccgcaccgtacaaaactggctatctcatttacccgcgcattatcatcaacgcgcacaccatctttttcataaacacggtttatcggcgctgttaattggtcgctttattgcgtttgtcagaacactgctgccgacgattgccgggttatcagggctgaataacgcgcgctttcagtttttcaactggatgagcggtctgctgtgggtattgatcctgacaactctgggttacatgctcggcaaaacgccggtatttttaaagtacgaggaccagctgatgtcatgcctgatgctgctcccggtggtgctgctggtgtttggcctggcaggttctctggtcgtgttatggaaaaagaaatatggaaatcgggggtaa

SEQ ID NO: 460922 - DNA, 384 bp, Shigella boydii
atgcaaatacctcgcatgtcgcttcgccagctagcctggtccggcactgttttacttctggtcggcacgctgttgctggcctggtccgcggttcgccagcaagagtctacgctggcgattcgtgccgttcatcaaggcacaacgatgccagacggtttttcgatctggcatcaccttgacgctcatggcattcctttcaaaagtatcacccccaaaaacgacactctgttaattacatttgactccagcgaccagagcgccgccgcaaaagcggtcctcgacagaacattgccccatggctacatcattgcgcagcaggacaataacagtcaggctatgcagtggctgacccggttacgggataactctcatcgcttcggataa

SEQ ID NO: 460923 - DNA, 369 bp, Shigella boydii
atgaaataccgcatcgctttagctgtttctctctttgctcttagtgccggtagttatgccactaccctgtgtcaggaaaaggagcaaaatatccttaaggagatcagctatgccgaaaaacaccaaaaccagaatcgtattgacggtctgaataaagccctgagtgaagtccgggccaactgtttagatagccagctgcgtgccgatcatcacaagaaaatcgcaaagcagaaagatgaggtggcggaacgccagcaagatttagccgaggcgaagcaaaaaggcgatgccgataagattgccaaacgcgaacggaaactggcagaagcgcaggaagagctgaaaaagctggaagcgcgcgactactaa

SEQ ID NO: 460924 - DNA, 306 bp, Shigella boydii
atgtcgaaagaacacactacggaacatctgcgtgctgagttgaaatccctttccgatacgctggaagaggtgcttagctcatctggcgagaagtcgaaagaagagttgagtaagattcgtagcaaagcggagcaggcactgaaacagagccgttatcgcctgggtgaaaccggtgatgccatcgccaaacaaacccgtgtcgcggcggcgcgtgctgatgagtatgtgcgtgaaaatccgtggaccggcgtgggaattggcgctgcaatcggtgtagtgctcggcgttctgctgtcgcgtcgttaa

SEQ ID NO: 460925 - DNA, 405 bp, Shigella boydii
atggcggacactcatcacgcgcaagggcccggtaaaagcgttctgggcatcgggcagcgaattgtttccatcatggttgaaatggtggaaacacgtctgcggctggcggtggtggagctggaagaggaaaaagctaatctctttcaacttttactgatgctgggcctgacgatgcttttcgctgcatttggtcttatgagcctgatggtgctaattatttgggcggttgatccgcaatatcgcctgaatgcgatgattgccaccaccgtggtgttgctgctactggcactgatcggcggtatctggacgttacgtaaatcgcgtaaatccaccttgctgcgccatacacgccatgagctggcaaacgatcggcaactgctcgaggaggagtcccgtgagcagtaa

SEQ ID NO: 460926 - DNA, 300 bp, Shigella boydii
gtgagcagtaaagtcgaacgtgaacgacgtaaggcgcaactgcttagccagatccagcaacaacggctggatctttccgccagtcgtcgtgaatggctggaggcaacaggcgcttacgatcgtcgctggaatatgctgctaagtctgcgctcctgggcgctggttggcagtagcgtgatggcgatctggacgattcgccatcctaatatgctggtccgctgggccagacgcggttttggcgtatggagcgcctggcgtctggttaaaacgaccctcaagcagcaacagcttcgcggttaa

SEQ ID NO: 460927 - DNA, 483 bp, Shigella boydii
atgattctctccatcgacagcaacgacgctaataccgcgcccttgcacaaaaaaacaatcagcagcctgagtggcgcagtggagagtatgatgaaaaaattagaagatgttggtgtactggtagcgcgcattttaatgccgattctgtttattaccgcaggctggggaaaaatcaccgcttactctggtacccaacaatatatggaagcaatgggtgtcccgggttttatgctgccgctggtgattctgcttgagttcggtggtggtctggctatcctgttcggtttcctgactcgcaccacagccctgtttactgcgggctttacgctgctgacggcatttttatttcacagcaagtttgctgaaggcgtcaactcgctgatgttcatgaaaaacctgacaatttctggcggattcctgctgctggcaattaccggtccgggcgcgtatagcatcgaccgcctgctgaataaaaagtggtaa

SEQ ID NO: 460928 - DNA, 987 bp, Shigella boydii
atggggcaactgattgacggcgtctggcatgacacctggtacgataccaaatctaccggcggtaaatttcaacgttcagcttccgcatttcgtaactggctcactgccgatggcgcacctggccccactggcacaggcggttttatcgcagagaaagatcgttatcatctctatgtttcactcgcctgcccgtgggcgcaccgcacgctgatcatgcgcaaactcaaaggactggaaccgtttatttccgtttccgtagtgaacccgctgatgctggaaaacggctggacctttgatgacagttttccgggagcaaccggagatacgctctatcaacatgaatttctgtatcagctttatctccacgccgatccacactacagcggacgagttactgttcccgtgctgtgggacaaaaagaaccacaccattgtcagcaacgaatcagcagaaatcatccgcatgttcaataccgcgtttgatgcgctgggcgcaaaagcgggtgattactacccaccagccctgcaaacgaaaattgacgaacttaacggctggatttatgacaccgttaacaacggcgtgtataaagctggttttgccaccagccagcaagcctacgacgaggcggtggcgaaagtgtttgaatcgctggcgcgactggagcagattttaggccagcatcgttacctgaccggcaaccagctaaccgaagccgatattcgcctgtggactacgctggtgcgttttgatccagtgtatgtgacccacttcaagtgtgataagcaccgcatcagcgattacctgaatctgtatggcttcctgcgcgatatctaccagatgccggggatcgccgaaactgtcaatttcgatcacatccgtaatcattacttccgcagccataagaccatcaaccctacggggattatttcaattggtccgtggcaggatctcgatgaaccgcatggacgagatgttcgcttcggttaa

SEQ ID NO: 460929 - DNA, 366 bp, Shigella boydii
atggactggtatctgaaagtactaaaaaattatgtcggtttccggggtcgtgcgcggcgcaaagagtactggatgtttattctggtcaacatcatctttacgttcgtgctggggctgctggataaaatgttaggctggcaacgcgccggtggcgaaggcatcctgacgacaatctacggtattctggtgtttttaccgtggtgggcggttcagttccgccgcctgcacgacaccgaccgctcggcgtggtgggcactgttgttcttaatcccgtttatcggctggcttattatcatcgtctttaactgccaggcgggtacgccaggcgaaaaccgctttggaccagatccgaaactggaaccttaa

SEQ ID NO: 460930 - DNA, 315 bp, Shigella boydii
ttggagtcattaccgacgcttccttacctgttcctcgcgctggctttcccattctttaaagcacgtcaggatctcgacagaccatttgtgattttcaaaacgcgtatgtcggcaatgattgcgacggtggttgtcgtactggtggtgacatttgcgaacgtcttcaccattattccgcctgtggttgaagtcggagactgggacagcacattgtggatgattggcggccctgtcttcttctcgctgttagcgatggcgatttaccagaactattgcagtcgcatggcgaataaacctgaggtagctctcgactga

SEQ ID NO: 460931 - DNA, 3324 bp, Shigella boydii
gtgcgcctgattatcacttttctgatggcctggtgcctcagttggggggcgtacgccgcgacggcccccgatagcaaacaaatcactcaggaactggagcaggcaaaagcggcgaaacccgcacagccggaagtcgtagaggcgctccagtctgccttaaatgcgcttgaggaacgaaaaggttcccttgagcgcatcaaacaatatcagcaagttatcgataattatccgaaactctccgctactctgcgcgcacaattaaacaacatgcgtgacgagccgcgcagcgtgtcgccgggaatgtctaccgacgcgctgaatcaggaaattctccaggtcagcagccagttgctggataaaagccgtcaggcccagcaagagcaggagcgcacccgcgagattgccgattcgctgaatcaactgccgcaacagcaaaccgacgcccgccgtcagttaaatgagatcgagcgccgcctgggaacgcttaccggcaatactccgctcaatcaggcacaaaatttcgcgttgcagtctgactctgcaagtcttaaggcgctcgttgatgaactggagctggcgcagctgtctgccaataaccgccaggaattagcgcgcttacgctcagagctggcggaaaaagagagccagcaactggatgcgtatttgcaggccttgcgtaatcaattaaacagccaacgtcagcttgaggcggagcgggcgctggaaagtaccgaattgctggcagaaaacagcgccgatttgccgaaagatatcgtcgcgcaattcaaaattaaccgcgaactatcggcggctttgaatcaacaggcgcagcggatggatctcgttgcctcgcaacagcgtcaggctgccagccagacgttacaggtccggcaggcgttgaatacgctgcgtgaacagtcgcaatggctgggatcgtccaatctgctcggcgaagcgctgcgggcgcaggtggcacggctgccagaaatgccaaaaccacaacagcttgataccgaaatggcgcagttgcgtgtgcaacggttacgttatgaggatctgcttaataaacagccgctgctacggcaaatccatcaggccgacggtcagccgctgaccgccgagcaaaaccgtattctggaagcacaactgcgcactcagcgtgagttgctgaactcattgttgcagggtggcgacacgctactattggaactgaccaagctgaaagtctccaacgggcaactggaggatgcgctgaaagaggtgaacgaagcaacgcaccgctatctgttctggacctctgacgtgcgcccgatgaccatcgcctggccgctggaaatcgcccaggatctgcgtcgtctcatttcgctggacaccttcagtcagttgggcaaagccagtgtgatgatgctgaccagcaaagagacaattttgccgctgtttggcgcgttgattctggtcggttgcagtatttactcgcgccgctatttcacccgttttcttgaacgttcggcggcgaaagttggcaaagtgactcaggatcacttctggctgacgttgcgcactcttttctggtcgattctcgtcgcgtcaccgttaccggtgctgtggatgacgctgggttacggcttgcgcgaggcgtggccttatccgctggcggtcgcgattggcgatggtgtaacggctaccgtgccgctgctgtgggtagtgatgatttgcgccacctttgcccgcccgaacggcttgtttatcgctcattttggctggccgcgcgaacgtgtttcccgtgggatgcgctactacctgatgagcatcgggcttattgtgccgctgattatggcgctgatgatgttcgataacctcgacgaccgtgaattctccggttcgctgggacggctttgctttatcctcatttgcggtgcgctggcggtggtcaccctcagcctgaaaaaggccgggatcccactgtatctcaacaaagagggcagcggcgacaacattaccaaccatatgctgtggaacatgatgattggcgcgccgttggttgccattctggcgtcggctgtgggttatctggcaacggcacaggcgctgttagcgaggcttgaaacctcggttgccatctggttcctgctactggtggtttatcacgttatccgccgctggatgctgatccagcgccgcaggctggcgtttgaccgggcgaagcatcgccgggcagagatgttagcgcaacgtgcgcgtggcgaagaggaagcgcatcatcacagtagcccggaaggagcaattgaagtcgatgaaagcgaagtcgatctcgatgccatcagtgcgcaatccttgcggctggtgcgctcaattttgatgttgatcgccctgctttctgtcattgtgctgtggtcagaaatccattccgctttcggcttcctcgaaaatatttcgctgtgggatgtcacctccacggtacaaggcgtagaaagtctggagccaattaccctcggtgcggtgctgattgccattctggtgtttatcatcaccacgcagctggtgcgcaacctgcccgcgctgctggaactggcgattttgcagcacctggatttaacgccgggtacaggctacgccatcaccaccatcaccaaatatctgctgatgctgattggcgggctggtcggcttctcgatgattggtattgagtggtcgaaattgcagtggctggtcgccgcgctcggtgttggtctcggttttggtttgcaggaaattttcgccaactttatctctggtctgattatcctgttcgaaaaaccgattcgcattggcgatacggtgacaattcgcgatctcaccggtagcgtgacgaaaattaacacccgcgccaccaccatcagcgactgggaccgtaaagagataatcgtgccgaacaaggcgtttattaccgagcagtttatcaactggtcgctctctgactcggttacgcgcgtagtgttgacgattccggcccctgctgatgccaacagtgaagaagtgacggaaatcctgctcaccgcagcgcgtcgctgctcgctggtgatcgacaacccggcaccggaagtcttcctggtggatctgcaacaagggattcagattttcgagctgcgtatttatgccgctgagatgggtcaccgtatgccgctacgccatgagatccaccagctgattctggctggcttccatgcccacggtatcgatatgccattcccgcccttccagatgcgtctggaaagcctcaacggtaaacaaacggggagaacgctgacgtctgcgggcaaaggtcgtcaggcgggaagtttgtaa

SEQ ID NO: 460932 - DNA, 969 bp, Shigella boydii
ttgttaaattcatttaaactttcgctacagtacattctgccgaaactatggcttactcgcctggcgggttggggcgcaagcaagcgggcaggatggctgacaaaactggttatcgatctgttcgttaaatactacaaggtcgacatgaaagaggcgcaaaagccggacaccgccagctaccgcacctttaacgaattctttgtccgtccgctgcgtgacgaagtacgcccaatcgataccgatccgaatgtactggtcatgcctgccgatggcgttatcagccagttgggtaaaatcgaagaagataaaatcctgcaagccaaaggccacaactacagcctcgaagccctgctggcaggcaactatctgatggcggacctgttccgcaacggtacgtttgtgaccacttacctctccccgcgtgactaccatcgcgtacacatgccgtgcaacggtattctgcgtgagatgatctacgtgccgggcgatctcttctccgttaaccatctcaccgctcagaacgtgccgaatctgtttgcccgtaacgaacgcgtgatttgccttttcgataccgaatttggcccaatggcgcagattctggtcggagcgacgattgttggcagcattgagacggtctgggcgggcaccattacgccgccgcgcgaaggtatcatcaagcgctggacctggcctgccggggaaaacgacggttctgtggcactgctgaaaggccaggaaatgggtcgctttaaactcggttccaccgttatcaacctgtttgcaccgggtaaagtgaatctggttgagcaactggaaagcctgtctgtcacgaaaattggccagccgctggcagtatctaccgaaacctttgttacgccagacgctgaacccgccccacttcctgctgaagagatcgaagcagaacacgacgccagcccattggttgacgataaaaaagaccaggtctaa

SEQ ID NO: 460933 - DNA, 1053 bp, Shigella boydii
ttgagtaaaaataaactctccaaaggccagcagcgccgcgtgaacgccaatcaccagcgtcgtcttaaaacgtctaaggagaagcccgactacgacgacaatctgtttggcgagcctgatgaaggtatcgtcatcagccgctttggtatgcacgctgatgtggaatccgccgatggcgacgttcaccgctgcaatattcgccgtaccatccgttcgctggtgaccggcgaccgtgtagtctggcgtccgggtaaaccggcggcggaaggcgtaaatgtcaaagggatcgtggaagcggtgcatgagcgtacctcggtgttgacgcgtccggatttctacgacggcgtaaaacctattgccgccaacatcgaccagattgtcattgtctccgccattttgccggagctgtcactcaatattatcgaccgttacctggtggcctgcgaaaccttgcagattgagccgattattgtgctcaacaagatagacctgctggacgacgaaggcatggcgttcgtcaacgagcagatggatatctaccgcaatatcggttatcgcgtattgatggtttccagccatactcaggatgggctaaaaccgctggaagaggcgttgaccgggcgcatcagcatttttgccgggcagtctggcgtcggcaaatccagcctgctgaatgcgttgctggggctgcaaaaagagatcctgaccaacgatgtctctgacaactcggggctcggtcagcacaccacgaccgccgctcggctgtatcacttcccgcacggcggtgatgtgattgattcccctggtgtgcgtgagttcggcctctggcacctggagccggaacaaatcactcagggctttgtcgaattccatgactatttaggtctgtgtaaatatcgcgattgcaaacacgataccgatccgggctgcgctatccgggaagcggttgaggaagggaaaatcgcggaaacccgtttcgaaaactatcaccgtattctggaaagcatggcgcaggtaaaaacgcgtaaaaacttttctgatacggatgactga

SEQ ID NO: 460934 - DNA, 546 bp, Shigella boydii
atgagtgccaatgaaaacaacctgatttggatcgatcttgagatgactggtctggatcccgagcgcgatcgcattattgagattgccacgctggtgaccgatgccaatctgaatattctggcagaagggccgaccattgcagtacatcagtccgatgaacagctggcgctgatggatgactggaacgtgcgcacccataccgccagcgggctggtagagcgcgtgaaagcgagcacgatgggcgatcgggaagctgaactggcaacgctcgaattcttaaaacagtgggtgcctgcgggaaaatcgccgatttgcggtaacagcatcggacaggaccgtcgtttcctgtttaaatacatgccggagctggaagcctacttccactaccgttatctcgatgtcagcaccctgaaagagctggcgcgccgctggaagccggaaattctggatggttttaccaagcaggggacgcatcaggcgatggatgatatccgtgaatcggtggcggagctggcttactaccgcgagcattttatcaagctgtaa

SEQ ID NO: 460935 - DNA, 375 bp, Shigella boydii
atgacaaaagagctgacaggtaaagccctgtttatggcgctcaggagccagcgcccacctgccgggctaatccaccactctgatcgaggttcacagtactgcgcatacgattaccgggtcatacaggagcagtctggtctgaaaacatcaatgtcgcgtaaaggtcactgttacgacaacgctccgatggaaagcttctggggaacgctgaaaaatgagagcctgagccactatcgttttaataaccggaatgaagccatctcagtaatacgggaatacattgagattttctacaatcgtcagcgtcgtcactctcgtctggggaatatctccccggcagccttcagggaaaaatatcatcagatggctgcttaa

SEQ ID NO: 460936 - DNA, 342 bp, Shigella boydii
atgacaatgaacattaccagcaaacaaatggaaattactccggccatccgccaacatgtcgcagaccgtctcgccaaactggaaaaatggcaaacacatctgattaatccacatatcattctgtccaaagagccacaagggtttgttgctgacgccacaatcaatacacctaacggcgttctggttgccagtggtaaacatgaagatatgtacactgcaattaacgaattgatcaacaagctggaacggcagctcaataaactgcagcacaaaggcgaagcacgtcgtgccgcaacatcggtgaaagacgccaacttcgtcgaagaagttgaagaagagtag

SEQ ID NO: 460937 - DNA, 1161 bp, Shigella boydii
atgacatcggaaaatccattactggcgctgcgagagaaaatcagcgcgctggatgaaaaattattagcattactggcagagcggcgcgaactggccgtcgaggtgggaaaagccaaactgctctcgcatcgcccggtacgagatattgatcgtgaacgcgatttactggaaagattaattacgctcggtaaagcgcaccatctggacgcccattacattactcgcctgttccagctcatcattgaagattccgtattaactcagcaggctttgctccagcaacatctcaataaaattaatccgcactcagcacgcatcgcttttctcggccccaaaggttcttattcccatcttgcggcgcgccagtatgctgcccgtcactttgagcaattcattgaaagtggctgcgccaaatttgccgatatttttaatcaggtggaaaccggccaggccgactatgccgtcgtaccgattgaaaataccagctccggtgccataaacgacgtttacgatctgctgcaacataccagcttgtcgattgttggcgagatgacgttaactatcgaccattgtttgttggtctccggcacgactgatttatccaccattaatacggtctacagccatccgcagccattccagcaatgcagcaaattccttaatcgttatcctcactggaagattgaatataccgaaagtacgtctgcggcaatggaaaaggttgcacaggcaaaatcaccgcatgttgctgcgttgggaagcgaagctggcggcactttgtacggtttgcaggtactggagcgtattgaagcgaatcagcaacaaaacttcacccgatttgtggtgttggcacgtaaagccattaacgtgtctgaccaggttccggcgaaaacgacgttgttaatggcgaccgggcaacaagccggtgcgctggttgaagcgttgctggtgctgcgcaaccacaatctgattatgacccgtctggaatcacgcccgattcacggtaatccatgggaagagatgttttatctggatattcaggccaatcttgaatcagcggaaatgcaaaaagcattgaaagagttaggggaaattacccgttcaatgaaggtattgggctgttacccaagtgagaacgtagtgcctgttgatccaacctga

SEQ ID NO: 460938 - DNA, 1122 bp, Shigella boydii
atggttgctgaattgaccgcattacgcgatcaaattgatgaagtcgataaagcgctgctgaatttattagcgaagcgtctggaactggttgctgaagtgggcgaggtgaaaagccgctttggactgcctatttatgttccggagcgcgaggcatctatgttggcctcgcgtcgtgcagaggcggaagctctgggtgtaccgccagatctgattgaggatgttttgcgtcgggtgatgcgtgaatcttactccagtgaaaacgacaaaggatttaaaacactttgtccgtcactgcgtccggtggttatcgtcggcggtggcggtcagatgggacgcctgttcgagaagatgctgacactctcgggttatcaggtgcggattctggagcaacatgactgggatcgagcggctgatattgttgccgatgccggaatggtgattgttagtgtgccaatccacgttactgagcaagttatcggcaaattaccgcctttaccgaaagattgtattctggttgatctggcatcagtgaaaaatggaccattacaggccatgctggcggcgcacgatggcccggtattggggttacacccgatgttcggcccggacagcggtagcctggcaaagcaagttgtggtctggtgtgatggacgtaagccggaagcataccaatggtttctggagcaaattcaggtctggggcgctcggctgcatcgtattagcgctgtcgagcacgatcagaatatggcgtttattcaggctctgcgccactttgctacttttgcttatgggctgcatctggcagaagaaaatgttcagcttgagcaacttctggcgctctcttcgccgatttaccgccttgagctggcgatggtcgggcgactgtttgctcaggatccgcagctttatgccgacattattatgtcgtcagagcgtaatctggcgttaatcaaacgttactataagcgtttcggcgaggcgattgagttgctggagcagggcgataagcaggcgtttattgacagtttccgcaaggtggagcactggttcggcgattacgcacagcgttttcagagtgaaagccgcgtgttattgcgtcaggcgaatgacaaccgccagtaa

SEQ ID NO: 460939 - DNA, 1071 bp, Shigella boydii
atgcaaaaagacgcgctgaataacgtacatattaccgacgaacaggttttaatgactccggaacaactgaaggccgcttttccattgagcctgcaacaagaagcccagattgctgactcgcgtaaaaccatttcagatattatcgccgggcgcgatcctcgtctgctggtagtttgtggtccttgttccattcatgatccggaaactgctctggaatatgctcgtcgatttaaagcccttgccgcagaggtcagcgatagcctctatctggtaatgcgcgtctattttgaaaaaccccgtaccactgtcggctggaaagggttaattaacgatccccatatggatggctcttttgatgtagaagccgggctgcagatcgcgcgtaaattgctgcttgagctggtgaatatgggactgccactggcgacggaagcgttagatccgaatagcccgcaatacctgggcgatctgtttagctggtcagcaattggtgctcgtacaacggaatcgcaaactcaccgtgaaatggcctccgggctttccatgccggttggttttaaaaacggcaccgacggcagtctggcaacagcaattaacgctatgcgcgccgccgcccagccgcaccgttttgttggcattaaccaggcagggcaggttgcgttgctacaaactcaggggaatccggacgggcatgtcatcctgcgcggtggtaaagcgccgaactatagccctgcggatgttgcgcaatgtgaaaaagagatggaacaggcgggactgcgcccgtctctgatggtagattgcagccacggtaattccaataaagattatcgccgtcagcctgcggtggcagaatccgtggttgctcaaatcaaagatggcaatcgctcaattattggtctgatgatcgaaagtaatatccacgagggcaatcagtcttctgagcaaccgcgcagtgaaatgaaatacggtgtatccgtaaccgatgcctgcattagctgggaaatgaccgatgccttgctgcgtgaaattcatcaggatctgaacgggcagctgacggctcgcgtggcttaa

SEQ ID NO: 460940 - DNA, 363 bp, Shigella boydii
atgaaaaagtttatcgcccccttattggctttactggttagcggatgtcagattgatccttatactcacgcgccaaccttgaccagcaccgactggtatgatgtcggtatggaagatgcgatatcgggcagcgccataaaagatgacgatgcatttggcgattcacaggcggatcgcggtctataccttaaaggatatgccgaaggacaaaagaaaacttgccagaccgattttacttatgcccggggactttccggtaaaagctttcctgccagctgtaacaatgttgaaagtgccagccaactgcatgaagtatggcaaaaaggggctgatgaaaatgccagcacaatacgattaaattaa

SEQ ID NO: 460941 - DNA, 519 bp, Shigella boydii
atgcgtttttctcaccgactgttcttacttctgattctcctgctgacgggagcaccaatactcgctcaggagccttctgacgttgcgaaaaacgtgcgtatgatggtttccggtattgtcagttacacccgctggcctgcgctatcagggccaccaaagttatgtatcttttcatcttcacgttttagtaccgccctacaagagaatgccgcgacatctttgccttatctgcctgtcatcattcacactcaacaagaggcgatgatttcaggctgcaatggtttttattttggcaacgagtcaccgacattccagatggaattaaccgaacaatatccgtcaaaggcgttattattaattgccgaacaaaataccgagtgcattattggtagcgccttttgtctgatcatccacaataatgacgtcagatttgccgtaaacctggatgccttatcgcgtagcggtgtaaaggtcaacccggatgtcttaatgctcgcacggaagaaaaatgatggataa

SEQ ID NO: 460942 - DNA, 1233 bp, Shigella boydii
atgattacgcacaacttcaataccctggacttactcaccagtcctgtctggattgtttcgccctttgaggaacagttaatttatgccaatagcgcggcgcgactgttgatgcaagacctcacgtttagtcagctacgaaccggaccctattccgtctcctcacaaaaagaactgccgaaatacctctccgatctgcaaaaccaacacgatattatcgaaatcctcactgttcagcgtaaagaagaggaaacagcattaagctgtcggcttgttttgcgagagctgacagaaacagaaccggtgattattttcgaaggtatcgaagcgccggcaacgctgggtttaaaagccagtcgctcggcaaattatcagcgcaaaaaacaaggtttttatgcgcgcttttttctgactaactctgcaccaatgttgttgattgacccctcacgagatggccaaatcgtcgatgctaacctcgccgcgctcaatttctacggttataaccatgaaacgatgtgccagaaacatacctgggaaattaatatgctcgggcgtcgcgtcatgcctatcatgcatgaaatttcgcatttacccggcggtcataaacctttgaattttgttcataaactggcggatggatctactcgtcatgtgcagacctatgccgggccgattgaaatttatggcgacaagctcatgttatgtattgtgcatgatattactgagcaaaaacggcaggaggagcagctggaacatgctgctcaccatgacgcgatgaccggattactgaatcggcgacagttttatcacattacggaaccaggccaaatgcagcacctcgccatcgcccaggattacagcttgttgctcatcgacaccgatcgttttaaacacattaacgatctctatgggcattctaaaggtgatgaggtgttatgcgccctcgcccgcaccctcgaaagttgcgctcgcaaaggcgatttggtgtttcgttggggaggcgaagagtttgtcttattgctaccaagaaccccactggatactgcgctttcgctggctgaaactatccgtgtaagcgtggccaaagtgagtatttcgggcttaccacgttttaccgtcagcattggtgtggcgcatcacgaaggaaatgaaagcatcgatgaactgtttaaacgcgttgatgatgctttgtatcgggcgaaaaatgatggacgcaaccgcgtgctggcggcataa

SEQ ID NO: 460943 - DNA, 546 bp, Shigella boydii
atgaaccttgacgacaaatcgctgtttcttgacgccatggaagatgtccagccgctgaaacgtgctacagatgtccactggcatccaacgcgtaaccaacgtgcgccgcagcttgataatttcctcaccaccggatttctcgacatcatcccgctaagtcagccgctggagtttcggcgggaagggttgcaacatggggtgctggataagctgcgcagtggtaaatatccgcaacaggcgagcctgaatcttttgcgccagccggtggaagagtgccgcaaaatggtgttcagtttcattcaccaagccctggcggatggtttgcgtaatgtgttgattattcatggtaaagggcgggaagataaatcgcatgccaatattgtccgcagctatgtggcgcgctggctgaccgaatttgatgatgttcaggcatattgcaccgcgctaccgcatcatggcggcagcggggcgtgttacgtcgcactacgtaaaacggcgcaggcgaagcaagaaaactgggagcgccacgctaagcgcagccgttga

SEQ ID NO: 460944 - DNA, 909 bp, Shigella boydii
atggcttttcaggtaaaaattcatcaaattcgtgcttttgttgaagtggctcgtcagggcagcattcgcggagcgagccgaatgttgaatatgtcgcaaccggcactgagtaaatctattcaggagttggaagaaggattagcggcgcaactcttttttcgccgtagtaaaggcgtgacgttaactgatgccggtgaaagtttttatcagcacgccagtcttattcttgaagagctgcgcgcagcccaagaggatattcgccaacgacaagggcaactggcagggcagattaatatcggcatgggggccagtatttcccgcagtctgatgccagctgtcatatctcgttttcatcagcagcatccgcaggtaaaagtacgcattatggaagggcaactggtgtcgatgattaatgaattgcgtcagggagaattggatttcaccatcaatacctattatcagggaccgtacgaccacgaatttacttttgagaaattactggaaaagcaattcgcgatcttttgccgcccgggacaccccgccattggtgcccgttcgatcaaacagttactggattacagctggacaatgccgacgccacacggcagttactacaaacagttgagtgaattgcttgacgatcaggcgcaaacgccacaggtcggtgtagtctgcgagacgttctcagcctgtatcagtctggtggcaaaaagcgattttctcagcatactgcctgaagaaatgggctgcgatcccttgcacggacaggggctggtgatgttgccggttagcgaaattttaccgaaagcggcctattatttgattcagcggcgtgatagtcgccagacaccactgaccccgtcattaatcacgcaattccggcgagaatgcggctatctgcaaagttaa

SEQ ID NO: 460945 - DNA, 672 bp, Shigella boydii
atggagtctttgaatcaatttgttaattcgcttgccccaaaattatcgcactggcgacgtgattttcatcactatgcagagtctggctgggtggaattccgcactgccacccttgttgcggaagaattgcagcagctcggctattcactggcgctgggccgcgaagtagttaatgaaagtagccggatgggactacctgatgaactcactctacaacgcgaattcgagcgcgctcgtcaacagggtgcgctagcacaatggattgcggtttttgaaggtggtttcactggtatcgtcgccaccctggataccggtcgccccggtccggtgatggctttccgtgtcgatatggacgcgctggatctcagtgaagagcaggatgtcagccatcgcccctaccgcgacggttttgcgtcatgtaacgccggaatgatgcatgcctgtggtcatgatggacataccgccattgggcttgggctggcgcatacccttaaacaattcgagtccggactacatggcgtcatcaaactgatttttcagcctgcagaggaaggtacgcgtggcgcgcgggcgcaaaaccagaagacggtcacaatgccttgttggcggcagcacaagccactcttgcactgcatgcaatcgccccgcacagcgaaggagcttccagagtaa

SEQ ID NO: 460946 - DNA, 966 bp, Shigella boydii
atgcaggaaatctatcgttttatcgacgatgcgattgaagccgatcgccaacgttataccgatattgccgatcaaatctgggatcatccagaaacacgttttgaagagttctggtcagcggagcatctggcttcggcgctggaatctgcaggcttcaccgttacccgcaacgtaggctatatcccaaatgcctttattgcttcgtttggtcaaggcaaaccggttatcgccctgctgggagaatatgacgccctggcaggtttaagtcagcaagcaggttgcgcgcaacctacatccgtgacgcccggtgaaaatggtcacggttgcggacacaatttgctgggaaccgccgcctttgccgctgcaatagccgtcaagaaatggctggaacaatatgggcaaggcggcacggtgcgcttttatggttgtcctggcgaagaaggcggctcgggtaaaacgttcatggttcgcgagggggtatttgatgatgtggatgcggcactcacctggcacccggaagcctttgccggtatgttcaatacccgcacgctggcaaacattcaggcatcatggcgctttaaagggatcgcagcacatgccgcgaattcccctcatttgggacgcagcgcccttgatgccgtaacgttgatgaccactggcaccaacttcctcaacgaacatattattgaaaaagcgcgcgtacactatgccatcacaaatagcggcgggatctcgcccaacgtggtccaggcgcaggcagaagtgctttatcttatccgcgcccccgaaatgaccgacgtgcagcatatttatgatcgggtcgccaaaatcgccgaaggtgcggcattgatgaccgaaaccacggttgaatgccgcttcgacaaagcctgttccagttatctcccgaatcgcaccttagaaaatgccatgtaccatgccctatcccattttggtaccccggaatag

SEQ ID NO: 460947 - DNA, 924 bp, Shigella boydii
atgagtatgtcatccataccgtcgtcctcccaatccgggaagctctatggctgggtcgaaagaattggtaacaaggttccccatccttttttgctctttatctatttgattatcgtactcatggtgacgacggcaattttgtcggcctttggcgtcagtgcgaaaaacccgaccgatggaacgccggtggtggtgaaaaacctgctcagtgtggaaggattacactggtttttacccaatgttattaaaaactttagcggttttgctccacttggtgcgatcctggcgctggttttaggtgccggtctggcggagcgcgtcggcttactgccagcgctaatggttaaaatggcatcgcatgttaatgtccgctacgccagttatatggtgctgtttattgcttttttcagccacatttcttccgatgcggcgttagtgatcatgccaccgatgggtgcgctgatttttctggcggtgggcaggcatccagttgcaggtttactggctgccattgcaggcgtaggttgcggctttacggctaatttactgattgtcacaaccgacgtgttgctgtcggggatccgcacggaagcggcggctgcgttcaatccgcaaatgcacgtcagtgtaattgataactggtattttatggccagctccgtagtcgtactgacgattgttggcggcctgataaccgacaaaatcatcgagccacggttaggtcaatggcagggaaacagcgatgagaaactgcagacattgaccgaaagtcagcgttttggtttacgcatagcaggtgtcgtatcgctactttttattgctgcgatcgcgctgatggtgatcccggaaaacgggatattgcgcgatccgattaatcacaccgtgatgccatcaccctttattaaaggtatcgtgccacggtaa

SEQ ID NO: 460948 - DNA, 771 bp, Shigella boydii
gtgcctggtttgaagattacgcttttgcagcaaccactggtgtggatggatggccctgccaacctgcgtcattttgatcgtcaactggaaggtattaccgggcgcgatgtgatcgttctaccggagatgtttaccagcggctttgccatggaagcggcagcttcgtcgctagcacaagatgacgtagtgaactggatgacagctaaggcgcagcagtgcaatgcgctgattgcaggcagtgttgcattacaaacggagtctggttcggttaaccgctttttgctggttgagccgggcggcacggtacatttttatgataagcgtcatctgttccgcatggcagatgagcatctacattataaagcgggcaatgcgcgagtgattgtggaatggcgcggctggcgtattttgccgttggtgtgctacgacttacgttttccggtgtggtcgcgcaatctcaacgattatgacctcgccatctacgttgccaactggcctgctccgcgctctctgcactggcaggcattgctgacggcccgcgcgattgagaatcaggcgtatgtggcgggatgcaatcgcgtcggcagcgatggcaacggctgccattatcgcggtgacagccgggtgattaatccacaaggcgagattatcgctactgccgacgcgcatcaggcaacgcgcattgatgcggagctgtcgatgatggcattgcgggaatatagagaaaagtttccggcatggcaggatgcggatgagtttaggttgcggtga

SEQ ID NO: 460949 - DNA, 447 bp, Shigella boydii
atgtttaaggcaataacgacagtcgccgctctggtcatcgccaccagtgcaatggcgcaggatgatttaaccattagcagccttgcaaagggcgaaaccaccaaagctgcatttaatcagatggtacaagggcataagctgcctgcctgggtgatgaaaggcggtacttatactcccgcacaaaccgtaacgttgggagatgagacgtatcaggtgatgagcgcgtgcaaaccgcatgactgtggctcgcaacgtatcgctgtgatgtggtccgagaaatctaatcagatgacggggctgttctcgactattgatgagaaaacgtcgcaagagaaactcacctggctgaatgtgaacgatgcgctttcgattgatggtaaaacggtgctgttcgcggcgttgaccggcagcctggaaaaccatccggatggctttaattttaaataa

SEQ ID NO: 460950 - DNA, 2445 bp, Shigella boydii
atgatgattttgagtattctcgctacggttgtcctgctcggcgcgttgttctatcaccgcgtgagcttatttatcagcagtctgattttgctcgcctggacagccgccctcggcgttgctggtctgtggtcggcgtgggtactggtgcctctggccattatcctcgtgccatttaactttgcgcctatgcgtaagtcgatgatttccgcgccggtatttcgaggtttccgtaaggtgatgccgccgatgtcgcgcactgagaaagaagcgattgatgcgggcaccacctggtgggagggcgacttgttccagggcaagccggactggaaaaagctgcataactatccgcagccgcgcctgaccgccgaagagcaagcgtttctcgacggcccggtagaagaagcctgccggatggcgaatgatttccagattactcatgagctggcggatctgccgccggagttgtgggcgtaccttaaagagcatcgcttcttcgcgatgattatcaaaaaagagtacggcggactggagttctcagcttatgcccagtctcgcgtgctgcaaaaactctccggcgtgagcgggatcctggcgattaccgtcggcgtgccgaactcattaggcccgggcgagctgctgcaacattacggcactgacgagcagaaagatcactatctgccgcgtctggcgcgtggtcaggagatcccttgctttgcactgacaagcccggaagcgggttccgatgcgggcgcgattccggacaccgggattgtctgcatgggcgaatggcagggccagcaggtgctggggatgcatctgacctggaacaaacgctatattacgctggcaccgattgcgactgtgcttgggctggcgtttaaactctccgacccggaaaagctgctgggtggcgcagaagatttaggtattacctgtgcgctgatcccgaccaccacgccgggcgtggaaattggtcgtcgccacttcccgctgaacgtaccgttccagaacggaccgacgcgcggtaaagatgtcttcgtaccgatcgattacatcatcggtgggccgaaaatggccgggcaaggctggcggatgctggtggagtgcctctcggtaggccgcggcatcaccctgccttccaactcaaccggcggcgtgaaatcggtagcgctggcaacgggcgcgtatgctcacattcgccgtcagttcaaaatctctatcggtaagatggaagggattgaagagccgctggcgcgtattgccggtaatgcctacgtgatggatgctgcggcatcgctgattacctacggcattatgctcggcgaaaaacctgccgtgctgtcggctatcgttaagtatcactgtacccaccgcgggcagcagtcgattattgatgcgatggatatcactggtggcaaaggcattatgctcgggcaaagcaacttcctggcgcgtgcttaccagggcgcaccgattgccatcaccgttgaaggggctaacattctgacccgcagcatgatgatcttcggacaaggagcgattcgttgccatccgtacgtgctggaagagatggaagcggcgaagaacaatgacgtcaacgcgttcgataaactgttgttcaaacatatcggtcacgtcggtagcaacaaagttcgcagcttctggctgggcctgacgcgcggtttaaccagcagcacgccaaccggcgatgccactaaacgctactatcagcacctgaaccgcctgagcgccaacctcgccctgctttctgatgtctcgatggcagtgctgggcggcagcctgaaacgtcgcgagcgcatctcggcccgtctgggggatattttaagccagctctacctcgcctctgccgtgctgaagcgttatgacgacgaaggccgtaatgaagccgacctgccgctggtgcactggggcgtacaagatgcgctgtatcaggctgaacaggcgatggatgatttactgcaaaacttcccgaaccgcgtggttgccgggctgctgaatgtggtgatcttcccgaccggacgtcattatctggcaccttctgacaagctggatcataaagtggcgaagattttacaagtgccgaacgccacccgttcccgcattggtcgcggtcagtacctgatgccgagcgagcataatccggttggcttgctggaagaggcgctggtggatgtgattgccgccgacccaattcatcagcggatctgtaaagagctgggtaaaaacctgccgtttacccgtctggatgaactggcgcacaacgcgctggcgaaggggctgattgataaagatgaagccgctattctggtgaaagctgaagaaagccgtctgcgcagtattaacgttgatgactttgatccggaagagctggcgacgaagccggtaaagttgccggagaaagtgcggaaagttgaagccgcgtaa

SEQ ID NO: 460951 - DNA, 579 bp, Shigella boydii
atgtaccaggatcttattcgtaacgaactgaacgaagcggcggaaacgctggctaactttttaaaagatgacgccaatattcacgccattcagcgcgcggcggtcctgttagcagacagctttaaagccggtggcaaagtgctttcctgcggcaacggcggttcccattgcgacgctatgcactttgccgaagagttgaccggtcgctaccgtgaaaaccgtccgggctacccggcgattgctatttctgacgttagtcatatttcctgcgtcggtaatgatttcggtttcaatgatattttctcccgctacgttgaagcggtaggtcgcgaaggcgatgtactgctggggatctccacctccggtaactctgcaaacgtgatcaaagcgatcgcagcggcgcgtgagaaggggatgaaagtgatcaccctgaccggtaaagacggcggcaaaatggctggcacggcggatatcgaaattcgcgtaccgcactttggttatgccgaccgcattcaggagattcacattaaagtgatccatatcctgatccagttaattgaaaaagagatggttaagtaa

SEQ ID NO: 460952 - DNA, 768 bp, Shigella boydii
atgtgcgaattgctcgggatgagcgccaacgtccctaccgatatctgctttagtttcaccggacttgtacagcgtggtggtggaaccgggccacataaagatggctggggcattaccttttacgaaggtaaaggctgtcgcacatttaaagatccacaacccagctttaattcccccatcgccaaacttgtccaggactacccgataaaatcctgttcggtggtggctcatattcgccaggctaatcggggcgaggtggcgttggaaaatactcacccatttacccgcgagttatgggggcgtaactggacttatgcccataacggacaactgacgggctacaaatcactggaaaccggcaacttccgcccggtaggcgaaaccgacagcgaaaaagccttctgctggctgctgcataaattaacgcagcgttacccgcgcacgccgggcaacatggcagcagtgtttaaatatatcgcttcactggcggacgaactgcggcagaagggcgttttcaacatgctgctttcggatgggcgctatgtaatggcgtattgctcgacgaatctgcactggatcacccgccgcgcaccgtttggcgtggcaacgctgctggatcaggatgtagaaatcgacttcagctcgcagaccacaccgaatgatgtggtcacggtgattgcgacacagccgctgacgggcaatgaaacctggcaaaagattatgccaggcgaatggcgcttattttgcctcggggagcgtgtagtttga

SEQ ID NO: 460953 - DNA, 741 bp, Shigella boydii
atgcgtaaaatcgcattaattcttgcgatgttgttgatcccgtgcgtttcgtttgccggtttgctgggcagcagtagctcgaccacgccagtgagcaaagagtataagcagcagttgatgggatcccctgtctacatccagatcttcaaggaagaacgtacgctcgatctctacgtcaaaatgggcgagcaatatcagctgctcgacagttataaaatctgtaaatattccggcggcttagggccaaaacagcgtcagggcgatttcaaaagcccggaagggttttatagcgtccagcgtaatcagttaaaaccagacagccgttactacaaagcgattaatattggtttccccaatgcctatgaccgtgcgcatggttatgaagggaaatacctgatgatccacggcgattgtgtttccatcggctgctacgcaatgaccaatcagggtattgatgagatcttccagttcgttactggtgcgctggtgtttggtcagccgagcgtgcaagtgagtatttacccgttccgcatgaccgacgccaatatgaagcgccataaatattccaactttaaggacttctgggagcaactgaagccgggttacgactactttgagcaaacccgtaagccaccgaccgtttctgtggtcaatggtcgttacgtggtcagcaagccgttaagccacgaagttgtgcagccacaactggcatcaaactacacgctccccgaggcaaaataa

SEQ ID NO: 460954 - DNA, 342 bp, Shigella boydii
atggcgctcaggagccagcgcccacctgccgggctaatccaccactctgatcgaggttcacagtactgcgcatacgattaccgggtcatacaggagcagtctggtctgaaaacatcaatgtcgcgtaaaggtcactgttacgacaacgctccgatggaaagcttctggggaacgctgaaaaatgagagcctgagccactatcgttttaataaccgggatgaagccatctcagtaatacgggaatacattgagattttctacaatcgtcagcgtcgtcactctcgtctggggaatatctccccggcagccttcagggaaaaatatcatcagatggctgcttaa

SEQ ID NO: 460955 - DNA, 585 bp, Shigella boydii
atgagacactttatctatcaggacgaaaaatcacataaattctgggcggttgagcagcagggaaacgagctgcatatcaactggggcaaagtcggcactaacgggcaaagccagataaaaagttttgcggatgctgcggcagcggcaaaagcggagcttaagctgatcgcagagaaaacgaaaaaaggctatgtggaaaatgcttcagcaaacgtgcatatcccccccattaccaaagccactcctgaagttgaaacttcccctgagagtaaaaaccaacgcccctggctggctgatgatgcggtcattcggctaactgacgatattaatcgatttgcttttcctcatcgctctcgccccagagagatcaattatctgcacaaagatggtcaaatatggcagctcatcgcgaataacaccagggcatatgatcccgccaacaattaccgttcttatccagaaaactggcagcaggcttttgctgagttacaaatgcgagttcagggtaatcaacagacagggagtgcacaatctgatgcagcattgctctggagtttctggaactctgaggtgtactggcaatag

SEQ ID NO: 460956 - DNA, 2034 bp, Shigella boydii
atgactcaagtcgcgaagaaaattctggtgacgtgcgcactgccgtacgctaacggctcaatccacctcggccatatgctggagcacatccaggctgatgtctgggtccgttaccagcgaatgcgcggccacgaggtcaacttcatctgcgccgacgatgcccacggtacaccgattatgctgaaagctcagcagcttggtatcaccccggagcagatgattggcgaaatgagtcaggagcatcagactgatttcgcaggctttaacatcagctatgacaactatcactcgacgcacagcgaagagaaccgccagttgtcagaacttatctactctcgcctgaaagaaaacggttttattaaaaaccgcaccatctctcagctgtacgatccggaaaaaggcatgttcctgccggaccgttttgtaaaaggcacctgcccgaaatgtaaatccccggatcaatacggcgataactgcgaagtctgcggcgcgacctacagcccgactgaattgatcgagccgaaatcggtggtttctggcgctacgccggtaatgcgtgattctgaacacttcttctttgatctgccctctttcagcgaaatgttgcaggcatggacccgcagcggtgcgttgcaggagcaggtggcaaataaaatgcaggagtggtttgaatctggcctgcaacagtgggatatctcccgcgacgcgccgtacttcggttttgaaattccgaacgcgccgggtaaatatttctacgtctggctagatgcaccgattggctatatgggttctttcaagaatctgtgcgacaagcgcggcgacagcgtaagcttcgatgaatactggaagaaagactccaccgccgagctgtaccacttcatcggtaaagatattgtttacttccacagtctgttctggccagcaatgctggaaggcagcaacttccgcaagccgaccaacctgtttgttcatggctatgtgacggtgaacggcgcgaagatgtctaagtctcgcggtacctttattaaagccagcacctggctgaatcattttgacgccgacagcctgcgttactactacactgcgaaactctcttcgcgcattgatgatatcgatctcaatctggaagatttcgttcagcgcgtgaatgccgatatcgtgaacaaagtggttaacctggcctcccgcaacgcgggctttatcaacaagcgttttgacggcgtgctggcaagcgaactggctgacccgcagttgtacagaaccttcactgatgccgctgaagtgattggtgaagcgtgggaaagccgcgaatttggtaaagcagtgcgcgaaatcatggcgctggctgatctggctaaccgctatgtcgatgaacaggctccgtgggtggtagcgaaacaggaaggccgcgatgccgacctgcaggcaatttgctcaatgggcataaacctgttccgcgtgctgatgacttacctgaagccggtactgccgaaactgaccgagcgcgcagaagcattccttaatacggaactgacctgggatggtatccagcaaccgctgctgggccataaagtgaatccgttcaaggcgctgtataaccgcatagatatgaagcaggttgaagcactggtggaagcgtctaaagaagaagtgaaagcagctgccgcgccggtaactggcccgctggcagatgatccgattcaggaaaccatcacctttgacgacttcgccaaagttgacctgcgcgtggcgctgattgaaaacgcagagtttgttgaaggttctgacaaactgctacgcctgactctggatctcggcggcgaaaagcgtaatgtcttctccggcattcgttctgcttacccggatccgcaggcactgattggtcgtcacaccattatggtggctaacctggcaccacgtaaaatgcgcttcggtatctccgaaggcatggtgatggctgccggtcctggcgggaaagatattttcctgctaagcccggatgctggtgctaaaccgggtcatcaggtgaaataa

SEQ ID NO: 460957 - DNA, 1110 bp, Shigella boydii
atgaacgaacaatcccaggccaaatcaccagaagccttgcgcgcaatggtcgccgggacactggccaattttcagcacccaaccctgaagcataacctcaccacgctgaaagcgttgcaccatgtcgcctggatggacgacacgttgcatgtggaactggttatgccattcgtctggcatagcgcgtttgaagagttaaaagagcaatgtagcgccgaactgctgcgtatcaccggggcgaaagctatcgactggaaactgtcgcacaatatcgccaccttaaaacgcgtgaagaatcagccgggtattaatggcgtgaagaacatcattgcggtcagttccggtaaaggcggcgtgggtaaatcctccacggcggtaaacctggcgctggcactggcggcggaaggggcgaaagtcggcattctggacgccgatatctacggcccatcaattcccaccatgctgggcgcagaaaatcagcgtccaacttcgccggacggtacccatatggcaccgattatgtctcatggcctggcaaccaattcaattggttatctggtcactgacgacaatgcgatggtgtggcgtggaccgatggcgagcaaggcgttaatgcagatgctgcaggaaaccttgtggccggatctcgactatctggtgcttgatatgccgccaggcaccggtgacattcaattgacgctggcgcaaaacattccagtaactggtgcagtcgtggtcaccaccccgcaggacatcgcgttgatcgatgcgaaaaaaggcattgtgatgttcgagaaagtcgaggttccggtgctcggtattgtcgagaacatgagtgtgcatatttgcagtaactgtggtcaccatgaaccgattttcggtaccggtggtgcagagaaactggctgaaaaataccatacacagctgctggggcagatgccgttacacatctccttacgtgaggatctcgataaaggcacgccaacggttatcagccgcccggagagcgaatttaccgctatctaccgccagctggctgaccgcgttgcagctcagctctactggcagggtgaagtcattccaggcgagatttccttccgcgcggtctaa

SEQ ID NO: 460958 - DNA, 282 bp, Shigella boydii
atgaataagtattggctgtcaggaattatttttcttgcctatggattggcttctcccgcgttctcttcagagactgcaacattaaccatcaatggcagaattagttcccctacatgcagtatggatgttgttaataatcatcttcagcaacgttgtgggcagttgttacaacgagttgaaaccaactatcgtgcttcttctactgcaaaaggcgttacgacagaagtggtaactgtgggtaataacgacaaacgcaaaatcgtgttaaatcgctacgattaa

SEQ ID NO: 460959 - DNA, 543 bp, Shigella boydii
atgaaacattcaattattgttgtcgctgtcttatcttctgtatttatgagtgctggtattttcgctgctgaagtagataccggaactttaaccattaaaggtaatattgctgaatcaccatgtacatttgtcgctggcggtgattcagtcagtattaatatgccgactgtacccaccactgtatttgatggtaaagcgaaatattcaacttatgatggcgtggttggtgtaaccagcagtatgctgaaaattacttgtccgaagactattgatggcgtaaaactttcgttgatcaccaacgagaaaattcttggtaatgataaggcaatatccagtagtaatgacacagttggatactatctctatttgggagatagcagtgacgtactggatatttccgcaccatttaatattgaaagttataaaactgctgatggacaatatgcaataccgtttaaggcaaaatatctgaagttgattgacagtggtgttgcatctggtactgttaactcttcattggttatgcgtgttgcccaggattaa

SEQ ID NO: 460960 - DNA, 705 bp, Shigella boydii
atgaaagggttattatctttactcatctcttctatgatattccccgtgcatgccggaatggttattttcgggacccgtatcatttacccggcagagcagaaagaggtcatggtacaactgatgaatcagggaaaccgctcttcgctgatgcaggcgtggattgatgatggcgacacgtctctgccgccagaaaagattcaggttcctttcatgttaacgccaccagtagtgaaagtagcggccaattctgggcaacaaataaaaattaaaatcatgcctaataaattacccagtaataaggaaagtattttttatcttaatgttctggatattccaccgaatagtccagaacaagaaggtaagaatgcactgaagtttgcgatgcaaaacagaatcaaattgttttaccggccggcgggtattgctccggtgaataaagcgacctttaaaaagttactgataaatcgcagtggcaatggattggtgataaaaaatgactcagctaattgggtgacgatttcggatgtcaaagctaataatgtcaaagtcaattatgaaactattatgattgcccccttagaaagtcagagtgttaatgtcaaaagtaataatgcaaacaactggggtaatgactccaacttattgatagtgttttatgttcagataatgcccgatgactttgtcatgcagctccaccgattttga

SEQ ID NO: 460961 - DNA, 1965 bp, Shigella boydii
gtgcgcgggcaggggataaattaccggatttactcgatgaatatatcagagcaacaactgaataatatgatgagtgctgtcacaacagcattacagcccctgataagggcattgccggtgacgccagttgaatgggctgatcaaaattattatctgcctaaagaatcttcatatggtgagggagaatggaaaacgctgccgttccaggtcgccattatgaactgtatgggtaacgaccaggttcgcacggttaacctgattaaatctgcccgtgttggctatacaaagatgttgctgggggtggtcgggtattttattgagcataaatcacgaaacagtctgctttttcagcccacggattctgccgctgaagattttatgaagtctcacgtggaggcgacgattcgggatgtgccatgcctgaaagacctttccccatggctgggtcgtaaacatcgtgataataccctcacgctgaaacgtttttcatcgggcgtgggcttctggtgcctgggcggggctgccgctaaaaactaccgtgaaaaatccgtggacgtggtctgctatgacgaactttcctcgttcgaaccggatgtcgaaaaagagggttcgccaaccctgctgggggataaacgtattgagggctctgtatggcccaaatccattcgcggctcgacgcctaaaatcaaaggcacctgccagatcgaaaaagcggccaacgagtcggcgcattttatgcgtttttatgtgccctgcccacactgtggggaggagcagtatctgaaatttggcgatgagtccacgccttttgggcttaaatgggagaaggacagtcccgaaagtgttttctacctctgtgaacatcatggctgcgtgatccatcagtctgaactggaccagagcaacgggcggtggatctgtgaaaacacgggcatgtggacccgtgacggtctgacgtttttcagcgctgcgggtaatgaaattccgccgccgcgctccatcacgttccatatctggacggcgtacagtccgtttaccacctgggtacagatagtctatgactggctggatgcactgaaagatcccaacggcctgaaaacctttgtgaacaccacgctgggcgagacctgggaagaagccgtgggcgaaaaactcgatcaccaggtactgatggataaggtcgtgcattacacggcggcggtacctgcccgggtggtttatctgacggcgggcattgactcgcagcgaaaccgttttgagatgtatgtctggggatgggcaccgggagaggaagcttttctggtggataaaatcatcattatgggccgtcccgatgaggaagagacgctgttacgtgtggatgcggcgatcaacaaaaaatactgccatgcagacggaaccgaaatgaccatttcccgtgtctgctgggacaccggggggatcgatggtgaaattgtctatcagaggtcaaaaaaacacggtgttttccgggtgctgccggtaaaaggcgcatctgtctatggcaagccggtgatcaccatgccgaaaacccgcaatcagcggggcgtgtatctgtgtgaagtggggacggacaccgcaaaagaaattctctatgcccgtatgaaagccgatcccacgcctgcggatgaagccacgtcgtatgccatccgttttcctgatgatccggagattttttcgcagacagaggcgcagcaactggtcgcggaagagcttgtggagaagtgggaaaaaggaaagatgcgtctgctgtgggataacaaaaagcggcgtaacgaagcgctggactgcctggtgtatgcctacgcggcattacgtgtgtccgtgcaacgctggcagcttgatctggctgtactggcaaaatcccgggaagaagagacgacccggccaacccttaaagaactggcagcgaagctgtccggaggagtgaatggttacagtcgctga

SEQ ID NO: 460962 - DNA, 207 bp, Shigella boydii
atggttacagtcgctgaactacaggcgctgcgtcaggcacgccttgatttattaaccggtaaacgggtggtgtctgtccagaaagatggtcgcagaattgaatatacggcggcttctctggatgagcttaaccgggcgatcaatgatgcggagtcggtactggggacaacccgacgtcgccgtcgtccgctgggagtgaggttatga

SEQ ID NO: 460963 - DNA, 1593 bp, Shigella boydii
atgaaacgaacgcctgtcctgattgatgtgaacggcgttccgcttcgtgagagtctcagctacaacgggggcggcgcaggatttggtgggcaaatggcggagtggttgccaccggcgcagagtgccgatgcagccctgctgcctgcgttgcgtctggggaatgcccgggcagatgatctggtgcgcaataacgggatagcggccaatgcggtggccctgcataaggatcatattgtcgggcatatgtttctgatcagctaccgtccgaactggcgctggctggggatgcgggagactgcggcaaaaagttttgtcgatgaggtggaggcggcctggtcggaatacgccgaagggatgtttggcgagatcgacgtggaagagaaacgcacgtttacggaatttattcgtgaaggtgtgggcgttcatgcgtttaacggcgaaatctttgtgcagccggtctgggatacggagagcacgcaactgtttcgtacgcgttttaaagccgtgagtccgaaacgggtggacacgccaggacacggtatggggaaccgttttctgcgggccggtgtggaggtcgatcgatatggtcgtgccgttgcgtaccatatctgtgaggatgattttccgttctctgggagtggacgatgggaacggatcccgcgtgaacttcccaccgggcgtccggccatgctgcatattttcgagccggtggaggacgggcagacccgtggggccaatcagttttacagcgtaatggaacggctgaagatgctcgattccctgcaggcaacacagcttcagtcggccatagtgaaggcgatgtatgcagcgacgattgaaagtgaccttgataccgaaaaggcctttgaatatatcgccggtgcgccgcaggggcagaaggataatccgcttattaatattctggataagttctccacctggtatgacacgaatagcgtgatgctgggcggtgtcaaaattccgcaccttttccccggtgatgatctgaaacttcagaccgcgcaggattcagacaatggattttcggcgcttgaacaggcgctgctgcggtatatcgccgccggtcttggcgtttcctacgaacagttgtcccgtgattactcgaaggtcagttactcaagtgcccgcgcatccgccaatgagtcgtggcgctattttatggggcggcgaaaatttattgcgtcccggctggccacgcagatgttttcctgctggctggaagaggcacttcttcgggggattattcgtccgccacgggcacggtttgatttttatcaggcgcgatcagcctggtcacgggctgagtggattggagccggaagaatggccattgacgggctcaaggaggttcaggaatcagtgatgcgcattgaggccggactgagcacgtatgagaaagagctggcgctgatgggcgaggattatcaggacattttctgccaacaggtcagggaatctgcagagcgggaaaaagccggactctcacgtccggtgtggatagcgcaggcgtatcagcagcagatagcggagagtcgcaggccggaagaggagacaacaccacgtgagacgtaa

SEQ ID NO: 460964 - DNA, 1506 bp, Shigella boydii
gtgagacgtaatctttcacacattattgcagcagcattcaatgaaccgctgcttctggagcccgcctatgcgcgggttttcttttgcgcgctggggcgcgagatgggggcagcaagtctttcggtaccgcaacagcaggtacagcttgatgctcccgggatgctggctgaaacggacgagtacatggccggaggtaaacgaccggcccgtgtttaccgggtggtgaacggtattgcggtactgccggtgaccggcacgctggtgcaccggctgggggggatgcggccattttccggaatgactggctatgacggcattgtcacctgtcttcagcaggcaatggcagatagccaggtgcggggcatactgctggacattgacagtccgggcgggcaggccgccggcgcgtttgactgcgctgacatgatttaccgcctccgtcagcagaagccggtctgggcactgtgcaatgacacggcctgttctgcagccatgctgctggcgtcggcctgctcccgacggctggttacccagacatcccgtatcggctccattggcgtgatgatgagccatgtcagctatgccggtcatctggcgcaggccggtgtggatatcacgctgatttatgccggggcgcacaaggtggatggcaatcagtttgaagcgttgccggcagaggttcgccaggacatgcagcagcggattgatgcggcgcgccggatgtttgccgaaaaagtggcgatgtttaccggtctgtctgttgatgcagtcacgggaacagaggccgctgtttttgaaggtcagtccggcattgaggccgggctggcggatgaattaatcaatgcgtcggatgccatcagtgtgatggccacggcgctgaacagtaatgtcagaggaggcactatgccgcaattaactgcaacggaagccgccgtgcaggagaaccagcgagtgatggggatcctgacatgccaggaagcgaaaggacgtgaacagcttgccacgatgctggcagggcaacagggcatgagcgttgaacaggcccgggcgattctggccgcggcggcaccgcagcagccggtggcatccgcgcagagtgaagccgatcgcattatggcgtgtgaagaagcgaacggtcgtgaacaactggcggcaacgctggcggcgatgccggagatgacggtggaaaaagcccgcccgatcctggcggctgcaccactggcggatgccgggccctcacttcgtgatcagatcatggccctagatgaggcaaaaggggcagaagcgcaggctgaaaaactggcggcctgcccgggaatgaccgtggagaacgcccgggctgtgctggctgcgggatcaggtaaggccgaaccggtctctgcatccacaaccgccctgtttgaacatttcatggcgaatcattcaccggcagcggtgcggggtggcgtgtcacagacgtcagcagacggtgatgcggacgtgaaaatgctcatggccatgccatga

SEQ ID NO: 460965 - DNA, 348 bp, Shigella boydii
atggtgacgaaaaccatcactgaacagcgtgcggaagtacgtatttttgccggtaatgatccggctcacaccgccacaggcagcagcgggatttcctcggcaacaccggctctgacgcccctgatgctggatgaagccaccgggaaactggtggtctgggatggacagaaagccggtagtgcggttggcatactggtactgccgcttgaaggcacagagacggtgctgacctattacaagtcggggacctttgcgacggaggcaatccgctggcctgacagtggggatgaacacaaaaaggcaaatgcctttgccggcacagccctgagtcacgcggctctgccgtaa

SEQ ID NO: 460966 - DNA, 330 bp, Shigella boydii; identical to SEQ ID NO: 27785

SEQ ID NO: 460967 - DNA, 1338 bp, Shigella boydii
atgaacacttcaccggtgcgaatggatgatttaccgcttaaccgttttcactgccgcattgctgcgctcactttcggcgcacacctgaccgacggttatgttctcggcgtcattggttacgccattattcagcttacgcccgccatgcaactgacgccgtttatggcgggaatgatcggcggctcggcgctccttggtttgttccttggcagcctggttcttgggtggatctccgaccatattggtcggcaaaaaatcttcaccttcagctttttgctgattacgcttgcttcgtttttacaattttttgccaccacgccagagcatcttattggactgcgcattttgattggcattggtctgggaggcgattattcagtaggtcacaccttgctggctgaattttccccgcgccgccatcgcggtattttgctgggcgcattcagcgtggtgtggaccgtaggctatgtgctggcaagtattgccggacatcactttatttccgaaaacccggaggcctggcgctggctactggcatcggcagctctgcccgcgttgttgattacgttattacgctggggaacgccagaatcaccacgctggctactgcgccaggggcgttttgcagaagctcacgctatcgtgcatcgctattttggtccccatgttttactgggcgatgaagtggtaacggcgacccataaacacatcaaaaccttgttctcttcgcgttactggcggcgcacggcgtttaacagcgtcttctttgtctgcctcgtaatcccatggtttgtgatttatacctggctgccaactatcgcccagactattggtctggaagatgcgctgactgccagcctgatgcttaatgcgttgttaattgtgggcgcgctgctgggattagttctgacgcacctgctggcacatcgcaaatttttgctgggaagttttttgctgctggcggcaacgctggtagtaatggcctgtttgccttccggcagttcattaacgctgctgctttttgttctcttcagcaccaccatttcggcagtcagtaatctggtgggcattttgcctgcggaaagttttcctactgacattcgctcgctgggcgtcggttttgccaccgccatgagtcgacttggcgcggcggtaagtactggcctgctgccgtgggtgctggcgcagtggggaatgcaagtcaccttattgctcctggcgacagtgttgttggttggttttgttgtgacctggctatgggcaccagaaactaaagccctcccgctggtggcggcgggaaatgtaggaggtgcgaatgaacattctgttagcgtttaa

SEQ ID NO: 460968 - DNA, 780 bp, Shigella boydii
atgaacattctgttagcgtttaaagccgaaccggatgccggaatgctggcggaaaaagagtggcaggcggcggctcagggtaaaagcggaccggatatttcgctactgcgaagtttactcggtgctgatgaacaggccgctgccgcgctgctgttggcgcagagaaaaaacggtacgccgatgtctttaaccgcgttgagcatgggggatgaacgggcattgcactggctgcgctatctcatggctcttgggtttgaggaagctgtattgctggagacggcggcagatctgcgctttgcgccggaatttgtcgctcgccatattgccgaatggcagcatcagaatccgctggatctgataattaccggctgccaaagcagcgaagggcagaatgggcaaacgccatttttgctggcggaaatgctgggctggacctgcttcacccaggtggagcgtttcactctcgacgcgctgtttatcaccctcgaacagcgtactgaacatgggttgcgttgttgccgggttcgcttgcctgcggtgattgccgtgcgtcagtgcggtgaagtggccttgccagtaccgggaatgcgccagcgaatggctgcggggaaagcagaaattatctgtaaaactgttgctgccgaaatgccagcgatgcagtgtctgcaactggcaagagcagagcaacgacgcggagcgacgctgattgatgggcaaacggtagcagaaaaagctcaaaagctatggcaggactatttacgccaaaggatgcagccatga

SEQ ID NO: 460969 - DNA, 861 bp, Shigella boydii
atgaatatcgcaattgtgacaataaatcaggagaatgccgcaatagcaagctggctggcggcgcaggatttcagtggttgtaccctggcgcactggcagattgaacctcagcctgtagtggcggaacaggtgctggatgcgttggtggaacagtggcagcgaacgcctgcggacgttgttctctttccgccgggaacgtttggcgatgaactgtcgacccggctggcctggcgtttacatggtgcaagcatctgccaggtgacttcgttagatattccaaccgtaagcgtgcgcaaatcccactggggaaatgcgctaacggcgacgctgcaaacagaaaaacgcccgctatgcctttccctggcgcgtcaggcgggagcagcgaaaaacgccacgttgccctctggaatacaacaactgaacattgtcccgggtgcgcttcccgactggctggttagcacagaggatctgaaaaatgttactcgcgacccattagctgaggccagacgggtgctggtggtggggcagggcggagaggcagataaccaggaaatcgctatgctggcagaaaagctgggagccgaagtgggctacagtcgggcgcgagtgatgaacggtggcgttgatgctgaaaaagtgattggtatttccggacatttgctggcacctgaggtgtgtattgttgttggcgcttccggcgcagcagcgttaatggcgggcgtacgcaatagcaagtttgtggtggcgattaatcatgacgccagcgctgcggtattttcacaggcagatgttggcgtggttgatgactggaaagtggtgctggaggcactggtgacaaacattcacgcagattgccaataa

SEQ ID NO: 460970 - DNA, 576 bp, Shigella boydii
atgcccctcttacacctgctccgccagaatccggtgattgctgccgttaaagataatgccagcctgcaactggcaatcgactctgaatgccagtttatttccgtgttgtacggcaatatctgcaccatcagtaatatcgttaaaaagattaagaacgccgggaaatatgcttttattcatgttgatttgctggaaggcgcgtcaaataaagaagtcgtgattcagtttttgaaactggtgaccgaggcggacggcattatcagtaccaaagcctcaatgttgaaagcggcaagagcggaaggttttttctgtattcatcgcctgtttattgttgattcaatttcgtttcacaacattgataagcaagttgcgcaatcgaatccggattgtattgagatcctgccaggctgtatgcccaaagtgctgggctgggtgacagagaaaatccgccaaccgctgattgccggtgggctggtgtgcgatgaagaagatgcgtgtaatgcgattaacgcgggtgtcgtggcgctttccaccacgaataccggggtctggacgttagcgaaaaaattactttga

SEQ ID NO: 460971 - DNA, 261 bp, Shigella boydii
atgtctgtagcccataatctctggcgcgttgctgatgcgccgcacattgttccggctgactccgttgagcgtcatatggtacaatggttgattaacgcctgtccggcaggtcttttttcgctcacaccggaaggtgacttacgcgttgattatcacggctgcctggagtgtggcacctgccgtttgctgtgcgacgaatccacactacaacagtggcgctatccgccttccggattcggcatcacctaccgctttggataa

SEQ ID NO: 460972 - DNA, 1269 bp, Shigella boydii
atggaagacgactgcgacattattattattggtgccggtattgcaggcaccgcttgcgcgttacgctgcgcgcgagcgggtttatccgttttgttactggaacgcgctgaaatccccggcagcaaaaatctttccggcggacggttatatacccatgcactcgcggaactcctccctcagtttcatctgaccgcgcctcttgaacgacgcatcactcacgaaagcctttccctgttaacgcccgatggcgtaacgacgttttccagcttacagcccggcggtgaatcctggagtgtattacgtgcacggttcgatccgtggctggttgccgaagccgaaaaagaaggtgtcgaatgtatccccggagcgacggtggatgcactgtatgaagaaaacggcagagtctgtggcgttatttgtggtgacgatattctccgcgcccgttatgtggtgctggcagaaggtgccaacagcgtcctggctgaacgtcacgggttagtgactcgtcctgctggcgaagcgatggcgttggggatcaaagaagtgctgtcgctggaaacatccgctattgaagaacgttttcatctggagaataacgaaggcgcagcgttgctgttcagcggcggaatctgtgatgacttacccggcggcgcatttctttatactaatcaacaaacgccctcgttagggattgtttgcccgctctcttcccttacgcaaagtcgtgttccggcaagcgagctgctgactcgctttaaagcgcatccggcagtgcgcccgcttatcaaaaacacggaatcactggagtatggtgcgcatctggtgccagaaggtggcttgcacagtatgccggtgcaatacgccggtaacggctggcagctggtgggcgatgcgttgcgcagttgcgtcaataccggaatttccgtgcgcggcatggatatggcgctgactggcgcgcaggcggcacaaacgctgataagcgcctgccagcaccgcgagccgcaaaatctgtttgcgctttatcatcacaacgtagagcgcagcctgctatgggatgttctacaacgttatcagcatgttccggcgcttttgcaacgccctggctggtatcgggcgtggcctgcgttaatgcaggatatttcccgcgatttatgggatcagggtgataaacctgttccaccgctgcgccagttattctggcgtcatttacgtcgtcatggcctgtggcatctggcgggcgatgttatcaggagtctgcgatgtctgtag

SEQ ID NO: 460973 - DNA, 366 bp, Shigella boydii
atgatgtccaccacgttatttaaagatttcaccttcgaagccgctcaccgcttaccacacgtcccggaagggcataaatgtggtcgcctgcacgggcattcctttatggtgcgactggaaattaccggggaagtcgatccgcatacgggctggattatcgatttcgctgaactaaaagcggcgtttaagccaacttatgagcgcctcgatcaccattatctcaatgatattccaggtctggaaaacccaactagcgaagttttagcaaaatggatttgggatcaggttaaacccgttgtgccgctgttaagtgcggtgatggtaaaagaaacctgcaccgctggttgtatctatcgcggcgaatga

SEQ ID NO: 460974 - DNA, 303 bp, Shigella boydii
atgaaaaaaagaaattttagcgcagagtttaaacgcgaatccgctcaactggttgttgaccagaaatacacggtggcagatgccgccaaagctatggatgttggcctttccacaatgacaagatgggtcaaacaactgcgtgatgagcgtcagggcaaaacaccaaaagcctctccgataacaccagaacaaatcaaaatacgtaagctgaggaaaaagctacaacgcattgaaatggagaatgaaatattaaaaaaggctaccgcgctcttgatgtcagactccctgaacagttctcgataa

SEQ ID NO: 460975 - DNA, 276 bp, Shigella boydii; identical to SEQ ID NO: 458859

SEQ ID NO: 460976 - DNA, 1125 bp, Shigella boydii
atgcgccatttacgcaatatttttaatctgggtatcaaagagttgcgcagtctgctcggtgataaagcgatgctgacgctgattgtcttctcgtttacggtgtcggtgtattcgtcagcgaccgttacgccaggatcgttgaacctcgcgccgatcgccattgccgatatggatcaatcgcagttatcgaaccggatcgttaacagcttctatcgtccgtggtttttgccaccggagatgatcaccgccgatgagatggatgccggactggacgccggacgctataccttcgcgataaatattccgcctaattttcagcgtgatgtcctcgccggacgccagccggatattcaggtgaacgtcgatgccacgcgcatgagccaggcatttaccggcaatgggtatatccagaatattatcaacggtgaagtgaacagctttgtcgcgcgctaccgtgataacagcgaaccgttggtatcgctggaaacccggatgcgctttaacccgaaccttgatcccgcgtggtttggcggggtgatggcgatcatcaacaacattaccatgctggcgattgtattgaccggatcggcgctgatccgcgagcgtgaacacggcacggtggaacacttactggtgatgccgataacgccgtttgagatcatgatggcgaagatctggtcgatggggctggtggtgctggtggtatcgggattatcgctggtgctgatggtgaaaggtgtactgggcgtaccgattgaaggctcgatcccgctgtttatgctgggcgtggcgctcagtctgtttgccaccacgtcaatcggcatttttatggggacgatagcgcgttcaatgccgcaactggggctgctggtgattctggtgctgctgccgctgcaaatgctttccggtggatccacgccgcgcgaaagtatgccgcagatggtgcaggacattatgctgaccatgccgacgacacactttgttagcctcgcgcaggccattctctaccggggtgccggattcgaaatcgtctggccgcagttcctgacgctgatggcaattggcggcgcgtttttcaccattgcgctgctgcgattcaggaagacgattgggacaatggcgtaa

SEQ ID NO: 460977 - DNA, 2736 bp, Shigella boydii
atgacgcatctggaactggttcccgtcccgcctgtcgcgcaactggcgggcgtgagccagcattatggaaaaaccgttgcgctgaacaatatcactctcgatattccggcccgctgtatggtcgggctgattggcccggacggcgtcgggaagtcgagtttgttgtcgttgatttccggtgctcgtgtcattgagcagggcaatgtgatggtgctgggcggcgatatgcgcgacccgaagcatcgccgcgacgtctgcccgcgcatcgcctggatgccgcaggggctgggcaaaaacctctaccacaccttgtcggtgtatgaaaacgtcgattttttcgcccgcctgttcggtcacgacaaagcggagcgggaagtgcgaattaatgagctgctgaccagcacggggttagcaccgtttcgcgatcgtccggcagggaaactctccggcgggatgaagcaaaaacttgggctgtgctgcgcgttaatccacgacccggaactgttgatccttgatgagccaacaacgggggttgacccgctctcccgcgcccagttctgggatctgatcgacagtattcgccagcggcagagcaatatgagcgtgctggtcgccaccgcctatatggaagaggccgaacgcttcgactggctggtagcgatgaatgccggagaagtgctggcaaccggcagcgccgaagagctgcggcagcaaacgcaaagcgccacgctggaagaagcatttattaatctgttaccgcaagcgcaacgccaggcgcatcaggcggtagtgatcccaccgtatcaacctgaaaacgcagagattgccatcgaagcgcgcgatctgaccatgcgttttggttccttcgttgccgttgatcacgtcaatttccgcattccacgcggggagatttttggattccttggttcgaacggctgcggtaaatccaccaccatgaaaatgcttaccggactgctgcccgccagcgaaggtgaggcgtggctatttgggcaaccggttgatccaaaagatatcgatacccgccgtcgtgtgggctatatgtcgcaggcgttttcgctctataacgaactcaccgtgcggcaaaacctggagttacatgcccgtttgtttcacatcccggaagcggaaattcccgcgcgagtggctgaaatgagcgagcgttttaagctcaacgacgttgaagatgttctgccggagtcattgccgctcggcattcgccagcggctttcgctggcggtggcggtgattcatcgcccggagatgttaatcctcgatgagcctacttctggtgtcgatccggtggcgagggatatgttctggcagttgatggtcgatctctcgcgccaggacaaagtgactatcttcatctccacccactttatgaacgaagcggaacgttgcgaccgcatctcactgatgcacgccggaaaagtgcttgccagcggtacaccgcaggaactggttgagaaacgcggagccgccagtctggaagaggcatttatcgcctatttgcaggaagcggcagggcagagcaacgaagccgaagcgccgcccgtggtacacgacaccacccacgcgccgcgtcagggatttagcctgcgccgtctgtttagctacagccgccgcgaagcgctggaactgcgacgcgatccagtacgttcgacgctggcgctgatgggaacggtgatcctgatgctggtaatgggttacggcatcagtatggatgtggaaaacctgcgctttgcggtgctcgaccgcgaccagaccgtcagtagccaggcgtggacactcaacctctccggttcccgttactttatcgaacagccgccgctcaccagttatgacgagcttgatcgtcggatgcgtgcgggcgatatcacggtggcgattgagatcccgcccaatttcgggcgcgatatcgcgcgtggtacgcctgtggaactcggcgtctggatcgacggagcgatgcccagtcgtgccgaaacggtaaaaggttacgtgcaggcaatgcaccagagttggcttcaggatgtggcgagccgacaatcgacacccgccagccaaagcgggctgatgaacattgagacgcgttatcgctataacccggacgtaaaaagcctgccagcaattgttccggcggtgatcccgcttctgctgatgatgatcccgtcaatgctaagcacccttagcgtggtgcgggaaaaagagcttgggtcgattatcaacctttacgtgacccccaccacgcgtagtgaatttttgcttggtaaacagttgccatacatcgcgctggggatgctgaactttttcctgctctgcggcctgtcggtgtttgtgtttggcgtaccgcataaaggcagtttcctgacgctcaccctggcggcgctgctgtatatcatcattgccaccggaatggggctgctgatctccacctttatgaaaagccagattgccgccattttcggaacggcgattatcacgttgatcccggcgacacagttttccgggatgatcgatccggtagcttcgctggaagggcctggacgttggatcggcgaggtttacccgaccagtcattttctgactatcgcccgcgggacgttctcgaaagcgctggatctgactgatttgtggcaactttttatcccgttgctgatagccatcccgctggtgatgggcttaagtatcctgctgctgaaaaaacaggagggatga

SEQ ID NO: 460978 - DNA, 1068 bp, Shigella boydii
atggataagagtaagcgccatctggcgtggtgggttgtcggggcactggcggtggctgccgtcgtggcgtggtggctgttgcgcccggcgggtgtgccggaaggctttgctgtcagcaatgggcgcattgaagcgacggaagtggatatcgccagcaaaattgccgggcgtatcgacaccattctggtgaaagaaggccagtttgttcgcgaaggtgaagtgctggcgaagatggatactcgcgtgttgcaggaacagcgactggaagccatcgcgcaaatcaaagaggcacaaagcgccgttgccgccgcgcaggctttgctggagcaacgacaaagcgaaactcgcgccgcgcagtcgctggttaatcaacgccaggcagaactggactccgtagcaaaacgtcatatgcgttcccgttcactggcccaacgaggggctatttctgcgcaacagctggatgacgaccgcgccgccgctgagagcgcccgagctgcgctggaatcggcaaaagctcaggtttctgcttctaaagccgctatagaggcggcacataccaatatcattcaggcgcaaacccgcgtcgaagcggcacaagccactgaacggcgcattgccgcagatatcgatgacagcgaactgaaagccccgcgtgacggacgcgtgcagtatcgggttgccgagccaggggaagtgctggcggcaggcggtcgggtgctgaatatggtcgatctcagcgacgtctatatgactttcttcctgccaaccgaacaggcgggcacgctaaaactgggcggtgaagcacggctgatcctcgatgccgcgccagatctgcgtattccggcgaccatcagttttgtcgccagcgtcgcccagttcacgccaaaaaccgtcgaaaccagcgatgaacggctgaaactgatgttccgcgtcaaagcgcgtatcccaccggaattactccagcagcatctggaatatgtcaaaacgggcttgccgggcgtagcatgggtgcgggtgaatgaagaacttccgtggcctgacgacctggtggtgaggttgccgcaatga

SEQ ID NO: 460979 - DNA, 276 bp, Shigella boydii; identical to SEQ ID NO: 458859

SEQ ID NO: 460980 - DNA, 699 bp, Shigella boydii
atgcaggatattcgcgaagaaaggctgaacgagtcggttaagtcagagcagtcaccgcgggtggtactctgggaaatcgacctgacggtgcagggtggtgagcggtattttttctgtaatgagctgaatgaaaaaggggagccggtcacctggcaggggcgtaagtatgaggcatacccgattgacggcagcggctttgagatgaacggccggggcagcagtgccagaccgtcgctgacggtgtccaatctgttcggtctggtcaccgggatggcggaagacctgcagagtctggtgggggccacggtggtccgccgccgggtgtatgcccgttttctggatgcggtgaatttcgttgcgggcaatccggaggcggacccggagcaggagctgagtgaccgctgggtggtggagcagatgtcgcagctgacagccatgacggcctcgtttgtgctggctacaccgaccgagacggacggggcgctgtttcccggtcgtatcatgctggcgaacacctgtatgtggacctaccgctctgatgagtgtggttacacgggcggggctgtggcggatgagttcgataaacccaccacggatatccgtaaggacagatgcagcaagtgcatgcgcgggtgtgaactgcgcaggaatgtcggcaattttggcggtttcctttccattaataaactttcgcagtaa

SEQ ID NO: 460981 - DNA, 276 bp, Shigella boydii
atgacacagactgaatcagcgattctggcgcatgcccggcggtgtgcgcctgcggagtcgtgcggcttcgtgataagcacgccggagggggagcggtatatcccttgtgtgaatatttctgcagagccggaggcgtattttcgtatcgcaccggaagactggctgcgggcagagatgcagggggagattgtggcactggtccacagtcatcccggtgagctgccctggctgagcgaggctgaccggcggctgcagataaaaagcgcactgccctag

SEQ ID NO: 460982 - DNA, 681 bp, Shigella boydii
atggcaacgacgaacgcattctgtctggcgtcaccgccactggcacgcatctgccttcacggggatttacaacgatttggccgccgcctcagcctgtatgtgaacacggcagcggaagccattcgcgccctgtcgatgcagatgccgggctttcgccgtcagatgaacgaaggctggtaccagatacgtattgccggtgatgacacggcaccggaggcggtgtatgcccgtcttcacgaacagctgggtgagggaacggtcatccacattgtgccgcgactggccggggccggaaagggtggactgcagattgtgttgggggcggcagccatcgtgggctctttcttcactgccggggcatcaatggcgttatggggttcagccctggcagccggtggtttttctgccaccacgatgctgttttcacttggagccagcatgattctgggcggtgtggcccagatgctggccccgaaggcaaaaacaccggattaccgcgcaacggataacggcagacagaacacgtacttttcctcgctggataacatgattgcccaggggaacccgatgccggtgccttacggggaaatgctggttggctcccgccgtatatcccaggacatcagcacccgtgatgaaggcgggggcggaaaggtcgtggttatcgggcgacagggataa

SEQ ID NO: 460983 - DNA, 876 bp, Shigella boydii
gtgtgcggtgatgtccacactcaccggcttaccgctgccgttaatcaggttcaccgccgatgtacctgtctccggcagggtaacctcacggtccagcgtcagggtgcgggtggcagcatcaatggacaggacacgtccgccggtcagggtcccggcatagtcattatcacagatttcaataatgtcaccgggtgtgtgccgcagcccctgagacccgagcgtgaagtccaccgtctgcgtttccagcagttcggtctttatcacccacagtccggcacggtgggcctgaccgcggctggtacagccgaacgcgtccatcttcagcagattgcgcccgtagcgcagtatggcttccgggtcttccaccagttccgtggaggtctgccagccgttctgcgggtcggtgtaattcacctccaccgccgtgtgccggtccttcagggcactgaagctgtagcggaaccccacgccgttatcatccaccaccacatcgctgttggtgtacggccacaccacatccgacaggcggtcctgaacaaacgtcagcatctggccgttccataccggcatacagcgcatcgcagagcagaaatcactgagaacgtcccacgccttacgctgttgtgccaggtacgcattaaaggtcatccgcggctcggtccccccgaaaccatccgggaccgtctggtcgcagtactgcccgatggcatacagcgcccacttgtccacatccgccgcccccagacgttttcccatgccgtagcgcgggtgagtcagcatgtcccacaggcaccaggccgggttgttgctgtatgccggtttcagactgccgtcccagataccactgtacgtgcgtttttccgggtcatagtttga

SEQ ID NO: 460984 - DNA, 501 bp, Shigella boydii
gtgaatgcgaactccgggacgctcaacaacgtcactattaacgagaactgtcgggttctgggaaaattgtccgcgaaccagattgaaggcgatctcgttaaaacagtgggcaaagctttcccccgggactcccgtgcaccagagcggtggccatcaggaaccattaccgtcagggtttatgacgatcagccgtttgaccggcagattgttattccggcggtggcattcagcggcgctaaacatgagaaagagcatactgatatttactcctcatgccgtctgatagtgcggaaaaacggtgctgaaatttataaccgtaccgcgctggataatacgctgatttacagtggcgttattgatatgcctgccggtcacggtcacatgacgctggagttttcggtatcagcatggctggtgaataactggtatcccacagcaagtatcagcgatttgctggttgtggtgatgaagaaagccaccgcaggcatcagtatcagctga

SEQ ID NO: 460985 - DNA, 534 bp, Shigella boydii
gtggcgaccgtcatcacttccggtcagcacgtcgtgcgttttccccttgttgtcagttacgcggagataatccccggagaaagtcgacacacggctgtaagccacacccgccatcgcatacgcgctgaaccattcattcacgcgtacagacggccccgccattacgctgaaccagcggttacgaacggaatcttcatgccagcgggtatcgctgtagtgcgtttttttctcatcttcagcattggcataactgaaggacgtaatcagccccagcgcgtccgtaaactcataacggtatttcacgttaatcccgttcagattatcgctgccgggagcgttcgtacgggcatgaagataccccgcgctcagtgtggactgatgttcagacgcccatgcaggcgcaccggatacggacagacagatggctgcggacaaaatggctgcacaaactttacgcataattacctctcgcttttctgcaataaaaaaggcgccatttctggcgcccgtatatgggttataaaattcagctga

SEQ ID NO: 460986 - DNA, 276 bp, Shigella boydii; identical to SEQ ID NO: 458859

SEQ ID NO: 460987 - DNA, 687 bp, Shigella boydii
atgagctttatggcttttgtaacttgtttgacaattgcatttatcgccggttttgctgttgccagaaaattgacactccgaaaagttgcctcatcggtaatcatcgctaaatcgcaacccgtcccttcatctgcaacttcccctgccgctaaggcgtcgacaaggagctatataccgcagaaaacctatcgtgactctcgttggcaagagcgagatgagttatttcagggaatggttgccgaaggtattttattggaaagaaaagagtggttaatcactcgttgtgaaaaaatgtatttcgataatctggaaaaatggtttggacattattgtcatatccattgccaggcctctctggggcgcttgatcaactttccagaacaacctgagtttagcgaagaagaaagaaagcgtttctttgcaatttataatggcatggcaatggattatgttctagtttcaaagaagaacaataaaaaagtctgtgttattgagctggatgacccgagtcatgaaagggcggatcgcattattcgtgaccgttggttggatacaattatgactcttgcacgggtgccttttgtacgagcttctgtcactaaattggaggaaattcctccggtctgggagactcgtgacaagattcgcccattagtcgcggcgacaaagagtgaaccggtgcattaa

SEQ ID NO: 460988 - DNA, 939 bp, Shigella boydii
atggatatcatcttttatcacccaacgttcgatacccaatggtggattgaggcactgcgcaaagctattcctcaggcaagagtcagagcatggaaaagcggagataatgactctgctgattatgctttagtctggcatcctcctgttgaaatgctggcagggcgcgatcttaaagcggtgttcgcactcggggccggtgttgattctattttgagcaagctacaggcacaccctgaaatgctgaacccttctgttccactttttcgcctggaagatactggtatgggcgagcaaatgcaggaatatgctgtcagtcaggtgctgcattggtttcgacgttttgacgattatcgcatccagcaaaatagttcgcattggcaaccgctgcctgaatatcattgggaagattttaccatcggcattttgggcgcaggcgtactgggcagtaaagttgctcagagtctgcaaacctggcgctttccgctgcgttgctggagtcgaacccgtaaatcgtggcctggcgtgcaaagctttgccggacgggaagaactgtctgcatttctgagccaatgtcgggtattgattaatttgttaccgaatacccctgaaaccgtcggcattattaatcaacaattactcgaaaaattaccggatggcgcgtatctcctcaacctggcgcgtggtgttcatgttgtggaagatgacctgctcgcggcgctggatagcggcaaagttaaaggcgcaatgttggatgtttttaatcgtgaacccttaccgcctgaaagtccgctctggcaacatccacgcgtgacgataacaccacatgtcgccgcgattacccgtcccgctgaagctgtggagtacatttctcgcaccattgcccagctcgaaaaaggggagagggtctgcgggcaagtcgaccgcgcacgcggctactaa

SEQ ID NO: 460989 - DNA, 738 bp, Shigella boydii
atgtatcccgtcgaccttcatatgcataccgttgccagcacacatgcatatagcacattgagtgattacattgcccaggccaaacaaaagggcattaaactttttgcgatcaccgatcatggcccggatatggaagatgctccgcatcactggcacttcattaacatgcgtatctggccgcgagtggttgatggggtagggatcctgcgcggcatcgaagctaacattaaaaatgttgatggtgaaattgattgcagcggtaaaatgtttgactcgctggatctgattattgccggttttcatgagccggtttttgcaccacatgacaaagcgaccaatacacaagcgatgatcgccactatcgccagcggcaatgtgcatataataagccatcccggaaatcccaaatatgaaatagatgtgaaagccgttgctgaagcagccgcgaaacatcaggtggcgctggaaatcaataattcttcatttttacactcacgtaagggcagtgaagacaactgtcgtgcggtagccgcagcggtacgtgatgctggaggttgggtggcattaggctcggattctcacaccgcgtttaccatgggggaatttgaagagtgtcttaaaatcctcgacgcggtagattttccgccagagcgcattttgaatgtttctccgcgccgcttactgaacttccttgaatctcgcggtatggcaccgattgcggaatttgcagacctttaa

SEQ ID NO: 460990 - DNA, 555 bp, Shigella boydii
atgaacgagttttctatcctctgtcgtgtgctgggttcgctctattaccgccaaccgcaagatcctttactggtgccgctgtttaccctgattcgtgaggggaaactggctgcgaactggccactggagcaggatgagttactgacgcgtttacagaaaagctgtgatatggcgcaagtctctgccgattacaatgcgttgtttatcggcgatgaatgtgccgtgccgccatatcgtagcgcatgggttgaggacgcaacggaagcggaagtgcgcgcttttctttccgaacgagggatgccactggcggatacgccagccgatcacatcggcacattgctgcttgcggcttcctggctggaagatcagtcaacggaagatgagagcgaagcactggaaacactgttcagtgagtatctgttaccctggtgtggtgcgttcctcggcaaagtggaggcccatgcaaccacgcctttctggcgcaccatggcaccgctaacccgtgatgccattagtgcaatgtgggacgagctggaagaagattctgaagagtaa

SEQ ID NO: 460991 - DNA, 522 bp, Shigella boydii
atggccgcgttttctgctatcatgcgcggcatgaacatacttctctctattgcaatcacaacaggcattctctccggtatctggggatgggtggctgtttccctgggcttactaagctgggcgggcttcctgggctgtacggcctactttgcctgcccgcaaggtgggctgaaagggctggcgatctccgctgcaaccctgcttagtggcgtggtgtgggcgatggtcattatttacggtagtgcactggcaccacatctggaaattctcggttatgtcataaccggtattgtggcgtttctgatgtgtattcaggccaaacagctgctgctttcatttgttccggggacgtttataggcgcatgcgcgacgtttgccgggcagggtgactggaaactggtgttaccttcgctggcgcttgggctggtatttggttacgcaatgaaaaacagcggcctgtggctggcggcgcgtagtgcaaagacggctcaccgtgagcaggaaatcaaaaataaagcgtga

SEQ ID NO: 460992 - DNA, 426 bp, Shigella boydii
atggttgaaggttcgattatcggttatgaaagcaacgttaaatcgggcggtgttggggcaagatattttgggatcggtgcagacacgcaataccagctcgatcagattgccgtgaacctgcgtgtcgtcaatgtgagtaccggtgagatcctctcctcggtgaacaccagtaagacgatactttcctatgaagttcaggccggggttttccgctttattgactaccagcgcttgctggaaggggaagtgggttacacctcaaacgaacccgttatgctgtgtctgatgtcggctatcgaaacaggggtcattttcctgattaatgatggtatcgaccgtggtctgtgggatttgcaaaataaagcagaacggcagaatgacattctggtgaaataccgccatatgtcggttccaccggaatcctga

SEQ ID NO: 460993 - DNA, 417 bp, Shigella boydii
atgcgtgtcaaacatgcagtagttctactcatgcttatttcgccattaagttgggctggaaccatgactttccagttccgtaatccaaactttggtggtaacccaaataatggcgcttttttattaaatagcgctcaggcccaaaactcttataaagatccgagctataacgatgactttggtattgaaacaccctcagcgttagataactttactcaggccatccagtcacaaattttaggtgggctactgtcgaatattaataccggtaaaccgggccgcatggtgaccaacaattatattgtcgatattgccaaccgcgatggtcaattgcagttgaacgtgacagatcgtaaaaccggacaaacctcgaccatccaggtttcgggtttacaaaataactcaaccgatttttaa

SEQ ID NO: 460994 - DNA, 1176 bp, Shigella boydii
atgaatattttcactttatccaaagcaccgctatacttgttaatttcactatttttacccacgatggccatggctatcgatccacctgaacgcgaactttcgcgatttgccctgaaaacgaattaccttcagtcccctgatgaaggcgtctatgaactggcgtttgataatgccagtaaaaaggtgtttgcagcagtcaccgatcgtgtaaatcgtgaagccaataaaggctatctgtattcgtttaattcagattcgctgaaagtcgaaaataaatacacgatgccataccgggcattttcgctggcgataaatcaggataaacatcagctctatatcggacacacccagtcagcgtccctgcgtatcagtatgtttgacaccccaaccggtaaactggtaagaaccagcgacaggttaagttttaaagcggcaaacgctgcagattcgcgttttgagcatttgcgccatatggtttacagccaggattccgataccctgtttgtgagttatagcaatatgctgaaaacggccgagggcatgaagcctctgcataagctgttaatgctcgacgggacgacgcttgccttaaaaggcgaggttaaggatgcttacaaaggtacagcgtatggtctgacgatggatgaaaaaacacagaaaatctacgttggcggaagagattacatcaacgaaattgatgcgaaaaatcagacgctgctgcgtaccatcccgttgaaagatccgagaccacaaatcacaagtgtgcagaatctggcggtggactccgcttctgaccgtgcctttgtggtggtattcgaccatgacgatcgttccggtacaaaagatggcctctatatttttgacttacgcgacggtaaacagcttggctatgtgcacacaggagccggagctaacgcggtgaaatacaatccgaaatataacgaactgtatgtcaccaacttcactagcggcaccatcagcgtagtggatgccaccaaatacagcatcacccgtgaatttaacatgccggtctacccaaaccagatggtgttgtcggacgatatggataccctttacattggcatcaaagaaggctttaaccgcgattgggatcctgatgtgtttgtggaaggagctaaagaacgtattctgagcattgatttgaaaaagtcgtga

SEQ ID NO: 460995 - DNA, 2262 bp, Shigella boydii
atgaacgttataaaactggctatcggctcaggcatattattgctcagctgcggtgcttactcacaatccatcagtgaaaaaactaattccgacaaaaaaggagcggcagaattcagtccgctcagcgtttctgtcgggaagacgaccagtgagcaggaagctctcgagaaaacaggcgcgaccagttcccggacaacggacaaaaacctgcaatcacttgacgcaacagtgcgtagtatgcctggtacttatactcaaatagatcctggtcagggagcaatcagtgtgaatattcgaggcatgagcggatttggtcgtgtaaacactatggtcgatggtattacccagagtttttacggaacctctacctccggaacaacggcgcatggttcaactaacaatatggctggcgtacttatagatcctaacttactggtagcagttgatgttacacgcggtgacagcagtggctctgaagggatcaacgcccttgccggtagtgcaaatatgcgtactattggcgttgacgatgtaatatttaacggtaatacatatggccttcgttcacgtttctctgtcggtagtaatgggctgggacgcagcggaatgatcgcccttggtggaaaaagcgacgcttttacggatacgggaagcattggcgttatggctgctgtgagcggcagttctgtgtactctaatttctcaaatggttctggaattaacagcaaagagtttggttatgataaatatatgaagcagaaccccaaatcccaactgtataaaatggatatcagaccagacgaatttaacagcttcgaactttccgctcgaacctatgaaaataaatttacacgtcgtgatataaccagtgacgactattacattaaatatcattacacccctttttctgaattaattgactttaacgtaacggccagtaccagtcgcggtaatcaaaagtatcgtgatggctcgctgtatactttctacaaaacctcagcgcaaaatcgttctgacgcgctggatatcaacaataccagccggttcactgtcgcggacaatgaactggagtttatgctgggcagcaaactgatgcgtacccgctatgaccggaccattcactcagcggcgggcgacccgaaagcgaaccaggaatcgatcgagaacaatccgttcgcaccctccggccagcaggatatttcagcgctgtataccgggctgaaggttacgcgcggcatctgggaggcagatttcaatctcaactacacacgtaacaggatcacagggtacaagcccgcctgcgattcacgcgttatctgcgtgccacagggtagctacgatattgacgataaagagggtggcttcaacccttcagttcagctttctgctcaggtaacaccatggcttcagccgttcattggctacagcaaatccatgcgtgccccgaacatccaggagatgttcttctctaattcaggaggcgcatccatgaacccattcctgaagcctgaacgtgcagaaacctggcaggcgggttttaacattgataccagagatttactggtcgaacaggatgccctgcgctttaaggctctggcgtaccgcagcaggatccagaactacatctacagcgagtcttatctggtttgttctggaggtcgtaaatgcagtatggctgaggtgattggcaatgactgggagggcattagcgatgaatacagcgacaatatgtacatctacgttaactcggcaagcgacgttattgcaaagggcttcgaactggagatggattatgatgcaggttttgcttttggccgactctctttcagccagcagcaaacagaccagccaacctccatcgccagcacctactttggcgcaggggatatgaccgaactgcccagaaaatacatgacgctggatactggtgttcgcttcttcgataacgcgttgaccctgggcactatcataaaatacacaggcaaggctcgtcgcctgtcgcctgattttgagcaggacgaacataccggcgcaataatcaaacaggatttgccgcagatcccaacgattatcgatctctatggtacttacgagtacaaccgcaacctgacactgaaactttcggtacaaaacctgatgaacagagattattcggaggcgctgaataagctcaacatgatgccaggtcttggtgacgagagccacccagccaattccgcgcgtggcagaacatggatatttggcggggacattcgtttctga

SEQ ID NO: 460996 - DNA, 777 bp, Shigella boydii
atgatgaatattctccacttcccacagtcggtaaaatggagcagctggtttatctgttctctactgcttcatggactgattttccttacgtttatctggcgtttttccgaagttcagcccgctatgtctcctgcaccggcgatcatgctgcaatgggcagaaattatagaggctccttcttctccactttcgcttccggtgggaatcgctcaacaggagtccgcagtgacagaagaaaagcaacaaactgaggacagacaacaacgtcctgtcactgaagacagtgatgcaaccattgaaataactaggaagaaaaagtcatccgatggagaaaagaaaaagacacgtccacctcgtaagataaaggctcaaaccagcgacagcaaccccacagccgtttccagtaatgctgcacctcaggctctggtcgaatcgtcccgtattgctgcgccttttaacagtgactcaacaaagcgagataattctgaggcatcttgggaaagcagagtaaaaggccaccttaaccgttataaacgttaccctggcgatgccagaaaacgtgcacgaaccggcacagccgttgtgacttttaccgtaaacacggaaggcactattgtcagtagtttcttggaaatctcttcaggaaccctttctcttgaccgcgaagctattgctgttttagaacgcgctcaaccacttcccaaaccaccgcctgaaatattggagggaggattatttaaagtaaaaatgccgattacctttaagttgaaggagtaa

SEQ ID NO: 460997 - DNA, 876 bp, Shigella boydii
atgagaaagttcatccttatttctatgataacgttagctagtgttagtctgggagcctgcagacagaatgtcaccataaagcaggatgcgccagggcagaaagctttcctgattgacgggcagatttacgatttgcacagtggcaaaattatttctagcagcgagcttttggcggatcttgctaccgctcgacatcttattattggtgaaaaacacgataatgccgagcatcatcagattgagctttggcttattcaaaatctgctcatccagcgaccacaggggagtgtgttgcttgagatgttgacgtcagaccaacagccccgagttaaccaagttaaatgttggctgaaagataatcctgtggttcgagatagccgtgttcaggaactacttaactggcaaaaagggtggtcctgggagatgtatggcgacatcgtcatgcagctattacgtgggccttacccgctgctcaatgccaacattggccgggagcagatgttggcactgtacaaaaaaaacgaatttcctaaaggaaaaaaatccactgcacctgtggtacaagaagctctgcgtgaaaccatcatagctatgcatgaaggcaaccttgaaagccagcaactgacgtcaatgctctctgttcagcagcagcgggatcgctacatggcccgccagcttctgagtgccccggtaccgtcgttgttgattgcaggtggttatcacgcgtcaaaaagcatgggcgtaccgttacacatggaagatcttgccaccggcacccatccagtggtgttgatgcttgcagaaaaaggaatgaacatcacagtagatcatgctgactacgtgtggtttgtagcgccagatacaacaaaaaggtaa

SEQ ID NO: 460998 - DNA, 222 bp, Shigella boydii
atgggatttcattcccgcgccccgatgagttccgcgcctgatgtacatgtcgaagaaaacggccggcgggaggaatacggcgcgctacctgggtcgttatctgaagaagccgccgatagcggcctcccggctggcacattacaacggaggggcgagcctgagcttccgttacctggaccacaaaacgggataaacggcgacggaaacgctgacacagcgtga

SEQ ID NO: 460999 - DNA, 630 bp, Shigella boydii
atgactagtctaaaaactagtattaagactatcacttatttaagtgatactggttgtctggagattcagggggccagtctacctggtaataatgttctggttaataatactggaggtgacttaaacataatttcgtccgactctattctaaatggagcgactaaactcgttagcggcacaaccacgctgaagctttcagaaaatacaatctggaatatgaaagatgactccgttgttacccatctgactaattcagacagtattatcaatctttcgtatgatgatggtcaaacatttacccaaggaaaaacattaaccgtaaaaggtaattatgtcggtaataatggtcagcttaatatccgcaccgtattaggtgatgataaatcggctacggacagacttattgttgagggtaatacttcgggttcaactaccgtctatgtgaaaaatgctggaggaagcggcgcggccacgctaaacgggatcgaactcataactgtgaatggcgatgaatctccagcagaagccttcagacaaggtgatgcaaggattgcagctggagctttcgaatatcaactaaaacaacaaggcaaaaactggtatttgacaagttatcagtcagtgaattag

SEQ ID NO: 461000 - DNA, 207 bp, Shigella boydii
atgcgtctgaacgaccgtgcgggtgaaatgcgctacatcgatcctgtaactgaacaggagcgttcaagccgactttggctacgtcaaattggcgggcataatgcctggcgtgacagcaacggacagttgagaacgacctcgcatcgctacgtctcgcagttaggggccgatctgttaaccggtggttttaccgacagtgacagttag

SEQ ID NO: 461001 - DNA, 702 bp, Shigella boydii
atggctggttatgcccgcgactacaactcaactcattccagcgtgtcggattatcgttcgaaagggagtgtcagaggctattgcgcagggctgtatgccacttggtttgccgatgacatcagtaaaaaaggcgcatacattgacgcctgggcgcaatatagctggtttaaaaactcggtgaaaggggatgaattagcctatgaatcctatagtgcgaaaggcgcaaccgtctcgctggaagcgggttacggctttgccctgaataaatcctttggtctggaagcggcgaaatacacgtggatattccagccacaggcacaggctatctggatgggcgtcgatcataatgcgcacaccgaagccaatggctcacgtattgagaatgacgcaaataacaacatccagacccgacttggtttccgcacctttattcgtactcaggagaaaaacagcggtccgcacggtgacgactttgaaccttttgttgaaatgaactggatccataacagtaaagattttgctgtctcaatgaacggtgtgaaagtcgaacaagatggggcgagtaatttgggggaaattaaacttggcgtaaatggcaacctgaatccagcggccagcgtctgggggaatgtgggcgtgcagctgggtgataatggctacaatgacaccgcagtgatggtgggcctgaaatataagttctga

SEQ ID NO: 461002 - DNA, 330 bp, Shigella boydii
atgaaaaaatttgctttactggcgggcctgtttgttttcgcaccaatgacctgggcgcaggactacaatattaaaaacggtttaccgtcagaaacctatattacttgcgcagaagccaacgaaatggcaaaaactgacagcgcacaggttgcagaaattgttgcggtaatgggtaatgccagcgttgccagccgtgatttaaaaattgagcaatctccggaactgagcgccaaagtggtagaaaaactgaatcaggtttgcgctaaagacccgcaaatgctgttgatcacggcaattgatgacaccatgcgtgctatcggcaaaaaataa

SEQ ID NO: 461003 - DNA, 285 bp, Shigella boydii
atggcggatatgaatcgcaccacgaaaggtgcattgctaggcgcaggcgttggtttacttactggcaatggtgttaatggcgtactgaaaggtgcagctgttggcgctggtgttggtgcagtaacagaaaaaggccgcgacggtaaaaatgcgcgtaaaggtgcaaaagtaggtgccgccgttggtgctgtcactggcgttctgaccggcaatggcctcgaaggggcgattaaaggtgccgtgattggcggtacgggtggtgcaattctgggtaaaatgaaataa

SEQ ID NO: 461004 - DNA, 267 bp, Shigella boydii
atggcattactcgatttctttctctcgcggaagaaaaacacagccaacattgcaaaagaacggctgcagattattgttgctgaacgccgtcgcagcgatgcagaaccgcattatctgccgcagttgcgtaaagatattcttgaggtcatttgtaaatacgtacaaattgatcctgagatggtaaccgtacagcttgagcaaaaagatggcgatatttctattcttgagctgaacgtgaccttaccggaagcagaagagctgaaataa

SEQ ID NO: 461005 - DNA, 813 bp, Shigella boydii
atggcacgcattattgttgttacttcgggcaaagggggtgttggtaagacaacctccagcgcggccatcgccactggtttggcccagaagggaaagaaaactgtcgtgatagattttgatatcggcctgcgtaatctcgacctgattatgggttgtgaacgccgggtcgtttacgatttcgtcaacgtcattcagggcgatgcaacgctaaatcaggcgttaattaaagataagcgtactgaaaatctctatattcttccggcatcgcaaacacgcgataaagatgccctcacccgtgaaggggtcgccaaagttcttgatgatctgaaagcgatggattttgaatttatcgtttgtgactccccggcagggattgaaaccggtgcgttaatggcactctattttgcagacgaagccattattaccaccaacccggaagtctcctcagtacgcgactctgaccgtattttaggcattctggcgtcgaaatcacgccgcgcagaaaatggcgaagagcctattaaagagcacctgctgttaacgcgctataacccaggccgcgtaagcagaggtgacatgctgagcatggaagatgtgctggagatcctgcgcatcaaactcgtcggcgtgatcccagaggatcaatcagtattgcgcgcctctaaccagggtgaaccggtcattctcgacattaacgccgatgcgggtaaagcctacgcagataccgtagaacgtctgttgggagaagaacgtcctttccgcttcattgaagaagagaagaaaggcttcctcaaacgcttgttcggaggataa

SEQ ID NO: 461006 - DNA, 696 bp, Shigella boydii
atgtcaaacactccaatcgagcttaaaggcagtagcttcactttatctgtggttcatctgcatgaggcagaacctaaggttatccatcaggcgctggaagacaaaatcgctcaggcccccgcatttttaaaacatgcccccgttgtactcaacgtcagtgcactggaagacccggtaaactggtcagcgatgcataaggcggtgtcggcaaccggtttgcgggttattggcgtaagtggctgcaaagatgcgcaacttaaagccgaaattgaaaagatggggctgcctatcctgacggaaggaaaggaaaaagcgccgcgtccagctcccgcaccacaggctccagcgcaaaatacaacgccggtcacaaaaacgcgtttaatagataccccggtgcgttccggtcagcgtatttatgctccacaatgtgatctgattgttacaagccacgttagcgctggggccgaattgattgccgatgggaacattcatgtctatggcatgatgcgtggtcgtgcgcttgcaggggcaagtggtgaccgggaaacgcaaatattttgtacgaacctgatggcggaactggtgtccatcgcaggtgaatactggctgagtgatcaaatcccagcagaattttatggcaaagcggcgcgactgcagttagtcgaaaacgctttgaccgttcaaccgttaaattga

SEQ ID NO: 461007 - DNA, 369 bp, Shigella boydii
atgaatatgatgcgtattttttatatcggattgtcaggtgtggggatgatgttctcatcaatggcgtctggacatgacgctggcggacttcaatctccggcgtgcggcgttgtttgcgacccgtatatttgtgtgaactcagatggcatttccccagagttaacaaggaaatatctcggcgaaaaagccgctgaaaacttacaatcattacaaggctacgatcccagcgaatttacattcgctaacggtgtattttgcgatgttaaagaaaaattatgtcgtgatgatcgttattttggtgtggatggtaagcggagtggaaaaatcaatcaaatcaccacaaagatgttatttatgtgtcgtgagtga

SEQ ID NO: 461008 - DNA, 1362 bp, Shigella boydii
atgaatattggcgaacagattaaaagttttgaaaacaagcgtgtagcgctggcagcctcccttgaggaggtcatgaccaaagccgcagaggaagggcgcacgctggatgtggaggaggaagagcattacgacaacaccgcagcggaaatccgtcaggtggatgcgcacctgaagcgcctgcgtgaactggaagccggtaaggccgccacggcgcagccggtgaaacaggccggtaacgggaatgtggccgcggtggcttctgcgccggtgatccgtgtggagcagaaactggataaggggattggcttcgcccgctttgccaaatcgctggctgcggctaaaggcgtccgatctgaagccctggaagtggcccgtcgtcagtatctggatgacagtcgtctgcatcatgtcctgaaatcggcagtgggcgcggggaccaccacggatccgcagtgggcaggcagcctgtctgaatatcaggaatacgcacaggactttattgattacctgcgtccgcagaccattatcgggcgatttggtcagggcgggatccctgcacttcgtcaggtgccgttcaatatccgtgtgcacgcccaggtgtccggcggtgctgccggctgggtgggtgagggtaaggcaaaacccctgacgaagtttgattttgaatccatcaccttcagtcatgcgaaggtgtcggccattgcggtactgacggaagagctgatccgtttttccagtccggcagctgatgcgctggtccgtaatgcgctggcagaagcggtggtggcgcgtctggacacagactttgtggacccgaaaaaagccgcagtggcagatgtctccccggcgtccatcacccatgatgtgaagggcaaggcatcaaccggtaacccggatgcggatacagaggcggcgtttggacagtttgtggcagcaaacctgcagcccaccggtgcggtctggctgatgtccagcaccaatgccctggcgctgtccatgcgtaaaaatacgctgggtcagaaggaatacccggacatgaccctgctgggggggaccttccaggggctgccggtgattgtctcccagtacgtgggtgaccagctggtgctggtgaatgccccggatatttatctggcggatgacggcggcgtggcagtggatatgtcccgcgaggcatcactggaaatgcagtctgagccgaccggcgacagtaccacgccgtcgccggtggagctggtttccatgttccagacaggcagtgtggccatccgtgcggagcgctggatcaactggcgtcgtcgccgtaccgcggcggtggcggtgatcaccggtgtgaactacggcagtgcgtccggcggctga

SEQ ID NO: 461009 - DNA, 222 bp, Shigella boydii
atggcaaagatccgatatctgcagggcacgcatgatgcccgggccggggatatccgtgatgtggcacagccgtgcgcggaggtgctggttcgcctgggaaaggcggagtacatcacggtgcgacgtccggcaggtcagaaaaagaaacgtgatgcggagcatggcgaatgtggaaccttttacagcgaacccgaaaaaaccagaaatcaggacgtgacgtaa

SEQ ID NO: 461010 - DNA, 753 bp, Shigella boydii
atgtggaaccttttacagcgaacccgaaaaaaccagaaatcaggacgtgacgtaagagaggcgggctggaccagcctgtttcaggcggtggctgagcccttttccggcgcctggcagcagggcgtgaaagccgatccggaagccgtcctctcctttcatgcggtgttttcgtgcatttcgctgatatcccaggatatcgccaaaatgcggctgcgtcttatgcagacggatgcgcaggggatacgcagggaaactcgccggggggatattgcccgcctctgtcgtcgtcccaacgcccagcagaaccgcatccagttttttgaactgtggctgaacgccaaactgcgtcacggcaatacggtggtgctgaaaatccgtaactcccgggggcagatcaaagaactgcgcattctggactggagccgggttgaaccactggtggcggatgacggcgaagtgttctaccgcatcacgccggaccggaactgcgggatcactgaggcggtgacggtgcctgcccgggaagtgatccacgaccggtttaactgtttttttcatccgcttatagggttgccgccggtgtatgccgccgggctgaccgccacgcaggggcatcatattcaggaaaattcgacgtattttttcagaaatggcggggaaaacggccattctgagcaacggggcaaaatacaaccccacgacgttttcaccggtggatgcgcagacggtggaacaactgaagatgaccgctga

SEQ ID NO: 461011 - DNA, 522 bp, Shigella boydii
atgaccgctgaaattgtctgttcggtgttccgtgtcccggcctacaagattggcgtgggacaaccgccttccagtgacaacgtggaggcgctggagcagcagtattattcccagtgcctgcagacgctgattgagtccattgaactgttactggatgaggcgctggaaacgggggaaaacgagagtacagaatttgatgtcaccacgctgctgagaatggacagtgagcggcgcatgaaaacgctgggggatgccgtgaaaaatacgcttctcacgcccaatgaggcccgtaaacgggagaacctgccgcccctggccggcggtgatgcactgtatcttcagcagcagaactacagtctggaggcactgtcccgtcgtgatgcccgtgaggatccgttcgcgtcgaccgggaaaacggccttagcgcaaccgcctgacggcgcatctgacggtaataaggcaatcagtgaaacagagcatgatgcggtgaaagcgatgttcagggggattctgaaaaaatga

SEQ ID NO: 461012 - DNA, 978 bp, Shigella boydii
atgaatgaacgtgaactgtccattattcgtgccctgggagaagaattcgccacggtgctggcggatttacagcgcacatttgaggagaagatgagcgcgcaggcacaagcgtttgaagagaaactggcttccctgtccgctctgttacagaagcatgtgacggtggatgaggttagccctgttctgcaggcgatggtggatgacgcagtgggggccattccgctaccgcgtgatggtcgcgattatgatccggaagtactgaagcaggcggtgaatgatgcggtcgcgaaaataccggtgccggcagacggcaaaagtatcacccccgatgatgtgcgtccgatgcttgagcagatggtgaaagaggctgtaagccatattcctgttccgcgtgatggtcgtgactacgatccggaagtactgaagcaggcggtgaatgatgcggtcgcaaatattccgcagccggcggacggtaaaagtctcaccccggatgatgtgcgtccgatgcttgaacagatggtgacggaggctgtaagccatatccctgttccgcgtgatggtcgtgactacgatccggatgttctgcagaaggcggttctggatgcggtgagtgccctgccggctccgcaggacgggcgtgatgccacggctctggaaatactccccgccattgacgttcaaaaatcctttccccggggcacgtatgccacacaccagggcggactctggcgggcgtatgaaaaaacgcacgggatgcggggatgggaatgcctggttgacggggtggcggatattgacgtcagcatgacgggtgagcggttgttctctgtggtggtccggcagagcagtggccagcgtacggaaaaaacattttccctgccggtgatgctctaccgcggtgtgttcagagccggtgaaacctaccaccccggcgatacggtgacgtggggggctcgctgtggcactgcaacagtatga

SEQ ID NO: 461013 - DNA, 327 bp, Shigella boydii
atgacggcattactgacactggaagagatcaaggcacatctgcgtgtcgaccatgacgcggatgatgacatgctgatggacaaggttcgtcaggctaccgccgtgctgctggcctacattcagggcagccgggataaagtgatccgtgaggacggtgaactgatccagggcgaggcattaacccggatgaagggggctgccatgcgactgaccgggatgctgtaccggaatccggatcttgcggagcgggaagaactgcttcagggggagctgccgttttctgtttccgtgctgatttacgatttgcgttgtccgacggtgttatga

SEQ ID NO: 461014 - DNA, 351 bp, Shigella boydii; identical to SEQ ID NO: 7565

SEQ ID NO: 461015 - DNA, 447 bp, Shigella boydii
atgatcgaaatcctgctggatttttcggggctggaggacatcagccgcgatttgcagcttctgagtggtgcggaaaataaccgggtgctgcgtgaggcaacccgtgcgggtgcgaatgtgctgaaagaagaagtggtgtcacggacaccggtacgcaggggaaaactgcgccgcaatgtggtgatcctttcccggcgctcccgcgatggcgggatggaatccggtgtccatatccgtggtgttaatccggacaccggtaacagcgataacaccatgaaggcggataacccgcgcaatgctttctactggcggtttgtggaaatggggaccgtgaatatgccaccgcacccgtttgtgcgcccggcgtttgatgtgcgcagtgaacaggcagctcaggtggcgattgcgcggatgaaccgggccattgatgaggtactgagacgatga

SEQ ID NO: 461016 - DNA, 345 bp, Shigella boydii
atgacggaggcggatttgtatcctcatctggcgcatcttgccggcgggcaggtgtacccgtatgtggcccccctgctggatggcaggccgtcggtggcgcttccgtgggtggttttcagcctgatttcatcggtgtcagcggacgtgatgggcgggcaggcggagtcctcagtgtcggtgcagatagacgtttatgccgggactgtgacgcaggcgcgtcagatacgtcaggacgcccgtgaagccataatgctgctggccccgggatccgtcagtgaaatgcaggactatattccggaaaaccgctgttaccgtgcaaccctggagtttcaggtcacggtgtga

SEQ ID NO: 461017 - DNA, 357 bp, Shigella boydii
atgtctgctttgtatgaacgctcacagctgacgcaggtgatgatttcatctgccccggcgactgctgaaactatggataaggcggaatatctgcgcctggactgcaccatcaaggaagtccagttcaccgccggtcagaaacaggatattgatgtgaccacgctctgctccacagagcaggagaacatcaacggtctgggggcgtcgtctgagatttccatgtcgggtaatttttatctgaatcaggcccagaacgccctgcgtgatgcctatgacaatgacgcgttgtatgcgtttaaggtgctgtttccgtccggtaagggctttaaattcctggtaatgctgccaacttactga

SEQ ID NO: 461018 - DNA, 273 bp, Shigella boydii
atgctggtcactgacaccataacagaggccaccctgtacgaaaacgggctgtatacgcgccacatcagactcagtcgcccagtatctgacagcaaataccccttgccacccggatctcagctcattaaaaatatgaccttacgactgcgcctgcaggatcagcaggaagaaacatccgtgacattatttcagggaaaaatgagtaccgacggaaataactattacatcatcaaaggtaaagtaagcgtaagcgtgcagcaagaaccgtattga

SEQ ID NO: 461019 - DNA, 3858 bp, Shigella boydii
atgaataaaatttattcactgaaatatagtcatattacaggtggattagttgctgtttctgaactgacccggaaagttagtgtcggtacatcaagaaagaaagttatcctcggtattattttatcctcaatatatggaagttatggcgaaacagcatttgcagcaatgctggatataaataatatatggacccgcgattatcttgaccttgctcaaaacagaggagagttcagaccgggtgcaacaaatgttcaattaatgatgaaagatggaaagatatttcattttccagaactacctgtacctgatttttctgctgtttccaacaaaggtgcaacaacatcaattggaggtgcgtacagtgttactgcgactcataacggtacacagcatcatgcaataaaaacacagtcatgggatcagacagcatataaagcaagtaacagagtatcatctggcgacttttcggttcatcgtctgaataaattcgtcgtggaaacaacaggggttacggagagtgccgacttctcactttctcccgaagatgcgatgaaaagatatggcgtaaactacaacggtaaggaacaaataattggcttcagagcaggtgccggaacaacctcaacgatattaaacggcaaacaatatctgtttggacaaaactataatcccgacttgttaagcgcaagtctttttaatctggactggaaaaacaagagttacatttataccaacagaaccccttttaaaaactcaccaatttttggcgatagtggttctggttcttatctatatgataaagaacaacaaaaatgggttttccatggtgttaccagtacagttggttttatcagtagtaccaatatagcctggacaaactactcgttatttaataatattctggtaaacaatttaaaaaagaatttcacaaacactatgcagctggatggtaaaaaacaagagttatcatcgattataaaagataaggacctgtctgtctcaggaggaggggaattaacgctcaagcaggataccgatcttggcattggcgggcttatattcgataagaaccagacatataaagtgtacggaaaagataagtcttataaaggtgccgggatagatattgataataataccaccgttgaatggaatgttaagggcgttgccggagataatctgcataaaataggtagtggtactctggatgtaaaaatagcacagggaaataaccttaaaataggtaatgggactgtcatccttagtgctgaaaaagccttcaataaaatttacatggccggaggtaaaggtacggtaaaaataaatgccaaagacgctttaagcgaaagcggtaatggcgaaatctattttaccagaaatggcggaacactggatctaaacggctatgaccagtcatttcagaaaatcgcagcaacagatgcgggaacaaccgtaacgaactcaaacgtgaagcaatcaacattatcacttactaatactgatgcatatatgtaccatgggaatgtatcaggtaatataagcataaatcatattatcaatactacccagcaacataacaataatgccaatctgatctttgatggctcagtcgatatcaaaaacgatatctctgtccggaatgcacagttaacattacaaggacatgcgacagaacatgccatatttaaagaaggcaataacaactgtccaattccttttttatgtcaaaaagattattctgctgccataaaggaccaggaaagcactgtaaataaacgttacaatacggaatataagtccaacaatcagatagcctctttttcccagcccgactgggaaagtcgtaaatttaatttccggaaattaaatttagaaaacgcaaccctgagtataggccgggatgctaatgtaaaaggacacatagaggctaaaaactctcaaattgttctgggaaataaaactgcatacattgacatgttctcaggaagaaacattactggcgaaggttttggattcagacaacagcttcgctccggggattcagcaggcgaaagtagtttcaacggcagtctgagtgctcaaaacagcaaaataactgttggtgataaatcaactgttactatgactggtgcattatccttaattaatacagacctgattatcaacaaaggagctactgttaccgcccagggaaaaatgtatgtagataaagctattgaactggccggaaccctgacattaacaggcacccctacagaaaataataaatacagcccggcaatctatatgtcagatggatataatatgacagaagatggtgccacgttaaaggctcaaaattatgcctgggtcaatggtaatataaaatcagacaaaaaagcatctattctgtttggtgttgaccagtataaagaagataacctggacaaaaccacacacacaccgctggctacaggtttgctgggtggctttgatacttcttataccggaggtattgatgctcctgctgcctcagccagcatgtataacaccttatggagagtaaacggacagtcagccctgcaatcattaaaaacccgcgacagtcttttgttgtttagtaacatagagaattcgggtttccatactgtgactgtaaacacactggatgccactaatactgctgtgattatgcgggctgatctgagccagtctgtaaatcaatcggataaactcattgttaaaaatcagttaaccggacgcaataacagtctgtcggtcgatatacagaaagtgggaaataataactcaggattaaacgttgacctgataacagccccaaaaggaagcaataaagagatatttaaagccagtactcaggccataggtttcagcaacatatctcctgtgatcagcacgaaagaggatcaggaacataccacgtggaccctgaccggatataaggtggctgaaaatacagcatcttccagtgcagcaaaatcgtatatgtccggtaattacaaagccttcctgacagaagtcaacaacctgaataaacgaatgggggatctgcgtgacaccaatggcgaggccggtgcatgggcccgcatcatgagcggagcaggttcagcttctggtggatacagtgacaactacacccatgtgcagattggtgtggataaaaaacatgagctggatggacttgaccttttcactggtctgactatgacgtataccgacagtcatgccagcagtaatgcattcagtggcaagacgaagtccgtcggggcaggtctgtatgcttccgctatatttgactctggtgcctatatcgacctgattagtaagtatgttcaccatgataatgagtactcggcgacctttgctgggctcggaacaaaagactacagttctcattccttgtatgtgggtgctgaagcaggctaccgctatcatgtaacagaagactcctggattgagccgcaggcagaactggtttatggggccgtatcaggtaaacggttcgactggcaggatcgcggaatgagcgtgaccatgaaggataaggactttaatccgctgattgggcgtaccggtgttgatgtgggtaaatccttctccggtaaggactggaaagtcacagcccgcgccggccttggctaccagtttgacctgtttgccaacggtgaaaccgtactgcgtgatgcgtccggtgagaaacgtatcaaaggtgaaaaagacggtcgtattctcatgaatgttggtctcaacgccgaaattcgcgataatcttcgcttcggtcttgagtttgagaaatcggcatttggtaaatacaacgtggataacgcgatcaacgccaacttccgttactctttctga

SEQ ID NO: 461020 - DNA, 801 bp, Shigella boydii
gtggcggcccttcccggtgatcgcctctctgccgcactgatggttaaatcacacggcaccgtcagtgtcgacggtaaagtctctgatgctgacctcacttacctggaagaggtggcaaacagcaccgggcaggaggtggacaaaagccgcctgacatcacaggcctttgcccgcgcggcactgatcactgatgtgggtattgctctggctacggaactggaaacggccgggcagaaatggtctctgggcttcccccccaaattccagcgcgtcgacctgttcaactacaacgtgctggtcagaaattatgacagcagcgccttcaaaggcgaccgctaccacaacacgaaaaatggcatcaacgccgacatcggtgccagtacggacctggatgacaactggacgctgggactggtcgcacagaacctgatcccccgtagtattgagacaaaagaagtgaacggtatcacggaaaccttcaggatccgcccgcaggtgacggccggtgtctcctggcacaacgcgatgttcaccaccgcatttgatgtggatctgaccccggccagcggtttcacctccgacagcaaccgtcagtttgccgccattggcgcagaatttaatgcctggaaatgggcacagctgcgcgccggttaccgtcagaatctggccggtaacgacggcagtgcattcacggccggggtggggatctcaccgtttgatgtggttcaccttgatgttgcaggcctgatcggcacggacaacacttacggtgcggtcgcacagttccagttcaccttctga

SEQ ID NO: 461021 - DNA, 1500 bp, Shigella boydii
atgagtaaacacgacaccgacacttcagatcaacacgccgcgaaacgccgctggcttaatgcccacgaagaggggtatcacaaagcgatgggcaatcgccaggtacagatgatcgccattggcggcgcgattggcaccggcttgtttttaggtgcaggagcccgactgcaaatggcgggtccagcactggcactggtttatttaatttgtggcttgttttcgttttttattctgcgtgcattgggtgagctggtgctacaccgcccttccagtggcagttttgtctcttatgcccgtgagtttttgggtgagaaagccgcttatgttgctggctggatgtacttcatcaactgggcgatgacggggattgttgatattaccgccgtcgctctgtatatgcattactggggtgcgtttggcggcgtgccgcagtgggtctttgcgctcgctgcacttaccatcgttggcaccatgaatatgatcggtgtgaaatggtttgcggagatggagttctggtttgcgcttattaaagtgctcgccattgtgacctttttggtcgtgggtacagtgttcctcggtagtggtcagccgctggatggcaacaccactggctttcatttaatcaccgataatggcggcttcttcccccacggtttgctgcctgcgctggtgttgattcagggcgtagtgtttgcttttgcctccattgaaatggtgggtacagctgccggagaatgtaaagatccgcagaccatggtgcctaaagccattaacagtgtgatttggcgtattggcctgttttacgtcggctccgtggtgttgctggttatgttattgccgtggagcgcgtatcaggcggggcaaagtccgttcgtgacgtttttctctaaactgggtgtgccatatatcggcagcattatgaacattgtggtgctgaccgctgccctctccagcctgaactcaggtctgtactgcaccggacgtattctgcgctcaatggcgatgggcggttccgcaccgagttttatggcgaaaatgagtcgtcagcatgtgccgtatgccgggattctagcgacactggttgtgtatgtcgtcggcgtattcctcaactatctggtgccgtcgcgcgtatttgagattgtgttgaacttcgcgtcgctgggaatcatcgcttcatgggcgtttatcatcgtgtgccagatgcgcctgcgtaaagcgattaaagaaggcaaagcagcggatgtcagttttaaactgcctggcgcgcccttcacttcctggctgacattactgtttttactgagtgtccttgtgctgatggcgttcgattacccgaacgggacttatactatcgcggcgctgccgattatcggtattctgctggttataggctggtttggtgtgcgcaaacgcgttgctgaaattcacagcactgcgccagtcgtcgaggaagatgaagaaaaacaggaaattgtgtttaagcctgaaacggcgagttaa

SEQ ID NO: 461022 - DNA, 1062 bp, Shigella boydii
atgcatttacgtcatctgttttcatcgcgcctgcgtggttcattactgttaggttcattgcttgttgcttcatcattcagtacgcaggccgcagaagaaatgctgcgtaaagcggtaggtaaaggtgcctacgaaatggcttatagccagcaagaaaacgcgctgtggctcgccacttcgcaaagccgcaaactggataaaggtggcgtggtttatcgtcttgatccggtcactctggaagtgacgcaggcgatccataacgatctcaagccgtttggtgccaccatcaataacacgactcagacgttgtggtttggtaacaccgtaaacagcgcggtcacggcgatagatgccaaaacgggcgaagtgaaaggccgtctggtgctggatgatcgtaagcgcacggaagaggtgcgcccgctgcaaccgcgtgagctggtagctgatgatgccacgaacaccgtttacatcagtggtattggtaaagagagcgtgatttgggtcgttgatggcgagaatatcaaactgaaaaccgccatccagaacaccggtaaaatgagtaccggtctggcgcttgatagcaaaggcaaacgtctttacaccactaacgctgacggcgaattgattaccatcgacaccgccgacaataaaatcctcagccgtaaaaagctgctggatgacggcaaagagcacttctttatcaacatcagccttgataccgccaggcagcgtgcatttatcaccgattctaaagcggcagaagtgttagtggtcgatacccgtaatggcaatattctggcgaaggttgcggcaccggaatcactggctgtgctgtttaaccccgcgcgtaatgaagcctacgtaacgcatcgtcaggcaggtaaagtcagtgtgattgacgcgaaaagctataaagtggtgaaaacgttcgatacgccgactcatccaaacagcctggcgctgtctgccgatggcaaaacgctgtatgtcagtgtgaaacaaaaatccactaaacagcaggaagctacccagccagacgatgtgattcgtattgcgctgtaa

SEQ ID NO: 461023 - DNA, 2103 bp, Shigella boydii
atgaagattttttccgtccgacagaccgttttgcccgcactgcttgtcctttcccccgttgtttttgccgctgatgaacagactatgattgtcagtgccgcaccgcaggtggtttcagaactggataccccagcagcagtaagcgtggtggatggcgaggagatgcgcctggcaacaccgcgcattaacttgtccgaatcactgaccggcgtgcctggtttgcaggtacaaaaccggcagaactatgcgcaagatttacagctgtcgattcgcggatttggctcccgctccacttacggtattcgcggtattcgcctgtatgtggacggtattcccgccaccatgcccgacgggcaagggcaaacatccaacatcaatttaagcagtgtgcaaaatgtggaagtgctgcgtggccccttctctgccctgtatggcaacgcgtctggtggggtaatgaatgtcaccacccagaccggacaacagccaccaaccattgaagccagtagttactacggcagttttggcagctggcgctatgggctgaaagcaacgggcgcaacgggagacggcacacagcctggcgatgtcgattacaccgtctcaaccacgcgttttacgacccacggctatcgtgaccatagtggcgcacagaaaaatttagccaatgccaaactgggcgtacgcattgatgaagccagcaaattaagtctgattttcaatagtgtggatatcaaagcagatgacccaggtgggctaaccaaagcagaatggaaggctaatccacaacaagcgcctcgtgcagaacagtacgacacgcgaaaaaccatcaagcaaactcaggctgggttgcgctatgagcgtagcctgagcgcgcaagatgatatgagtgtgatgatgtatgccggagagcgagaaacgacccagtaccagtcaatacccatggcaccacaacttaacccgtcacatgcgggcggcgtgattaccctgcaacgccattaccaggggatagacagccgctggacacaccgtggtgaactgggcgttccggtcacgttcactaccggcctgaactacgaaaacatgagtgaaaaccgcaagggctacaataacttccgcctgaatagcagcatgccggagtacgggcaaaaaggtgagttgcgtcgcgacgaacgcaatctgatgtggaacatcgatccctatttacagacgcagtggcagctgagcgaaaaactgtcgctggatgctggcgtgcgctacagctccgtgtggtttgattccaacgaccattacgttactccgggtaacggcgatgacagcggtgatgccagttatcataaatggctacctgccggttcgttaaaatatgcaatgaccgatgcctggaatatctatctggcagccgggcgaggttttgaaacgccgacgattaatgagctgtcttatcgtgctgatgggcaaagcggtatgaactttggtttaaaaccatccaccaacgatacaattgagatcggcagtaaaacgcgtattggtgatgggctgcttagtctcgcattgtttcagaccgacactgatgatgaaattgttgtcgatagcagtagcggtgggcgtacgacttacaaaaatgccggaaagacccgtcgtcaaggcgctgaactggcatgggatcaacgtttcgcaggagattttcgcgtaaacgcgtcctgggcctggcttgatgcgacctatcgcagcaatgtttgcaatgaacaggattgtaacggtaatcggatgccagggatcgcccgtaatatgggctttgcgtcgataggttatgtaccggaagatggttggtatgcaggcacggaagcgcgttatatgggcgatattatggcagatgatgaaaatacggcaaaagcgccgtcttatactctcgtcggcttattcaccgggtataaatacaattaccacaatttaactgtggatttatttggtcgtgtcgataatttattcgataaagaatacgttggttctgtcattgtcaatgagtcaaacgggcgatattacgaaccttcgcccggacgaaattatggtgtcggcatgaatattgcgtggagatttgagtaa

SEQ ID NO: 461024 - DNA, 486 bp, Shigella boydii
atgtctgaacagaaaatcaccggcattgatctggctaaaacgaacttttatcttttcagtatcaatgctcatggcaaacccgcaggaaagaccaaactttctcgcaatcaactgcttaactggctggtgcaacagcctaaaatgactgttgcgatggaggctggcggggcatctcattactgggcccgggaaatcaggaaactcgaccatgatgtaatattgcttccggcacaacatgttaaagcttatcagcggtgccagaaaaatgattataacgacgcacaggcaatagctgaggcctgccaacatggaactatacgacccgtaccaataaaaactctggagcaacaggacgtccagacttttttgaatatgcgtcggttggtttcaatggaaaggacacaactgataaatcacattcgtggacttcttgctgaatacggcattgtgttcagtaaaggcgcagcagaattacgccaaaagtaa

SEQ ID NO: 461025 - DNA, 981 bp, Shigella boydii
atggaaaacagaaagcaccgaccgactattggccgtacgctgaatacaaatatcctgaataatactgaagaaatatcggctccagttcatgtatttaccctcaatactggccgaaaggcaaaatttactgagatcaaggttgatcatgacaaagtggacactcaaacttttgtggttgaagaggtgaatggccgcgaacagacagccctgacgccggactcactaaaagacatcaccagaactatacgtttacaacaattctatccatgtattgggattcggactggcgatcttattgagattttggatggttcccgtcgtcgggcagcagctttgctatgcaaggttggattacgtgtacttgtaacggatgatgagcttactgtttctgaagctcagcatctggcgaaagatttgcagacgtcacttgaacataatattcgtgaaattgggttgcgtttagtacgtctcaaagaggccggtatgaaccagaagcaaattgcggaaagagagggattgtcggcagctaaggtgactcgtgccctccaagcagcgtccgtacctaaagattttgtgtctctttttcctgttcagtctgagctgacatacgccgattacaggcaactggctgaattaagtgaacgactgaggctgggtgatatatctattgatgaagttgtgaagaatatctcgccgagtattgagcttattactgctgatgacaatctttctgaagacgaggttaaaaacagtattatgcggcttataaccaaggaaatgtcttcattgcttgattcaggagtaaaggataaagcggttgtaactttgttatggaaatttgatagtaaagataaatttgctcgaaaacgagtaaagggacgtacgttctcatatgaattcggcagattaccgttggaagttcaggataagttagatcgtatgattgctcttgtactaaaagataatctgaattcgctgtga

SEQ ID NO: 461026 - DNA, 1200 bp, Shigella boydii
atgactagttttgagcagttaagtaaggttgcgcagcgtgcagataaaatgttgctcgccctaacaaaacagattcaggagcaaaagcaggagtttcaggctgatgttttttatcaagtctattcaaagtctgctgtagctaagcttccaaaattaacgcgcgcaagcgtggatggtgcagtcggtgagatggaggctcagggctatcagtttgaaaaacgcccagcaggaaccgcgacaaaatatgcattaaccatccagaacattatcgatatctatgcacatcgtggcattcctaaatatcgcgatcgttatagtgaggcatattccatattcatcggtagtctaaaaggcggtgtgtctaaaaccgtgagtagtgtttccgtagctcacgccctgcgtgctcatcctcacctgctgtcagaagatttacgtattctgctccttgatttagatccccagtcatcagccactatgtttctgaactacttgcatgcggtggggctggttgatacaaccgcaccgcaggctatgttgcagaacgtgagtcgtgaggaattactggaagattttatcgttccgtcagttatccctggcgtttatgttatgccggcttctattgacgacgcctttattgcatcaaactgggatactctgtgcgaggagcatctattaggacaaaacaaacacgcgatattgcgtgagaatattattgataagctgaagcatgatttcgacttcatccttattgatacaggcccgcatctggacgcatttttgaaaaatgccattgctgccgcagatatcatgtttacaccggtgccgccagcacaagttgatttccattccacgcttaaatatttggctcgtttacctgaacttgtacagattattgaacaggatggatgttcatgccgtttgcaggcaaatattggcttcatgtcgaaactggcgaataagtcagatcataaatactgccatagcctgacaaaagagattttcggtggtgacatgcttgatgtttcaatgccacgtcttgatggttttgagagaagcggcgagtcgtttgataccgtgatatctgcgaatcctgttacttatgttggcagtggtgaagctttgaaaaatgcacgtatggcagcagaagatttcgctaaagcagtttttgatcgtattgaatttataagggccaactactga

SEQ ID NO: 461027 - DNA, 780 bp, Shigella boydii
atgatggaactgcaacatcaacgactgatggcgctcgccgggcagttgcaactggaaagccttataagcgcagcgcctgcgctgtcacaacaggcagtagaccaggaatggagttatatggacttcctggagcatctgcttcatgaagaaaaactggcacgtcatcaacgtaaacaggcgatgtatacccgaatggcagccttcccggcggtgaaaatgttcgaagagtatgacttcacattcgccaccggagcaccgcagaagcaactccagtcgttacgctcactcagcctcatagaacgtaatgaaaatatcgtattactggggccatcaggtgtggggaaaacccatctggcaatagcgatgggctatgaagcagtccgtgcaggtatccaagttcgcttcacaacagcagcagatctgttacttcagttatctacggcacaacgtcagggccgttataaaacgacgcttcagcgtggagtaatggccccccgcctgctcatcattgatgaaataggctatctgccgttcagtcagaaagaagcaaaactgttcttccaggtcatcgctaaacgttatgaaaagagcgcaatgatcctgacatccaatctaccgttcgggcagtgggatcaaacgttcgccggtgatgcagcactgacctcagcgatgctgggccgtatcttacaccactcacatgtcgttcaaatcaaaggagaaagctatcgactcagacagaaacgaaaggccggggttatagcagaagctaatcctgagtaa

SEQ ID NO: 461028 - DNA, 1344 bp, Shigella boydii
atgataaccacatttgtgtttatcccgattttcgcgatcgcagccggagtggcgcaatccctgcaatacttaaatcggtatcatgtgatacgcgagcctccggagcatattttgaacaggttaccttcgagcgcatcggctttagcgtgcagcgcccacgccctgaatctcattgagaagcgaacgctggatcatgaggagatgaaagcacttaaccgagaggtgattgaatacttcaaagagcatgtcaatccggggtttttagagtatcgcaaatctgttaccgccggcggggattacggagccgtagagtggcaagcgggaagtttaaatacgcttgtcgacacccagggacaggagtttatcgactgcctgggaggttttggaattttcaacgtggggcaccgtaatccagttgtggtttccgccgtacagaatcaacttgcgaaacaaccgctgcacagccaggagctgctcgatccgttacgggcgatgttggcgaaaacccttgctgcgctaacgcccggtaaactgaaatacagcttcttctgtaatagcggcaccgagtccgttgaagcagcgctgaagctggcgaaagcttaccagtcaccgcgcggcaagtttacttttattgccaccagcggcgcgttccacggtaaatcacttggcgcgctgtcggccacggcgaaatcgaccttccgcaaaccgtttatgccgttactgccgggcttccgtcatgtgccgtttggcaatatcgaagccatgcgcacggctcttaacgagtgcaaaaaaaccggtgatgatgtggctgcggtgatcctcgaaccgattcagggtgaaggtggcgtaattctgccgccgccgggctatctcaccgccgtacgtaagctatgcgatgagttcggcgcactgatgatcctcgatgaagtacaaacgggcatggggcgcacgggcaagatgttcgcctgcgggcatgagaacgtacagccggatatcctctgccttgccaaagcgctcggcggcggcgtgatgccgattggcgcgaccatcgccactgaagaggtgttttcagttctgttcgacaacccattcctgcataccaccacctttggcggcaacccgctggcctgtgcggcggcgctggcgaccatcaatgtgttgctggagcagaacttaccggctcaggctgagcaaaaaggcgatatgttgctggacggtttccgtcaactggcgcgggaatatcccgatctggtacaggaagcgcgtggtaaagggatgttgatggcaattgagtttgttgataacgaaatcggctataactttgccagcgagatgttccgctag

SEQ ID NO: 461029 - DNA, 1521 bp, Shigella boydii
atgtcttctcatccgtatgtcacccagcaaaataccccgctggcggacgataccactctgatgtccactaccgatctgcaaagctatatcactcatgctaatgacacttttgtgcaggtgagcggctttaccttgcaagagttacaagggcagccgcacaatatggtgcgtcacccggatatgccaaaagcggcgtttgcggatatgtggttcaccctgaaaaaaggggagccctggagcggcatcgtgaaaaatcgccgcaaaaatggcgaccattattgggtgcgggccaatgcggtaccgatggtgcgcgagggaaaaatcagtggctatatgtcgattcgtacccgggcgacggatgaagagattgcggcggtggagccgctgtacaaagcgctgaacgccggacgtaccagtaagcgtattcataaaggcctggtggtgcgtaaaggctggctgggtaaactgccttcattaccgcttcgctggcgggtgcgtggagttatgaccctgatgtttatcttgctggcggccatgctttggtttgttgctgccccggtggtgacgtatttcctctgtgtgttagtggtattgttggcaagcgcttgttttgaatggcagattgtgtgcccgatagaaaatgttgcccgtcaggcactgaaggtggcgaccggagagcgtaatagtgttgagcacctgaatcgcagcgatgagctggggctgacattacgcgcggtagggcagcttggcctgatgtgccgttggctaattaacgatgtctcaagccaggtgtccagtgtcagaaatggcagtgagacgctggcgaaaggcaccgatgaactgaacgaacatacccagcagacagttgataacgttcagcaaacggtggcgaccatgaaccaaatggcggcgtcggtgaaacagaactctgccacggcgtcggctgccgataaactttctatcaccgccagtaatgcggcagtgcagggtggggaggcgatgaccacggtgatcaagacaatggacgatatcgccgacagtacccagcgcattggcaccattacttcgctgattaacgatattgcgtttcagaccaatattctggccctgaatgcggcggtggaagcggcgcgtgccggcgaacagggcaaaagttttgcagtggtggcaggggaagtgcgtcatttagccagccgcagcgctaatgctgccaacgatattcgcaagctgattgatgccagtgctgataaggtgcaatccggttcgcagcaggtacacgccgccggacggacgatggaagatattgtggcacaggtgaaaaacgtcacccagttgatcgcccagattagccattcaacgctggaacaggccgatgggctttccagcctgacccgtgcagtggatgagcttaacctgatcacccagaaaaatgctgagctggtggaagagagtgcgcaggtgtcggcgatggtgaaacaccgcgccagccgactggaagacgcggtgacggtgctgcattaa

SEQ ID NO: 461030 - DNA, 624 bp, Shigella boydii
atgagccatcatcacgaagggtgttgtaaacatgaaggccagccacgccatgagggctgctgcaaaggtgagaagtcagaacacgagcactgcggacacggtcaccagcatgaacacggtcaatgctgcggtgatcgccacggtcgcggcggcggtcgtcggcaacgtttctttggtcacggtgaattgcgtctggtgattctggatattctctcgcgcgatgacagccacggttacgaattgattaaagcgattgagaatctaacccaagggaattacaccccaagcccgggcgtcatctacccaacgctggattttctgcaggagcagtcgctgattaccatccgcgaagaggaaggtggtaagaagcagattgcgctgaccgaacaaggcgcgcagtggctggaagaaaaccgcgaacaggtggagatgattgaagaacgcatcaaagcgcgttgcgttggcgcggcactgcgccagaacccgcaaatgaagcgggcgctggataattttaaagcggtgctggatttacgcgtcaaccagagcgatatcagtgatgcacaaataaaaaagatcattgcggtgatcgaccgcgccgcttttgatattacgcaactggattaa

SEQ ID NO: 461031 - DNA, 765 bp, Shigella boydii
atgaataactccccccgctacccgcagcgcgttcgcaatgatctgcgcttccgtgaactgactgtgttacgcgttgagcgcatcagcgccggttttcagcgcattgtcctcggcggcgaggcgctggacggttttacatcgcgcggctttgacgatcacagcaaactcttctttcctcaacctgacgctcactttgtgccgccaacggtaacggaagagggcatcgtctggccggaaggaccacgcccaccgtcgcgtgactatacgccgctgtatgacgaactacgccatgaactggcgatcgatttctttattcacgacggtggggtcgccagcggctgggcgatgcaggcgcaaccgggcgataaacttacggtggctggtccgcgcggttcgctggtggtgccggaagattacgcgtatcagctgtatgtctgcgatgaatccggaatgcccgcactgcgccgccgcctggaaacgttgagcaaacttgccgttaaaccgcaagttagtgcgctggttagcgtgcgggataacgcctgtcaggattatctcgcgcaccttgatggttttaatatcgaatggctggcacatgatgagcaggcggtagatgcgcgtctggcgcagatgcaaatccctgccgatgattacttcatctggataaccggcgaaggtaaagtcgttaagaatttaagccgccgctttgaagcggaacagtatgacccacagcgggtacgtgcagcggcttactggcacgcaaagtaa

SEQ ID NO: 461032 - DNA, 507 bp, Shigella boydii
atggttgaggatattttggctccagggttacgggtcgtgttttgcggtatcaaccctgggctttcatccgccgggactggttttccctttgctcatccagcaaatcgcttctggaaggtgatatatcaggccgggtttaccgaccgtcagttgaagccgcaggaggcacagcatctgctggattatcgttgtggcgtcaccaaactggtagaccgtccaacggtgcaagccaatgaagtttcaaagcaggagctgcacgcaggtgggcgtaagctgattgaaaaaattgaagattatcagccgcaggcgttggcgattctgggcaaacaagcatatgaacagggattcagccagcgcggtgcacagtgggggaaacaaacgctcaccattggttcgacgcagatttgggtgctgccaaatcccagcggtttaagtcgcgtttcactagagaaactggttgaagcgtatcgcgagctggaccaggcgctggtagtgcgtgggcgataa

SEQ ID NO: 461033 - DNA, 279 bp, Shigella boydii
atgaaaaattgctggaagatcctcgatatagaggaaacgactgacgtcgatattatccgccgcgcttatctggcgctgttaccgtcctttcatccagaaaccgatccgcagggttttaaacaacttcgtcaggcgtatgaggaggcgctacggattgcgcagtcgcctgctaaatctgtttggcaaccagaagaatatgaggtagcagaacatgaaattctgctcgcctttcgcgcgttacttgcctctgatagcgaacgttttctgccctccgcctag

SEQ ID NO: 461034 - DNA, 1116 bp, Shigella boydii
atggaagagattgatgaattacgctggtcgctgtgcacaatcgccatgaacactgctcatttatccttcgagtgcgtggtgttattagcagaaagattgcggtggttgcaggaggaaaacgtcggggaaatagacgaagaagaactggaatcctttttatatgccattgcgaaggggaatgtttttaacttccagaccattctgcatctgcccgttgccgtgcaaaatgacaccatcgatttttaccaaatgttcgctcggatttggtcatcgcatccagaatggctgacattgtatttagcgcaacatcgcgcagtgatcatccccgatgatgcaaaactgcacagaaatttactccgctggtatagcgcaggtcgcctggatatccccgaacttctggattacgcccggtcgtggcgggaagctgaacctgataatgaagatgcgcgttattatgaatacgcgcaacgcgtctattgtggagaaggcgaaagcttgctggcagaactttgtgactactggcgcgagtatccctccacccaggcggatgctttaatattgcaatggtgccgtcagcatcgggtcgattattacccgttagtggtgatgatgattgaagctcgtgaactggttaacgatcagggtaaacagctactttatgtccccggcgacagcgcccgtacgcgttttcatttatacgaaatactcagcgatgaaaaactctctgcgctggggcgttcactggtcgagatggttttgcacaaaggacgtaagccgcggatctcactcacgcgtgatacagaacatctcttatggccattatatttagttgccaaacaattagtgcaggccagccaaccgacagaagaatcattaatgccgatcgtaagccgtcttgatgcagaagatcgttgtccactggaagcattaattattcgtcgattattaattcaggcggcgaattttaccgagaagcaaactgttgaaccggagccgcaaccgcagccaatgcccgttgacgatggtgggccgggctgtctgggcgtcatcaaaattattttctacatttttatctttgccggtttgatagggaaaatactccatctgttcgggtga

SEQ ID NO: 461035 - DNA, 339 bp, Shigella boydii
atgaataaggaagaacaatatcttctttttgcgctttctgcgcccatggaaatacttaatcagggttgcaaacccgcgcatgactcgccaaaaatgtataccggtataaaagaattcgatctctcatcatcctggggaataaataatcgtgatgatttaattcagactatttatcagatgactgatgatggtcatgccaatgatttagctggcttatatctgacatggcatcgctcttcccctgaagagtggaaagcattaattgctggtggctcggagagagggttgatttatacccaattcgttgcccaaaccgctatgtgctgtggggaagggtga

SEQ ID NO: 461036 - DNA, 345 bp, Shigella boydii
atggggtttctgtcacgggtcggtgtgctcaacaagtggctgacggaagaagatagtttatggctgcaatcgcgcgtctatgtacgagctcaccattactatcacggctggatgcactatttttctgcctattcgttagggcgtctctactggcaatcttctcagtgcgaagacaacacttcgctacgcgaggcgctaaccctgtacaaatacgatagcgccgggagtcggatgttcgaagagctggcagcgggaagcgatcgtttctatgccacgcttccctggcaaccattaactgtccagcctgaatgcccggtaacgcttaaggatgtgagcgacctatga

SEQ ID NO: 461037 - DNA, 1452 bp, Shigella boydii
atgaaaacatgttggcaaatcctcgaaattgaaagcacgacgcaaatagacattatccgccaggcttatcttgctcgcttaccgttatgtcatcccgaaaccgatccgcaggggtttaaagcattacgccaggcctatgaagaggcgctgcgactggcggtaaatcctgtcgaggaagcagatgatgaagaaaaagatgccgccgctgaacatgaaatactgcgtgcattcaggacattactggattcagaaagtgatcgttttcagccctccgcctggcagaaatttattcagcaattaaatacctggaacatggaggatgtcgatcaattacgctggccgctgtgtgcaatcgctatagaagcgcgatatctttcattgaattgtgcttctttgctggcagagcgtttgaactggcattcgtttaatgacagcgaaggaatggatgaggaagaaagggaggcttttcttgaggccattcaggctggtgattgtttcgatttccttagccttctggaatatcccgttgcgttgcagaaccagactgttgagtattacttcgcgctggaacgttgctgccgttaccatcctgactatgtcactgcgtttttggcgatggaaggtccgtggttcattcctgatgatgcaaagttacatcgcaaactgttgcgctggtacagctcggtgcaaacaggtatggcggaactcattcctgtagccaaacagtggcaaatggaagaaccagaaagcgaagatgcccgatattacttgtgtgctcaaaggttgtactgcggcgagggggaaagcctgcttgccgatctctgcgcgtaccgggaaagttacccatctacacaagctgataatttgttgttgcagtggagtaagcgtcattgcccagattatttcgcgttattagtgatggttatcgaagcgcagagcatggtagatgcgcaaagtaaaccattgaaatatgttcctggtgagagcgcccggacgcggctgttatgggcggagattttacatagcggaaaattatcgccgttaggtcaatcgtttattgagtcgttattcttcaaacgcaaagcatgggcgtggtggaaatcgagagtcggtagcgagacagagcaagattcaccgttactggatttgtatcgggtagcggaacaggtagtgcttgaagcgtttccgaaacaagagatgctggcccgtcttaatacaaggctggaaggcggagatgctcatccattagaggccattatcacccggatgctgttgacgaaagtgaaactcgagccggaggatgaagatgtcgatgagccaacacctgaaaaccatgaagaaaaaaatgatgaggatgaaaaaccacagagcattaccagcattatcaaaatcagtttaacggtgctggtgataggttatgctctcggcaaaatcgcgatgttgtttagttga

SEQ ID NO: 461038 - DNA, 1671 bp, Shigella boydii
atggataatgcagaactcaccattggtatcgatctcggcactaccaatagtttaattgccgtctggaaagacggtgccgcgcaattaattccaaataagttcggtgaatatttaacaccatccataattagcatggatgaaaataatcatattttagtcggaaaaccggctgtatcacggcgtacttcgcatccggataaaacagcagcgttatttaaacgcgcaatgggcagtaataccaactggcggttaggcagcgacacatttaacgcgccagaactgtcctctttggtattacgctcattaaaagaagatgccgaagaatttctgcaacgtccgattaaagatgtggtgatctccgttccggcttatttcagcgatgaacaacgcaagcatacccgtttagctgcggagttagccgggttaaatgcggtacgcttaattaatgaacccacagcagctgcgatggcatatggcctgcatacgcaacaaaatacccgctcgctggtttttgatctcggtggcggcacgtttgacgttacggtgcttgagtacgccacgccggtgattgaagttcacgcctccgctggcgatagcttcctcggtggcgaagattttacccatatgctggtcgatgaggttttaaaacgcgcggaagttgccaggaccacgcttaacgagagtgaactggcagccttgtacgcctgtgtggaagcggcaaaatgtagcaatcaatcgccattgcacattcgctggcagtatcaggaagaaacgcgggaatgcgaattttacgagaacgaactggaagatttgtggttgccgctgctcaatcgcttgcgagtgccgattgaacaggcgttgcgcgatgcgcgtctgaagccgagtcaaatcgacagtctggtactggttggcggcgcgtcacaaatgccgctggtgcagcgaatcgccgtgcgtctgtttggcaaattaccgtatcaaagttacgatccgagcaccattgtcgcgctgggcgcagcaatccaggccgcctgccgcttacgcagtgaagatattgaagaggtaatcctcactgatatttgcccttactcgttgggcgttgaagttaaccgccagggcgtttccggcattttctcgccgattattgaacgaaacaccacagtaccggtgtcgcgtgtagaaacttactcgaccatgcacccggagcaggattcaattacggttaacgtctatcagggagaaaaccacaaagttaaaaataacattctggttgaatccttcgatgtgccgttgaagaaaaccggggcttatcagtcgattgatattcgctttagttatgatatcaacgggttgcttgaagttgacgtgcttctggaagacggcagcgttaagtccagagtgattaaccacagcccggtaacattgagcgcgcagcagattgaagagagtcggacgcggttatccgcattgaaaatttatccgcgcgatatgctcatcaatcgcacctttaaagccaaactggaagagttgtgggcgcgagcgctgggtgacgagcgagaagagattggccgggtgatcaccgattttgatgcggcgctacagtcaaacgacatggcccgcgtggatgaagttcggcggcgggcgagcgattatttagccattgagatcccataa

SEQ ID NO: 461039 - DNA, 642 bp, Shigella boydii
atgaatccggcagagtttattccgctggcagaaaaggaggggatgatagaacaggtaactgattatgttattgataatgtcttccgcgatctgggcgattacctggcaacacatgcagatcgctatgtttctattaacctgtcggcctccgattttcatacgtcacggttgatagcgcgaatcaatcagaaaacagagcaatacgcggtgcgtccgcagcaaattaaatttgaagtgactgagcatgcatttcttgatgtcgaaaaaatgacgccgattattctggctttccgccaggctggttacgaagtggcaattgatgattttggtattggctactctaacttgcataaccttaaatcattgaatgtcgatattttgaaaatcgataaatcgtttgttgaaacgctgaccacccacaaaaccagtcatttgattgcggaacacatcatcgagctggcgcacagcctggggttaaaaacgatcgctgaaggcgtcgaaactgaggagcaggttaactggctgcgcaaacgcggcgtgcgctattgccagggatggttttttgcgaaggcgatgccgccgcaggtgtttatgcaatggatggagcaattacccgcgcgggagttaacgcgcgggcaataa

SEQ ID NO: 461040 - DNA, 324 bp, Shigella boydii
atgtcccatcagaaaattattcaggatcttatcgcatggattgacgagcatattgaccagccgcttaacattgatgtagtcgcaaaaaaatcaggctattcaaagtggtacttgcaacgaatgttccgcacggtgacgcatcagacgcttggcgattacattcgccaacgtcgcctgttactggccgccgttgagttgcgcaccaccgagcgtccgatttttgatatcgcaatggacctgggttatgtctcgcagcagaccttctcccgcgttttccgtcggcagtttgatcgcactcccagcgattatcgccaccgcctgtag

SEQ ID NO: 461041 - DNA, 465 bp, Shigella boydii
atggaaaagaaattaccccgcattaaagcgctgctaacccccggcgaagtggcgaaacgcagcggtgtggcggtatcggcgctgcatttctatgaaagtaaagggttgattaccagtatccgtaacagcggcaatcagcggcgatataaacgtgatgtgttgcgatatgttgcaattatcaaaattgctcagcgtattggcattccgctggcgaccattggtgaagcgtttggcgtgttgccagaagggcatacgttaagtgcgaaagagtggaaacagctttcgtcccaatggcgagaagagttggatcggcgcattcataccttagtggcgctgcgtgacgaactggacggatgtattggttgtggctgcctttcgcgcagtgattgcccgttgcgtaacccgggcgaccgcttaggagaagaaggtaccggcgcacgtttgctggaagatgaacaaaactaa

SEQ ID NO: 461042 - DNA, 1350 bp, Shigella boydii
atgtctacgccatcagcgcgtaccggcggttcactcgacgcctggtttaaaatttcacaacgtggaagcactgtccgtcaggaagtggttgccgggttaacaacgtttctggcgatggtctactcggtcatcgtcgttccaggtatgttgggtaaagcaggcttcccgcctgcggcagttttcgttgcaacctgtctggttgccggactcggttctatcgtgatgggtctgtgggctaatctgccgttggcgattggttgcgccatctccctgacggcgtttaccgcattcagcctggtgctggggcaacatattagcgtacctgtcgcgctgggtgccgtgttcctgatgggtgtgctgtttacggtaatttctgccacgggtatccgtagctggattttgcgcaacttgccgcacggtgtggcgcacggcacggggatcggtatcggtctgttcctgctgctcattgccgctaatggtgttggtctggtgattaaaaacccgcttgatggtctgcccgttgcgctgggtgatttcgcgaccttcccggtgattatgtcactggtaggtctggcggtgatcatcggcctggaaaaactgaaagtccctggtggcattctgctgaccattatcggtatctcaattgtcggtttgatcttcgatcctaacgtccatttctccggcgttttcggcatgccttcattgagcgatgaaaacggcaattcactgattggcagcctggacattatgggcgcgctgaatcctgtagtcctgccaagcgttctggcgctggtgatgacggcagtatttgatgccaccggaactatccgtgccgtcgccggccaggcgaacctgctggataaagatgggcagatcatcgacggtgggaaagcactgaccactgactccatgagcagcgttttctctggcctggtgggtgctgctccggcagcggtatacatcgagtctgcggcgggtacggcggcgggcggtaaaaccggtttgacggctatcaccgttggcgtgctgttcctgctgattctgttcctctctccgctctcttacctcgttccggggtatgcaacggctccggcgctgatgtacgttggcctgctgatgctgagcaacgtggcgaaaatcgactttgctgattttgttgatgcgatggcgggtctggttacggcggtattcatcgtgctgacctgtaacatcgtaacaggcatcatgatcggcttcgcgactctggtgattggtcgtctggtttccggcgaatggcgcaagttgaacatcggtacggtcgttatcgccgtggcgctggtgaccttctatgcgggtggctgggctatctaa

SEQ ID NO: 461043 - DNA, 1650 bp, Shigella boydii
atggaaatcttcttcaccatactgataatgaccctcgtggtctcgctgtccggggtggtcactcgtgtcatgccctttcagatcccgcttccgcttatgcaaatcgccatcggtgcgctactggcgtggccgacgtttggtttgcatgtggagtttgatcctgaactctttttagtcttgtttatcccgccgttgctgttcgctgatggctggaaaacgccgacccgtgaatttctcgaacatggtcgagagattttcggcctcgcgctggcgctggtggtggtcaccgtggtcggcattggcttccttatttactgggtggtgccgggcattccgctgatccccgcctttgcgctggcggcggtactttctccgaccgatgctgtggcgctctccgggattgttggcgaagggcgcatcccgaaaaaaatcatgggcattttgcagggcgaagcgttgatgaatgacgcctccggcctggtgtcgttgaagtttgccgtggcagtggcgatggggacgatgatcttcaccgtcggcggtgcgacggtcgaatttatgaaagtagccattggtggtattcttgccggttttgtggtgagctggctgtatggtcgctcgctgcgattcctcagccgctggggcggtgatgaacccgcgacgcagatcgttctgctgttcttgctgccattcgcttcttatctgattgccgaacatattggcgtttccggcatcctcgctgcggttgccgccgggatgaccatcacccgctccggtgtgatgcgccgtgcgccgctggcaatgcgcctgcgcgcaaacagcacctgggcgatgctggaatttgtctttaacggcatggtgttcctgctgttaggtctgcagctgccgggtattctggagacgtcgctgatggcggcagaaatcgaccctaacgtcgaaatctggatgctgtttaccgatattattctgatatatgcggcgctgatgctggtccgtttcggctggctgtggacgatgaaaaagttcagcaaccgcttcctgaagaagaagccgatggagtttggttcgtggaccacacgagaaatcctgatcgcgtctttcgccggggtgcgtggggcgatcactctggccggtgtgctctctatcccgctgctcttgccggatggtaacgtcttcccggcgcgctatgagctggtgttcctggcggctggcgtcattctcttctcgctgtttgtcggcgtggtgatgttgcctattctgctacaacacattgaagtcgcggatcattcgcaacaattgaaagaggaacgtattgcgcgagcggcaacggcagaagtggcgattgtggcgatccagaaaatggaggagcgtctggcggcggataccgaagagaatatcgataaccagctgcttacggaggtcagttctcgcgtcattggtaacctgcgtcgtcgcgccgatggacgtaacgacgttgaaagttccgtgcaggaagagaaccttgagcgtcgcttccgtctggcggcattgcgttctgaacgtgctgaactgtaccacctgcgcgccacgcgggagatcagcaacgaaacgctgcaaaaattactgcacgatctcgatttgcttgaagcgttgctaattgaggaaaatcagtaa

SEQ ID NO: 461044 - DNA, 234 bp, Shigella boydii
atgtttaatacccgtctctatcgggttaattttgatggggctagcgtccagggaatgggcatttccatactccgtggagaggaaaatatccccattgatagtgataccctggtaacactacagaaattctttgaagaagattgtacctctcatactggcatgtcacaaactgaggataatattaatgcagtcgctatgaagattactgcagatattatgcaatacgcagattga

SEQ ID NO: 461045 - DNA, 336 bp, Shigella boydii
atgtcattaccacactgcccaaaatgcaactccgaatacacttacgaagataacggcatgtacatctgcccggaatgtgcctacgaatggaacgacgcagaacctgcacaggaaagcgacgagctgatcgttaaagatgctaacggcaatctgctggctgacggcgacagcgttaccatcattaaagatctgaaggtgaaaggtagctcttcgatgctgaaaattggcaccaaagtgaaaaacatccgcctggttgaaggcgaccataacatcgattgcaaaatcgacggttttggtccgatgaaactgaaatctgagtttgtgaaaaagaactga

SEQ ID NO: 461046 - DNA, 444 bp, Shigella boydii
atgccgttaagtccctacctctcttttgccggtaactgttccgacgcgattgcctattatcaacgtacgttgggcgcggaactgctctataaaatcagcttcggcgaaatgccaaaatcagcgcaggacagcgccgagaactgcccttccggaatgcaatttcccgataccgccatcgcccacgccaacgtgcgcattgccggaagcgacatcatgatgagcgatgctataccgtcaggaaaagccagctactccggctttacgctggtgctcgattcgcaacaggtcgaagaaggaaaacgctggtttgataaccttgccgctaacggaaaaattgaaatggcctggcaggaaactttctgggcgcatggcttcggcaaagtcaccgataaatttggcgtaccgtggatgattaatgtcgtcaaacaacaaccaacgcaataa

SEQ ID NO: 461047 - DNA, 294 bp, Shigella boydii
atgcaaacgattatccgtgtcgagaagctcgccaaaaccttcaatcagcatcaagcgctgcatgcggttgatctgaacattcatcacagtgaaatggtggctctgcttgggccgtcgggttccggcaaatccacacttttacgtcacttaagcggtttgattaccggcgataaatccgccggcagccatatcgagctgctgggccgacagtccagcgcgaaggccgtctggcgcgcgatatccgcaaaagccgcgcccataccggctacatcttccaacaattcaacctggtga

SEQ ID NO: 461048 - DNA, 498 bp, Shigella boydii
gtgaatcgcctgagcgtactggagaacgtgctgattggcgcgctcggcagcacgccgttctggcgcacctgttttagctggttcacccgcgagcagaaacaacgcgcgttacaggcgctgacccgcgttggcatggtgcattttgcccatcaacgcgtttccaccctctccggcggacagcagcagcgtgtggcgattgcccgcgcgctgatgcagcaggcgaaggtgattctggccgatgaacccatcgcctcgctggacccggaatccgcccgcatcgtgatggacaccctgcgcgacatcaatcagaacgacggcatcaccgtagtcgtcacgctgcatcaggtggattacgccctgcgctactgcgaacgcatcgtcgccctgcgccaggggcacgttttctacgacggcagcagccaacagtttgataacgaacgttttgaccatctctaccgcagcattaatcgcatcgaagagaacgcgaaagctgcctga

SEQ ID NO: 461049 - DNA, 1017 bp, Shigella boydii
atgaacgctaagataattgcctcgctggccttcaccagcatgttcagcctcagcaccctgttaagcctggcacacgccgaagagcaggaaaaggcgctgaatttcggcattatttcaacggaatcacagcaaaacctgaaaccgcaatggacgccattcttacaggatatggagaagaagctgggcgtgaaggtgaacgccttctttgccccagactacgcaggcattatccagggaatgcgcttcaataaagtggatatcgcctggtacggcaacctgtcggcaatggaagcggtggatcgcgccaacggccaggtcttcgcccagacggtcgcggcggatggatcgccaggttactggagcgtgttgatcgtcaacaaagatagtccgatcaacaacctgaacgatctgctggcgaagcggaaagatctcaccttcggcaatggcgatcctaactccacctctggcttcctcgtccccggttactacgtctttgccaaaaacaatatctccgccagcgactttaagcgcaccgtcaacgccgggcatgaaaccaacgcgctggccgtcgccaacaagcaggtggatgttgccaccaacaacaccgaaaacctcgacaagctgaaaacctccgcgccagagaagctgaaagaactgaaggtgatctggaagtcgccgctgatcccaggcgatccgatcgtctggcgcaagaatctctccgaaaccaccaaagacaagatctacgacttctttatgaactacggaaaaacgccggaagagaaagcggtgctggaacgcctgggctgggccccgttccgcgcctccagcgacctgcaactggtgccgattcgccagctcgcactgtttaaagagatgcagggcgtaaaaagcaataaaggactgaatgagcaggacaagctggcgaaaaccaccgagattcaggcgcagctggatgacctggaccgcctgaacaacgcgttaagcgcgatgagttcggtgagtaaagcggtgcagtaa

SEQ ID NO: 461050 - DNA, 780 bp, Shigella boydii
atgcaaaccatcaccatcgccccacccaagcgtagctggttctcgcttctgagctgtgccgttgttctcgccgtgctggtcgtctcgtggcagggcgcggaaatggccccgcttacgctgattaaagacggcggcaacatggcaaccttcgttgccgacttcttcccgcccgatttcagccagtggcaggattacctcaccgaaatggccgtcacgctgcaaatcgccgtctggggcaccgcgctggcagtggttctctccatccccttcggtctgatgagcgccgaaaacctggtgccgtggtgggtttaccagcccgttcgccgcctgatggatgcctgccgcgccattaacgaaatggtcttcgccatgctgttcgtggtcgccgtcggtctcggcccgttcgctggcgtgctggcgctatttatccacaccaccggcgtgctctccaagctgctttccgaagcggtggaagcgatcgaacccggcccggtagaaggcattcgcgccaccggcgccaacaagctggaagagatcctttacggcgtgctgccacaggtaatgccgctgctgatctcctactccctctatcgcttcgaatccaacgtccgctcggcgaccgtcgtcggcatggtcggtgcaggcgggatcggcgtcaccctgtgggaagcgattcgcggttttcagttccaacaaacctgcgccctgatggtgcttatcatcgtcacggtcagcctgctggatttcctctctcaacggttgcgtaagcactttatctga

SEQ ID NO: 461051 - DNA, 726 bp, Shigella boydii
atgcacttgtctacacatccgaccagctacccaacacgctatcaggagatagccgcaaaacttgagcaggagcttcgtcaacactatcgctgcggcgactatcttcccgccgagcagcagctggcggcgcgctttgaggtaaatcgccacaccctgcgccgcgccatcgaccaactggtggaaaaaggctgggtacagcgccgtcagggcgtcggcgtgctggtgctgatgcgcccgttcgattacccgctcaacgcccaggcgcgttttagccagaacctgctggatcagggcagccatcccaccagcgaaaaactgctgtcggtgctgcgcccggcatctggtcacgtcgctgacgcgctggggataaccgagggggagaacgtcatccacctgcgcaccctgcgccgggtcaacggcatcgcgctctgtttaatcgaccactactttgcggacctcaccctttggccgacgctgcaacgcttcgacagcggctcgctgcacgattttctgcgcgagcaaaccgggattgcgctgcgccgcagccagacgcggatcagcgcccgccgcgcccaggccaaagagtgccagcgtcttgaaatcccgaatatgtcgccgctgctgtgcgtgcgcacccttaaccaccgtgacggtgaaagcagcccggcggagtactccgtcagcctgacgcgcgccgacatgattgaattcactatggagcactga

SEQ ID NO: 461052 - DNA, 453 bp, Shigella boydii
atgcacgcagatatcgcgacccgccagcactggatgtccgtgctggcgcacagccaaccggctgaactggcagcccgcctgaacgcgctgaacatcaccgccaactatgaagtgatccgcaccgccgaaaccggcctggtacagattcaggcgcgaatgggcggtaccggcgaacgcttttttgccggcgacgccacgctgacccgcgccgccgtacgcctgactgacggcaccctcggctacagctgggtgctggggcgcgacaaacagcacgccgaacgctgcgcgctgattgacgcgttgatgcagcaatctcgccattttcaaaacttatcagaaacccttattgccccactggacgctgaccgtatggcacgcattgccgcacgccaggccgaagtgaacgccagccgggtcgacttctttacgatggttcgcggagacaacgcatga

SEQ ID NO: 461053 - DNA, 294 bp, Shigella boydii
atgaccctggaaaccgcttttatgcttcctgtgcaggatgcccagcacagttttcgtcgcctgttaaaggccatgagcgagccgggcgtgattgtcgccctgcatcagctcaaacgcggctggcagccgctgaatatcgccaccaccagcgtgctgctgacgctggctgataacgacacgccggtgtggctttccgcgccattaagtaacgatatcgtcagccagagcctgcgttttcataccaacgcgccgctggtcaatcagccgggtgatgctgccaacttactgatttag

SEQ ID NO: 461054 - DNA, 1575 bp, Shigella boydii
atgctctccacactccaccgcactctatttgcgctgctggcttgtgcgtcttttatcgtccatgccgctgcaccagatgaaatcactaccgcctggccggtgaatgtcgggccactaaacccgcacctttacacgcctaaccagatgttcgcccagagcatggtttatgaaccattggtgaaatatcaggcagacggttcggtgatcccgtggctggcaaaaagctggactcattcagaagatggtaaaacctggaccttcaccctgcgtgatgacgtgaaattatccaacggtgaaccgttcgatgccgaggcggcggcagaaaacttccgcgcagtgctcgataaccgtcaacgtcacgcctggctggagctggcaaaccagattgttgatgttaaagcactcagtaaaacagagctgcaaattaccctgaaaagcgcctactatcctttcctgcaagaactggccctgccccgtcctttccgttttatcgctccctcgcagtttaaaaaccatgaaaccatgaacggaattaaagcgccgattggcaccggaccgtggattttgcaggaatcgaaactgaatcagtacgatgtcttcgtccgtaacgaaaactactggggcgaaaagccagcgattaaaaagatcacctttaacgtcatcccggacccgactacccgcgcggtggcgtttgaaactggcgatatcgacctgctgtacggaaacgaagggttattaccgctcgataccttcgcccgctttagccagaacccggcttaccatacccaactgtcacagccgatcgaaaccgtgatgctggcgcttaataccgccaaaacccccaccaatgagctggcagtacgtgaagctcttaattacgcggtaaacaaaaaatcgctgattgataacgcgttgtatggcacccagcaggtcgccgacaccctgtttgccccttctgtgccctacgccaacctcggcctgaaaccgcgccagtacgatccgcagaaagcgaaagcgttgctggaaaaagccggttggacgctgcctgcgggcaaagacatccgcgagaaaaatggtcagccgctgcgcattgaactgtcgttcatcggcaccgatgcgttaagcaaatcgatggcggaaatcattcaggctgatatgcgccagattggcgcagatgtctcgctgattggcgaagaagagagcagtatctatgctcgtcagcgcgacggtcgttttggcatgattttccaccgcacctggggcgcgccatacgatccacacgccttcctgagttcaatgcgcgtaccgtcgcacgctgacttccaggcacagcaaggattagccgacaaaccgctgattgataaagagatcggcgaagtgctggcgacccatgacgaaacgcaacgtcaggcgctgtatcgcgacattctgacccgtctgcatgacgaggcggtttatctgcctatcagttacatctcaatgatggtggtatcaaaaccggagctgggtaacatcccctacgcgccgatcgccaccgaaattccgttcgaacagattaaaccggtgaaaccttaa

SEQ ID NO: 461055 - DNA, 945 bp, Shigella boydii
atgttgcgttacgtattacgccgctttctgctgctgatcccgatggtgctcgccgcctcggtgatcatttttctgatgctgcgcctcggtaccggcgacccggcgctcgattatttgcgtctgtctaacctgccgccgacgccggagatgctggcctctacccgcaccatgctcggactggatcagccgctgtacgtccagtacggcacctggttgtggaaggcgctgcatcttgactttggtatctcattcgccagccaacgcccggtgctggacgatatgctgaacttcctgcccgccacgctggaacttgcaggtgcggcgctggtattaattctgctcacttccgtaccgctcggtatctgggcggcgcgccaccgcgatcgtttgccggatttcgccgtgcgctttatcgcgtttcttggcgtgtcgatgcccaacttctggctggcatttttgctagtgatggcgttttcggtgtatctgcaatggctacccgcgatgggctacggcggctggcagcacatcattttgcctgcggtttccatcgcctttatgtcgctggcgattaacgcgcgactgctgcgcgccagtatgctggacgtcgccggtcagcgtcacgtcacctgggcgcggctacgcggcctgaatgacaaacagaccgaacgccgccatattctgcgcaatgcctcgctgccgatgatcaccgccgtggggatgcacattggcgaattgattggcgggacgatgattatcgaaaacatctttgcctggcctggcgtcgggcgctatgcggtgtcggcgatttttaaccgtgactatccggtgattcagtgctttacgctgatgatggtggtggtttttgtggtctgtaatttgattgtcgatttgctcaacgccgcgctggacccgcgcattcgtcgtcatgaaggagcgcacgcgtga

SEQ ID NO: 461056 - DNA, 834 bp, Shigella boydii
gtgaactttttcctctcttcccgctggtcggtacgcctggcgctgatcattatcgccctgctggcgctgattgcgctcaccagccagtggtggctgccgtatgacccccaggcgattgatttgccgtcgcgcctgctttcgccggatgcgcagcactggctgggcaccgatcacttaggtcgcgatattttctcgcggctgatggcagcgacccgcgtgtcgctcggttcggtaatggcctgcctgctgctggtgctgacattagggctggttattggcggcagcgccgggttgattggcgggcgcgttgatcaggccaccatgcgcgtcgccgatatgtttatgaccttcccgacctcgattctgtcgttctttatggttggcgtgctcggcaccgggctgaccaacgtaattatcgccatcgccctgtcgcactgggcgtggtatgcacgcatggtgcgcagcctggtgatttcactacgccaacgcgagtttgtgctggcgtcacggctttccggtgcgggccatgtgcgagtgtttgtcgatcatctggcaggcgcggtgatcccttcgctgctggtgctggcaacgctggatatcggccatatgatgctgcacgtctcggggatgtctttccttggcctcggtgtgaccgcgccgaccgccgaatggggcgtgatgattaacgacgcgcgccagtatatctggacccagccgctgcaaatgttctggccggggctggcgctgtttatcagcgtgatggcctttaacctggtgggtgacgcactgcgcgatcatctggaccctcatctggtgacggagcacgcacactaa

SEQ ID NO: 461057 - DNA, 765 bp, Shigella boydii
atgccgcaacagattgaactacgtaatatcgcgctacaggccgcgcagccgctggtacacggtgtatcgttaaccctgcaacgcgggcgcgtgctggcgttagtcggcggtagcggcagcgggaaatcattaacctgcgccgcgacgctgggcattttgcccgctggcgttcgccagacggcgggggaaattttagccgatggcaaagcggtttatccctgcgccctgcgcggcatcaaaattgccaccatcatgcagaacccgcgcagcgcctttaatccgctacacaccatgcacacccacgcgcgggaaacctgcctggcgttagggaaacccgccgatgacgctacgcttaccgctgccatagaagcggtggggctggaaaacgccgcgcgcgtgctgaagctgtacccgttcgagatgagcggcggcatgttgcagcgcatgatgattgcgatggcggtgctgtgtgaatcaccgtttatcatcgcagatgaaccgaccaccgacctcgacgtggtagcacaggcgcgcatcctcgatctgctggaaagcattatgcaaaaacaagcgccgggaatgctgctggtcacccatgatatgggcgttgtggcgcgtctggcggatgacgtggcggtgatgtcacaaggtaaaattgtcgaacagggcgatgtagaaacgctgtttaacgcccccaaacatacggtgacgcgcagcctggtttccgctcatctcgccctctacggtatggagctggtatcatga

SEQ ID NO: 461058 - DNA, 807 bp, Shigella boydii
atgaccttacttaacgtcagcggcctttcccatcactatgcccacggtggatttagcggaaaacatcaacatcaggcggtgctgaataacgtttccctgaccctgaaaagcggcgaaaccgtcgccctgctgggacgcagcggctgcggaaaaagcaccctcgcgcggctgctggtaggcttagagtctccctcacaagggaatattagctggcgcggcgaatcgctggcgaaacttaatcgcgcccaacgtaaagccttccgccgtgatattcagatggtgtttcaggactccatcagtgccgtgaatccgcgcaaaaccgtgcgcgagatcctgcgtgaaccgatgcgccacctgctatcactgaaaaaatccgaacaactggcgcgcgccagcgaaatgctgaaggcggtcgatctcgatgacagcgttctcgacaaacgcccaccgcagttaagcggcggccagctccagcgcgtctgcctagcacgcgcgctggcggtcgaaccgaaattgctgattctggatgaaaccgtttctaaccttgatctcgtgttacaggcgggcgtcattcgcctgctgaaaaagctgcaacaacagtttggcaccgcctgcctgttcatcacccacgacttacgtcttgtagaacgcttttgccagcgggtgatggtgatggacaacggacaaatcgtcgaaacccaggcggtgggagataaattaaccttttcctctgacgccggacgtgtgctacaaaacgcggtattacccgcattccccgtgcgccgtcgcgccacagaaaaggtttaa

SEQ ID NO: 461059 - DNA, 402 bp, Shigella boydii
atgcaacgagtcaccatcacgcttgatgacgatttactggagacgctggacagcctgagccagcgtcgtggttataacaaccgttccgaagctatccgcgatattctgcgtagcgccctggcccaggaggccactcagcagcacggcacgcaaggtttcgcggtgctctcctatgtgtatgaacacgaaaaacgcgacttagccagccgcattgtctccacccagcaccatcaccacgatctctccgtcgccacgctgcatgtgcatatcaatcacgacgactgtctggaaatcgccgtgctgaaaggtgatatgggcgacgtgcagcattttgccgatgacgttatcgcccagcgcggcgtgcggcatgggcatttgcagtgcttgccgaaggaagattga

SEQ ID NO: 461060 - DNA, 462 bp, Shigella boydii
atgaaactcgtgcacatggccagtggtttagcggttgcgattgcgttggcggcttgcgcagataaaagcgcggatattcagacgccagccccggctgcaaatacgtctatttcagcaacacaacaacctgctatccagcaaccgaatgtctccggtaccgtctggatccggcagaaagtcgcactgccgcctgatgctgtgctgaccgtgacactttctgacgcgtcgttagccgatgcaccgtcaaaagtgctggcgcagaaagcggtgcgtaccgaaggtaaacagtcaccattcagctttgttctgccatttaacccggcagatgttcagccgaacgcgcgtattctgttgagtgcggcgattaccgtgaatgacaaactggtatttattaccgataccgttcagccggtgatcaacaagggcggaactaaagccgacctgacattggtgccggtgtag

SEQ ID NO: 461061 - DNA, 861 bp, Shigella boydii
atgagtcaggcgctaaaaaatttactggcattgttaaatctggaaaaaattgaggcaggactctttcgcggccagagtgaagatttaggtttacgccaggtgtttggcggccaggtcgtgggtcaggccttgtatgctgcaaaagagaccgtcccggaagagcggctggtacattcgtttcacagctactttcttcgcccaggcgatagtaagaaaccgattatttatgatgtcgaaacgctgcgtgatggtaacagcttcagcgcccgccgggttgctgctattcaaaacggcaaaccgattttttatatgacggcctctttccaggcaccagaagcgggtttcgaacatcaaaaaacaatgccgtccgcgccagcgcctgatggcctgccttcggaaacgcaaatcgcccaatcgctggcgcacctgctgccgccagtgcttaaagataaattcatctgcgatcgtccgctggaagtccgtccggtggagtttcataacccactgaaaggtcacgtcacagaaccacatcgtcaggtgtggatccgcgcaaatggtagcgtgccggatgacctgcgcgttcatcagtatctgctcggttacgcttctgatcttaacttcctgccggtagctctacagccgcacggcatcggttttctcgaaccggggattcagattgccaccattgaccattccatgtggttccatcgcccgtttaatttgaatgaatggctgctgtatagcgtggagagcacctcggcgtccagcgcacgtggctttgtgcgcggtgagttttatacccaggacggcgtactggttgcctcgaccgttcaggaaggggtgatgcgtaatcacaattaa

SEQ ID NO: 461062 - DNA, 1287 bp, Shigella boydii
atgaagatagcgacgataaaaactgggcttgcttcactggcgatgctgccgggactggtaatggctgcacctgcggtggccgataaagccgacaatgcgtttatgatgatttgtactgcgctggtgctgtttatgactattccggggattgccctgttttacggtgggttgattcgcggcaaaaacgtgctgtcgatgctgatgcaggtgacggtgacgtttgcactggtctgtattctctgggtggtttacggttactcgctggcgtttggtgagggtaacaacttcttcggcaacgttaactggttgatgctgaaaaacatcgaactgacggcggtgatgggcagcatttatcagtatatccacgtagcgtttcagggatcgtttgcctgcattaccgtaggcttgatagttggggcgctggcggaacgaatccgcttctcagctgtgttgattttcgtggtggtatggctgacgctctcttacattccgattgcgcatatggtgtggggcggcggtttgctggcttctcacggtgcactggatttcgcgggtggcacagtggtgcacattaacgccgcaatcgccggtctggtgggcgcgtatctgataggcaaacgcgtgggcttcggtaaagaggcgtttaaaccgcacaacctgccgatggtcttcaccgggactgccattctctatatcggttggtttggctttaacgccgggtcagcgggcacggcgaatgaaatcgcggcactggcatttgtgaatactgtggtcgcaacggcggcggcaattcttggctggatcttcggtgaatgggcgctgcgtggtaagccttcactgctgggggcgtgttctggcgcgattgccggtctggtcggcgtgacgccagcgtgcggctacattggggttggcggcgcgttgattatcggcgtggtagctggtctggcgggcttgtggggcgttaccatgctcaaacgcttgctgcgggtggatgatccctgcgatgtcttcggtgtgcacggcgtttgtggcattgtcggctgtatcatgaccgggatttttgccgccagctcgctgggcggcgtgggcttcgctgaaggtgtgacgatgggtcatcagttgctggtacagctggaaagcatcgccattacgatcgtctggtccggtgtggtggcatttattggctacaaattggcggatctgacggttggtctgcgtgtaccggaagagcaggagctagaagggctggatgtcaacagtcacggcgagaatgcctataacgcctaa

SEQ ID NO: 461063 - DNA, 339 bp, Shigella boydii
atgaagctggtgaccgtgataatcaaaccattcaagctggaagacgttcgtgaagcgttatcttccattggtattcagggcctgaccgtcaccgaagtgaaaggtttcgggcgtcagaaagggcatgccgagctgtaccggggggcggaatacagcgtcaacttcctgccaaaagtaaaaattgatgtggcaattgctgatgaccaactcgatgaagtgatcgatatcgtcagtaaggcggcttacaccggaaaaattggcgacggcaaaatcttcgtcgctgaattgcaacgcgtcattcgtattcgtaccggcgaagccgacgaagcggcgctgtaa

SEQ ID NO: 461064 - DNA, 1179 bp, Shigella boydii
atgattttcccggtggtgctggtggtaatggtgatataccagcgttacagcacgccgattgtccgtcgtgtgcgcgcctatctggcggatatcaacgacggctttaacgaaatcatcaatggcatgagcgttatccagcagttccgtcagcaggcgcgatttagcgaacgtatgggggaggccagtcgttcacactatatggccaggatgcaaaccctgcgcctcgacggttttctgctgcgtccgctgctgagtctgttttcatcgctcattctttgtggcttgttgatgctgtttggcttctccgctagcggcaccattgaagtaggcgtgctgtatgcgtttatcagctatcttgggcgacttaatgaacccttaatcgaactgaccacgcaacaggcgatgctgcaacaggctgttgttgctggtgagcgcgtgtttgaactgatggacggaccgcgccagcaatatggcaatgatgatcgcccgttacagagtggcaccatcgaagtcgataacgtgtcatttgcttatcgcgatgacaatctggtgctaaagaacattaatctctctgtgccttcgcgtaactttgtggcactggtcgggcataccggcagtggcaaaagcaccctcgccagtttattgatgggctattacccgctaacggaaggtgagattcgccttgatggtcgtccattaagttcgctaagtcacagcgcgctgcgccagggcgtggcaatggtgcagcaagatccggtggtgctggcggataccttcctcgccaacgtgacgctggggcgtgatatctccgaagaacgcgtctggcaggcgctggaaaccgtgcaactggcggagctggcacgcgtgttggtggagacgccgcaaatcctgatccttgatgaggcaaccgccagcattgactccggtactgaacaggcgattcaacatgctctggcggctgtgcgtgaacataccacgctggtggtgattgctcaccgcttatcgaccattgttgatgccgacaccattctggtgcttcatcgtgggcaagccgtggagcagggcactcaccagcaactgctggcggcccagggacgctactggcagatgtatcaactgcaacttgcgggcgaagagctggcagccagcgtgcgtgaagaagaatcattgagcgcctga

SEQ ID NO: 461065 - DNA, 510 bp, Shigella boydii
atgcgtagttttagccaactgtggccgactctcaagcgtctgttagcgtacggttcgccgtggcgtaaaccgctggggattgcggtcctgatgatgtgggttgcggcagcggcagaagtcagtgggccgctgcttatcagctattttatcgacaatatggtagcgaaaaataacctgccgttgaaaatggttgcagggctggctgcggcgtatgttgggctacaactgtttgccgccgggctacattacgcgcagtcgctgctgtttaatcgggcggcagtaggcgtagtgcaacagttgcgtaccgacgtgatggatgccgcattgcgccagccattaagcgagtttgatacccaacccgtcgggcaggtgatttcccgcgtcactaatgacactgaagtgatccgcgatctctacgttaccgtagtggcaactgtcctgcgtagcgccgcactggtgggcgcgatgctggtggcgatgttcagcctcgactggcgctggtggcgataa

SEQ ID NO: 461066 - DNA, 147 bp, Shigella boydii
atgcagcacggacatatcgcccagcgtggcaatcatgatgagctggcgcaacaaagcggctggtatcgcgatatgtatcgctatcaacaactggaggcggcgctcgacgacgctccggaaattcgcgaggaggccgtcgatgcgtag

SEQ ID NO: 461067 - DNA, 996 bp, Shigella boydii
atgaagcaaacagtttatatcgccagccctgagagccagcaaattcacgtctggaacctgaatcatgaaggcgcactgacgctgacacaggttgtcgatgtgccggggcaggtgcagccgatggtggtcagcccggacaaacgttatctctatgttggtgttcgccctgagtttcgcgtcctggcgtatcgtattgccccggacgatggcgcactgacctttgccgcagagtctgcgctgccgggtagtccgacgcatatttccaccgatcaccaggggcagtttgtctttgtaggttcttacaatgcgggtaacgtgagcgtaacgcgtctggaagatggcctgccagtgggcgtcgtcgatgtggtcgaggggctggacggttgccattccgccaatatctcaccggacaaccgtacgctgtgggttccggcattaaagcaggatcgcatttgcctgtttacggtcagcgatgatggtcatctggtggcgcaggaccctgcggaagtgactaccattgaaggggccggcccgcgtcatatggtattccatccaaacgaacaatatgcgtattgcgtcaatgagttaaacagctcagtggatgtctgggaactgaaagatccgcacggtaatatcgaatgtgtccagacgctggatataatgccggaaaacttctccgacacccgttgggcggctgatattcatatcaccccggatggtcgccatttatacgcctgcgaccgtaccgccagcctgattaccgttttcagcgtttcggaagatggcagcgtgttgagtaaagaaggcttccagccaacggaaacccagccgcgcggcttcaatgttgatcacagcggcaagtatctgattgccgccgggcaaaaatctcacctcatctcggtatacgaaattgttggcgagcagggactactgcatgaaaaaggccgttatgcggtcgggcagggaccaatgtgggtggtggttaacgcacactaa

SEQ ID NO: 461068 - DNA, 954 bp, Shigella boydii
atgaagcatgaattatcaagtatgaaggcatttgtcatactggcagagtccagttcgtttaacaatgccgctaaattactcaatattacgcaacctgcattaacgcgaagaataaaaaagatggaggaagatttacatattcaactatttgagcgtacaactcgcaaggttacgttaacaaaagcaggaaaaaggttgctcccggaggcgcgggaattaataaagaaattcgatgaaacgctttttaatattcgtgatatgaatgcttatcatcgtggtatggtgacgttagcgtgtattccgaccgcagtattttattttttaccgctggcaatcggtaaatttaatgagctgtatcccaatattaaagtgcggattctggaacaaggcacgaataattgcatggaatcggtgctgtgtaacgaatcagactttggcataaacatgaacaacgtcacaaattcatccattgattttaccccactggtcaacgagccgttcgtgctggcctgtcggcgtgaccatccattggccaaaaagcagcttgtagaatggcaggagttagtgggttacaaaatgattggcgtacgctcctccagcggcaaccgactgttgatagaacaacagctggccgacaagccctggaagctggactggttttacgaagtgcgtcatctttcgacgtcattaggactagtggaggcaggactggggatttcggcgcttcctggtctggcaatgccccatgcgccctattcttcgattattggtatcccactggtggaacccgttatacgtcggacattggggattattcgccgcaaagatgccgtgctttctccggcagctgaacgcttttttgccttgctgattaatttgtggactgacgataaagacaatttgtggaccaatatcgtcgaacgccagagacatgcgttacaggagataggttaa

SEQ ID NO: 461069 - DNA, 1053 bp, Shigella boydii
atgaaaaaaataccctgcgtgatgatgcgaggtggaacctcgaggggcgcgttcctgttagcggaacatttacccgaagatcaaacgcagcgcgataaaatattgatggcaattatgggttccggtaacgatctggaaattgacggtattggcggcggtaatccactgaccagtaaagtcgccattattagccgttccagcgatccgcgtgctgatgtcgattatctgtttgcgcaggtaatcgttcatgagcaacgtgtcgataccacgcctaactgtggcaatatgctgtctggtgttggggcattcgccattgaaaatggtttgattgcagcgacttcgccagttactcgcgtacgtatccgcaacgtcaatacgggtacgttcatcgaagctgatgtgcaaacgccaaatggtgttgtcgagtacgagggtagtgccagaattgacggcgtaccgggtactgccgcaccggttgcgctcactttcctgaatgccgctggaaccaaaaccggaaaagttttcccgactgataatcagattgattattttgacgatgtcccggtgacctgtatcgatatggcgatgccagtcgtcattattccggctgaatatctgggaaaaacaggttatgaattaccggcggaactggatgccgacaaagcattattagcctgcattgaatctatccgtctacaagcgggtaaagcaatgggcttaggtgatgtcagtaatatggttatccctaaacctgtgcttatttctccagcgcagaaaggcggggcaattaatgtgcgttattttatgccgcattcttgccatcgcgcgctggcgataaccggtgctattgctatttccagtagttgtgcattggaaggcaccgtcacccgacaaatcgtcccttctgtaggatatggcaatatcaatattgaacaccccagtggtgcgctcgacgttcatttaagtaatgaaggtcaggatgccacgacgttacgcgcatctgttattcggacaaccagaaaaatattttccggtgaagtttatcttccctga

SEQ ID NO: 461070 - DNA, 300 bp, Shigella boydii
atgaaaagcctctcctataagcggatctataaatcacaagaatacctggcaacgttgggcacaattgaataccgatcattgtttggcagttacagcctgaccgttgacgacacggtgtttgcgatggtttctgatggtgagttgtatcttcgggcttgtgagcaaagtgcacagtactgtgtaaaacatccgcctgtctggctgacatataaaaagtgtggccgatccgttaccctcaattactatcgggttgatgaaagtctatggcgaaatggtaatgctgccaacttactgatttag

SEQ ID NO: 461071 - DNA, 510 bp, Shigella boydii
atgtacacttcaggctatgcacatcgttcttcgtcgttctcatccgcagcaagtaaaattgcgcgtgtctctacggaaaacactacagccgggcttatcagtgaagttgtctatcgcgaagatcagcccatgatgacgcaacttctactgttgccattgttacagcaactcggtcagcaatcgcgctggcaactctggttaacaccgcaacaaaaactgagtcgggaatgggttcaggcatctgggctacccttaacgaaagtaatgcagattagccagctctccccttgccacactgtggagtcaatggttcgcgctttacgcacgggcaattacagtgtggtgatcggttggttggcagatgatttgactgaagaagagcatgctgaacttgttgatgcggcaaatgaaggtaacgctatggggtttattatgcgtccggtaagcgcatcctctcacgccacgagacaactttccgggctaaaaattcactctaatttgtatcattaa

SEQ ID NO: 461072 - DNA, 1041 bp, Shigella boydii
atgaaaaagacagctatcgcgattgcagtggcactggctggtttcgctaccgtagcgcaggccgctccgaaagataacacctggtacactggtgctaaactgggctggtcccagtaccatgacactggtttcatcaacaacaatggcccgacccatgaaaaccaactgggcgctggtgcttttggtggttaccaggttaacccgtatgttggctttgaaatgggttacgactggttaggtcgtatgccgtacaaaggcagcgttgaaaacggtgcatacaaagctcagggcgttcaactgaccgctaaactgggttacccaatcactgacgacctggacatctacactcgtctgggtggtatggtatggcgtgcagacactaaatccaacgtttatggtaaaaaccacgacaccggcgtttctccggtcttcgctggcggtgttgagtacgcgatcactcctgaaatcgctacccgtctggaataccagtggaccaacaacatcggtgacgcacacaccatcggcactcgtccggacaacggcatgctgagcctgggtgtttcctaccgtttcggtcagggcgaagcagctccagtagttgctccggctccagctccggcaccggaagtacagaccaagcacttcactctgaagtctgacgttctgttcaacttcaacaaagcaaccctgaaaccggaaggtcaggctgctctggatcagctgtacagccagctgagcaacttggatccgaaagacggttccgtagttgttctgggttacaccgaccgcatcggttctgacgcttacaaccagggtctgtccgagcgccgtgctcagtctgttgttgattacctgatctccaaaggtatcccggcagacaagatctccgcacgtggtatgggcgaatccaacccggttactggcaacacctgtgacaacgtgaaacagcgtgctgcactgatcgactgcctggctccggatcgtcgcgtagagatcgaagttaaaggtatcaaagacgttgtaactcagccgcaggcttaa

SEQ ID NO: 461073 - DNA, 453 bp, Shigella boydii
atgaaatatcaacaacttgaaaatcttgaaagcggttggaaatggaagtatctggtgaagaagcatcgcgaaggggagttaattacccgttacatagaagccagtgccgcccaggaagccgtcgatgtgttgctctcgctggaaaatgaacccgtgctggtaaatggctggattgacaagcatatgaatccggaactggtcaatcgcatgaagcaaaccattcgtgccagacggaagcgccattttaatgcggaacaccagcatacgcgcaaaaagtcgatcgatctggaatttattgtctggcaacgtctggctggtcttgcgcagcgtcgcggtaaaacgctttctgaaacgattgttcagctgattgaagatgcggaaaacaaagagaaatacgcgaataaaatgtcttctctgaagctggatctgcaggcattgctgggtaaggaataa

SEQ ID NO: 461074 - DNA, 1761 bp, Shigella boydii
ttgaccattacgaaacttgcatggcgtgacctggttcctgataccgatagctatcaggaaatatttgctcagccacatttgattgacgaaaacgatcctttattcagtgatactcaaccgcggctgcaatttgcgctggagcagttgctgcatacgcgagcatcctcctcttttatgctggctaaggccccggaagagtctgagtatctgaatcttattgccgatgccgcgcgtacgctacaaagcgatgcaggccaactggtgggcgatcactatgaggtttccggccactccatccgcttacgtcacgcagtgagtgcagatgataattttgcgactttaacgcaagttgtcgctgccgactgggtagaagcggagcaactctttggctgcctgcgccagtttaatggcgacattaccctgcagcctggtctggtgcatcaggcaaatggcggtattctcatcatctctttgcgtacactgctggcgcaacctctgctgtggatgcggctgaaaaatatcgttaaccgcgagcgttttgactgggttgcgtttgatgagtcgcgccctctccccgtctctgtgccttcgatgccattgaagctgaaagtcattctggtaggcgaacgcgaatcattggctgatttccaggagatggagccagagctttcagagcaggctatttatagcgaatttgaagatactctgcagattgtcgatgcggagtcagtaagccagtggtgtcgctgggtgacatttaccgccagacataatcacttacctgccccgggagcggatgcctggccggtacttatccgcgaagcagcacgctacaccggtgaacaagaaacacttccgcttagcccgcagtggatcctccgccagtgtaaagaggtcgcctccctgtgtgatggcgacaccttctccggcgagcagctaaacttaatgctgcagcagcgtgaatggcgcgaaggtttcctcgctgaacgtatgcaggatgagatccttcaggagcaaatcctgattgaaaccgaaggcgaacgcatcgggcaaattaacgccctttcggtcattgaatttccgggtcatccacgcgcttttggcgaaccttctcgcattagctgcgttgtgcatattggcgatggtgaattcaccgacatcgaacgcaaagcggaacttggcggcaatatccatgcgaaagggatgatgatcatgcaagcgttcctgatgtcggaactacagcttgagcaacagatccccttctcagcatcgctgacatttgagcagtcatacagtgaagttgatggagatagtgcctcgatggctgaactctgcgccctgataagcgccctcgccgatgtgccggtgaatcagagtatcgctatcacaggttcagtcgatcagttcggtcgcgcccagccggtcggtggtttaaatgagaaaatcgaaggcttctttgctatttgccagcaacgtgagttaaccgggaaacaaggtgtcattatccccacagctaacgttcgccatttaagtcttcacagtgaactggtgaaagcggtagaagaaggcaaattcaccatctgggcagtagacgatgtgactgacgcactgccgttattattaaatctggtgtgggatggcgaaggccaaacgacgctgatgcaaaccatccaggaacgtatcgcgcaagcatcgcaacaggaaggacgtcaccgttttccatggccattacgttggctgaactggtttattccgaactga

SEQ ID NO: 461075 - DNA, 627 bp, Shigella boydii
atggccattacgttggctgaactggtttattccgaactgatcggacttgttcagcgtacacgtgttagctatcctgcgtgcttcaataaaataaggcttacagagaacatggtagataaacgcgaatcctatacaaaagaagaccttcttgcctctggtcgcggtgaactgtttggcgctaaaggcccgcaattgccagcaccgaacatgctgatgatggaccgtgtggtcaaaatgaccgaaacgggtggtaacttcgacaaagggtatgttgaagcagaactggatatcaatccggatctgtggttcttcggatgccacttcattggcgatccggttatgccgggatgcctgggcctggacgcaatgtggcagctagtagggttctacctcggctggctgggcggcgaaggtaaaggccgcgcgctgggcgttggcgaagtgaaattcactggtcaggtactgccgacagcgaaaaaagtgacctaccgtattcactttaaacgcattgttaatcgtcgtctgattatgggtctggcagatggcgaagtgctggttgatggtcgtctgatctataccgccagcgacctgaaagtcggtctgttccaggatacgtctgccttctga

SEQ ID NO: 461076 - DNA, 921 bp, Shigella boydii
atgcgtttccgccagttgttaccgctttttggcgcgctgtttgcgttgtatatcatttggggctcaacctattttgtcattcggattggcgtggaaagctggcctccgttaatgatggcaggcgttcgattcctggcagccggtattttattgatggcatttttgctactgcgcggacacaagctccccccgctacgtccgctgctcaatgccgcgctgattggcctgttattgctggctgtcggtaatggcatggtgacggttgccgagcatcaaaatgttccttccggcatcgccgccgttgtggttgcaaccgtgcccctctttaccctgtgcttcagccgcctgtttggcattaaaacgcgcaaattggaatgggtgggtatcgccattgggcttgccggaatcatcatgctcaatagcggtggaaatttaagcggcaatccgtggggcgcgattctgattttaatcggctcgattagctgggcgtttggctcggtttatggctcgcgcattaccttacctgtagggatgatggcgggtgcgattgagatgctggcggcaggcgtggtgttaatgatcgcgtcgatgattgcaggtgaaaaactgacggcgctcccttccctttcaggcttccttgcggtcggctatctggcgctgtttggttcgattatcgccatcaacgcttatatgtatttaatccgtaatgtcagtccggctctcgccaccagctacgcctacgttaacccggtggtcgcggtcttgctgggtacgggactgggcggagagacgctgtcgaagattgaatggctggcgctcggcgtaattgtcttcgcggtggtactggtcacgttgggaaaatatctcttcccggcaaaacccgtagttgcgccagttattcaggacgcatcaagcgagtaa

SEQ ID NO: 461077 - DNA, 471 bp, Shigella boydii
atggccgacgttcacgataaggccactcgcagcaaaaatatgcgcgcgattgccacgcgtgatacggcgattgagaagcgcctcgccagtctgttaaccgggcagggcctagcgtttcgcgttcaggacgccagtctgcccggaagcccggattttgtcgttgatgaatatcgctgcgtgatatttacccatggctgcttctggcatcatcatcactgctatctgtttaaagtacctgcgactcgaaccgagttctggctggagaagataggtaaaaatgttgaacgcgatcgccgcgatatcagtcgtttgcaggaactcggctggcgcgtactgattgtctgggagtgtgcattacgtgggcgcgagaagctgacggatgaagcgcttaccgagcgtctggaagagtggatctgcggcgaaggtgccagcgcgcagatcgacacgcaggggattcatttactcgcttga

SEQ ID NO: 461078 - DNA, 1419 bp, Shigella boydii
atgcaggaaaatatatcagtaaccgattcatacagcaccgggaatgccgcacaggcaatgctggagaaactgctgcaaatttatgatgttaaaacgctggtggcgcagcttaatggtgtgggtgagaatcactggagcgcggcaattttaaaacgtgcgctggcgaatgactcggcatggcaccgtttaagtgagaaagagttcgcccatctgcaaacgttgttacccaaaccaccggcacatcatccgcattatgcgtttcgctttatcgatctatttgccggaattggcggcatccgtcgcggttttgaatcgattggcggacaatgcgtgtttaccagcgaatggaacaaacatgcggtacgcacttataaagccaaccattattgcgatccggcgacgcatcattttaatgaagatatccgcgatatcaccctcagccataaagaaggcgtgagtgatgaggcggcggcggaacatattcgtcaacacattcctgaacacgatgttttactggccggtttcccttgtcagccattttcgctggctggcgtatcgaaaaagaactcgctcgggcgggcgcacggttttgcctgcgatacccagggcacgctgttttttgatgtggtacgcattatcgacgcgcgtcgtccggcgatgtttgtgctcgaaaacgtcaaaaacctgaaaagtcacgaccagggtaaaacgttccgcatcatcatgcagacgctggacgaactgggctatgacgtggctgatgcagaagataacgggccggacgatccgaaaatcatcgatggtaaacattttctgccgcagcaccgtgaacgcatcgtgctggtgggttttcgtcgcgatcttaatctgaaagccgattttactctgcgtgatatcagcgaatgtttccctgcacagcgagtgacgctggcgcagctgttggacccgatggtcgaggcgaaatatatcctgacgccggtgctgtggaagtacctctatcgatatgcgaaaaaacatcaggcgcgcggtaacggcttcggttatggaatggtttatccgaacaatccgcaaagcgtcacgcgtacgctgtctgcgcgttattacaaagatggcgcggaaattttaatcgatcgcggctgggatatggccaaaggtgagaaagactttgacgatccgctgaatcagcaacatcgtccacgtcggttaacgcctcgggaatgcgcgcgcttaatgggttttgaagcgccgggagaagcgaaattccgcattccggtttcggacactcaggcctatcgccagttcggtaactcggtggtcgtgccggtctttgccgcggtggcaaaactgcttgagccaaaaatcaaacaggcggtggcgttgcgtcagcaagaggcacaacatggccgacgttcacgataa

SEQ ID NO: 461079 - DNA, 696 bp, Shigella boydii
atggacttacaacactggcaggcacagttcgaaaactggttgaaaaaccatcatcagcaccaggacgcggcccatgacgtgtgtcattttcgccgcgtctgggctacggcacagaagctggcggcagatgacgatgtcgatatgctggtgattttaaccgcctgttattttcacgatattgtgagcctggcgaaaaatcatccgcaaaggcagcgttcttcaatcctggcggcagaagagacgcgtcgcctgctccgtgaagagttcgagcaatttccggcggagaaaatcgaggccgtttgtcatgtcattgccgctcacagtttcagcgcgcaaatcgcccccttaacaacggaagctaaaatcgtccaggatgcggatcggctggaagccctgggggcgattggcctggcgcgcgtgtttgccgtttcaggggcattgggcgtggcgctgtttgatggtgaagatccgttcgcacagcatcgcccgcttgatgataaacgctacgcgctggatcatttccagactaagttgctgaagctaccgcaaaccatgcaaaccgcaagaggcaagcagctggcgcagcacaacgcgcattttttagtcgagtttatggcgaagctcagtgccgaactggcgggggagaatgaaggtgtcgatcacaaggtgatagatgcgttttcacccgcgggataa

SEQ ID NO: 461080 - DNA, 303 bp, Shigella boydii
atggaatacggttcgacaaagatggaagagagactctctcgcagccctggcggcaaactggctttgtgggctttctatacatggtgtggctatttcgtctgggcaatggcgcgttacatctgggtgatgagcctgatccccgatgcccccgtgtcgggatttgaaagcgatttaggctctaccgcgggaaagtggttaggggcactggtcggatttttatttatggctctggtcggggcattgttaggcagcattgcctggtacacccgacctcgtcccgcacgtagcagacgctatgaataa

SEQ ID NO: 461081 - DNA, 666 bp, Shigella boydii
atgaaaagaaaagttctggcaatgctggtcccggcgttattagttgctggcgcagcaaatgcggctgaaatttacaataaagatggcaataaagttgatttctacggcaagatggttggcgaacgcatctggtcaaatactgatgataataacagcgaaaacgaagatacctcctatgctcgtttcggtgttaaaggtgaaacccaaatcaccagcgaactgactggttttggtcagtttgaatacaacctcgacgccagcaagcccgaaggctctaatcaggaaaaaacccgtttaaccttcgcaggtttgaaatataacgagttaggatctttcgactatggtcgtaactacggtgttgcttatgatgccgcagcttataccgatatgttagttgaatggggtggtgattcctgggcttccgctgacaacttcatgaacggtcgtaccaacggtgttgcaacctaccgtaactctgatttctttggtctggttgatggtctgaattttgctgtgcaatatcaaggtaagaacagcaatcgtggcgttactaaacaaaacggtgatggctatgcgttgtggatttgcccctatatttccagacatctgttatcacttaacccattacaagcccgctgccgcagatattcccgtggcgagcgataa

SEQ ID NO: 461082 - DNA, 381 bp, Shigella boydii; identical to SEQ ID NO: 458903

SEQ ID NO: 461083 - DNA, 162 bp, Shigella boydii
atgaacttgaagaagatttttttcagtgctgtcactgtttcagttctctgcgcattaacgggatgtgactacattgaagaaggcaagccagaaagtagtttattgaaacaacaagaagaacataacaataaaattgatctacttgaaaaacaacaagcatag

SEQ ID NO: 461084 - DNA, 4056 bp, Shigella boydii
atgaacaaaatatttaaagttctctggaaccctgcgacagggaattatactgttaccagcgaaacggcaaaaagccgtggcaagaaatctgggcgcagtaagctgttaatttctgcgctggttgcgggtggaatgttgtcgtcgtttggggcattggcgaatgccgggaatgacaacggtcagggtgttgattacggtagtggatcagctggcgacggctgggttgctataggcaaaggggcgaaagcaaatacttttatgaacaccagtggttccagtactgctgtgggttatgacgctatagctgaaggccaatatagctctgccatcgggtcaaaaacccatgcgattggtggtgcatcaatggcctttggggttagtgcaatatcagaaggcgatagaagtatagcactgggtgcctcttcgtattcattgggccaatactcaatggccctcggccgttattcaaaagcattgggtaaattgtctattgctatgggggactcttccaaagcggaaggagcaaacgccattgccctgggaaatgccactaaagctactgagattatgagtattgctcttggcgacaccgccaatgcgtcaaaagcgtattcaatggcgctgggagcaagtagcgtcgcatctgaagaaaacgcaattgccctggggcgtagcagtgtagctagcggtactgacagcctcacatttggcagacaatcacttgccagcgcagcgaacgctattgcgataggtgctgagaccgaagccgctgaaaatgcaactgctattggcaataatgcgaaggcaaaagggactaatagcatggcaatggggttcggaagccttgccgataaagtcaatactatcgcattaggaaatggcagccaggctctggcagataatgcaatcgccataggccagggcaacaaagctgatggcgtggatgccatcgctctgggtaatggtagccagtcgagaggcttaaacaccattgccttaggcacagccagtaatgcaactggtgataagagtcttgcgcttggtagtaatagcagtgccaacggtattaactctgtcgcgctgggcgcagattccattgcggatttagacaataccgtctctgtcggcaatagttcattaaaacgcaagatcgttaatgtgaaaaatggcgcgatcaagtctgacagttacgatgccattaatggttcacagctttatgccattagcgactcggtagcaaaaaggcttggaggaggggctgcagtagatgttgatgacggtactgttacagcaccaacctacaatttaaaaaatggtagcaaaaataacgtaggggctgcgctcgctgtacttgatgaaaacaccctgcaatgggaccaaaccaaaggcaaatacagcgctgctcatggtactagtagcccaactgccagcgtaatcaccgatgttgcggatggcacgatttcagcctccagtaaggatgcggttaacggttcccaactgaaagctaccaatgacgatgtcgaagccaacaccgccaatatcgctactaataccagcaacattgccacgaatacggcaaatattgccaccaataccaccaatatcaccaacctgacggattccgttggtgaccttcaggctgatgccctgctctggaacgaaactaaaaaggcattcagtgcagctcacggccaggataccaccagcaaaatcaccaacgttaaagatgccgacctgacggctgacagcactgatgctgttaacggctctcagctgaaaaccaccaacgatgctgtggcgacgaataccaccaatatcgccaataacacttccaatattgccactaacaccaccaacatctctaatctgactgagacggtgactaatcttggtgaggatgcgctgaaatgggataaggacaatggtgtattcacggcagctcatggcaccgagaccaccagcaaaatcaccaacgttaaagatggcgacctgacgactggcagcaccgatgccgttaacggctctcagctgaaaaccaccaacgatgccgtggcgacgaataccaccaatatcgccactaacaccaccaacatctctaatctgactgagacggtgactaatcttggtgaggatgcgctgaaatgggataaagacaatggtgtcttcactgcagctcatggcaacaataccgccagcaaaatcaccaatatcctggacggcacagtcactgcaaccagttccgatgccattaacggtagccagctttatgacttaagcagcaatatcgccacctacttcggcggcaatgcttctgtgaatactgacggtgtgtttaccggtccaacctacaaaatcggtgaaacaaattattataacgtcggcgatgcactggctgcgattaactcctcatttagcacgtctctcggcgatgctctgctttgggatgccaccgcaggtaaattcagtgccaaacacggtactaatggtgacgcaagcgtgatcactgatgtcgcagatggtgaaatttcagactccagttctgacgcagtaaacggctcacaactccacggcgtgagcagttatgttgttgatgcgctggggggtggtgccgaagtcaatgcagacggcaccatcactgcgccgacgtacaccattgctaatgctgattacgataatgtcggtgatgccctgaatgctatcgataccactcttgacgacgctctgctctgggatgcggacgccggtgaaaatggtgcatttagcgccgctcatggaaaagataaaactgccagtgtaatcactaacgtcgctaacggtgcaatctctgctgccagcagcgacgcgattaacggctcacaactctataccaccaataagtacatcgctgatgcgctggatggtgacgcagaagtcaacgctgacggcaccatcaccgcaccgacttacaccattgcgaacgccgagtacaacaacgtcggtgacgccctggatgcgcttgatgataacgccctgctgtgggatgagactgccaatggcggtgctggagcctacaatgccagccatgacggtaaagccagcatcatcactaatgtcgctaatggcagtattagtgaggacagtaccgatgcagtgaacggttctcagttgaatgcgacgaatatgatgattgagcagaacacccaaattatcaatcagctcgctggtaacaccgacgcaacctatatccaagaaaacggtgcgggtattaactatgtgcgtactaacgacgacggcttagcgttcaacgacgccagcgcacagggtgttggcgctacagctataggttataactctgtcgccaaaggcgatagcagcgtagctattggtcagggcagctacagcgacgttgatacgggtatcgccctaggtagcagctctgtttccagccgagtgattgccaaaggctcccgtgacaccagcataacggaaaatggcgttgttattggttacgacaccacggatggcgaactgctcggtgcattgtctatcggtgatgacggtaaatatcgtcaaatcatcaacgtagccgatggttccgaagcccatgacgccgttacggttcgtcaattgcagaatgcgattggtgcggtcgcaaccacgccgactaaatacttccacgctaattcaacggaagaagattcactggcagtgggaactgactcgctggcaatgggtgcgaaaaccatcgtgaatggcgataaaggtattggtatcggttatggtgcctacgtggacgcgaatgcacttaacggcattgccattggtagcaatgcgcaagtcattcatgtcaacagtattgcgataggtaatggttctacgaccactcgtggcgctcaaaccaattataccgcctacaacatggacgcaccgcagaactctgtcggtgaattctcagtcggtagtgcggatggtcaacgtcagatcacaaacgtcgcagctggttcagcggataccgatgcggttaacgtgggtcagttgaaagtcactgatgagcgcgtagcgcaaaatacccagtag

SEQ ID NO: 461085 - DNA, 942 bp, Shigella boydii
atgtatcaccttcgggttccacaaacagaagaagagttagagcgttactatcagtttcgctgggaaatgttgcgtaagcccctgcatcaaccaaaaggttcggaacgcgacgcgtgggatgcgatggcgcatcatcagatggtcgtcgacgagcaggggaatctggtggcggtaggccgactgtatattaatgccgacaatgaagcgtccattcgctttatggccgttcatcccgacgtgcaggacaaagggctggggacgttgatggcgatgaccctggagtcggtggcgcgtcaggaaggcgttaagcgcgtgacctgtagcgcccgtgaagacgcggtggagtttttcgccaagctggggtttgttaatcagggagaaatcaccacaccaaccaccacgccgattcgccattttttgatgattaaacctgttgccactctggatgatattttgcatcgcggcgactggtgcgcgcagctgcaacaggcgtggtacgaacacatcccgcttagtgaaaaaatgggcgtgcgcattcagcaatataccgggcaaaaatttatcaccaccatgccggaaaccggtaatcagaatctgcaccatacgctgtttgccgggagtttattctcgctggcaacgctcaccggttgggggcttatctggctgatgctgcgcgaacgccacctcggcggaacgattattctggccgatgcgcatatccgctacagcaagccgattagcggtaaacctcatgcggtagccgaccttggtgccttaagcggcgatctcgaccgtctggcgcgcggacgaaaagcacgggtgcagatgcaagttgaaatctttggcgacgagacgccgggtgcagtgtttgaaggcacgtatatcgttctgcccgcgaagccatttggcccgtatgaagagggcgggaacgaagaagagtag

SEQ ID NO: 461086 - DNA, 438 bp, Shigella boydii
atgattgcattaattcaacgcgtaacccgtgccagcgtcaccgtggagggagaagtgacgggcgaaattggcgcgggacttttggtgttattgggtgtcgaaaaggatgacgacgaacagaaagcaaaccgtctgtgcgagcgtgtgctcggctaccgcatctttagcgatgccgaaggcaagatgaatctcaacgtgcaacaggcgggcggcagtgtactggtggtttcccagtttaccctcgccgcagataccgaacgggggatgcgcccaagtttctccaaaggcgcatcaccggatcgcgcagaggcgttatatgactatttcgtcgaacgctgccgccagcaagagatgaacacgcaaacaggacgcttcgctgccgatatgcaggtatcgctggtcaatgatggccccgtgacattctggttgcaggtatga

SEQ ID NO: 461087 - DNA, 873 bp, Shigella boydii
atgctaaaaaccattcaggacaaagccaggcaccgtacccgtccactatgggcctggctaaaactactctggcaacgtattgatgaggacaacatgacaaccctggcaggtaaccttgcctatgtgtcgttgctctcattagtgccgctggttgccgttgtttttgcgcttttcgccgcttttcccatgttttccgacgtcagcattcagttacgtcactttatttttgccaactttctgcctgctactggcgatgttattcagcggtatatcgaacaatttgttgccaattccaacaagatgaccgccgttggggcgtgcgggctgatcgtcaccgcgttattgttgatgtactccatcgatagcgcgttgaataccatctggcgcagtaaacgagcgcgaccaaaaatttactcgttcgccgtgtactggatgattttaacgctggggccgctgctggcaggggccagtctggcgatcagttcctatttgctctccctgcgctgggcgagcgatctcaatactgtcatcgacaacgtgctgcgtatttttccgttgctgttgtcgtggatctccttctggttgctgtacagcattgttcctaccatccgcgtacctaaccgcgacgcgattgtcggcgcgtttgtcgccgcactcctgttcgaagcaggaaagaaaggtttcgcgctttatatcaccatgttcccgtcatatcagctcatttacggtgtgctggcggtgatccccattctctttgtttgggtctactggacatggtgtatcgtcttgcttggcgcggaaattactgtcactctcggggaataccgcaaactaaaacaagcagctgaacaagaagaagacgacgaaccatga

SEQ ID NO: 461088 - DNA, 600 bp, Shigella boydii
atgctctatatctttgatttaggtaatgtgattgtcgatatcgactttaaccgtgtgctgggagcctggagcgatttaacgcgtgttccactggctacgcttaagaagagttttcatatgggggaggcgtttcatcagcatgagcgtggggaaattagcgacgaagcgttcgcagaggcgctgtgtcatgagatggctctaccgctaagctacgagcagttctctcacggctggcaggcggtgtttgttgcgctgcgcccggaagtgatcgccatcatgcataaactgcgtgagcaggggcatcgcgtggtggtgctttccaataccaaccgcctgcataccaccttctggccggaagaatacccggaaattcgtgatgctgctgaccatatctatctgtcgcaagatctggggatgcgcaaacctgaagcacgaatttaccagcatgttttgcaggcggaaggtttttcacccagcgatacggtctttttcgacgataacgccgataatatagaaggagccaatcagctgggcattaccagtattctggtgaaagataaaaccaccatcccggactatttcgcgaaggtgttatgctaa

SEQ ID NO: 461089 - DNA, 888 bp, Shigella boydii
atgaaaactgaacgaaaaaacgagcattacctggcgctacaacaggcgtttgacgcgccatggcctgggcctgtaggagagttagtgacgctggaaaaaggcaatattcacctgcagatttatccgcatgatggtgccaggataacctcgttaaaggcatttggttctgaagtattacgccaatggcagccgcagcgcagagcttttcagtatggctgtttcccaatggtgccgtgggcagggcgactggggaatgcgatgctgaatgctggtgggcaatgttattctttacccgccaataaaccaccacatgcgttgcatggtatggcttgttactcaacgtgggaaatcatcgacaaaacagcagattccctgactttacgtatgcccctggcttcaccgtggccctggcaaggggaagtgattcagacttttttgctggagaacgatgcgctggttttgcaactggaagtccattcatatgccgatacattcccggcctccgctggctggcatccgtggtttgcgaaaaagctgactccgcaaaatacagaatcgttgcaggtgctttttgatgcggactggcaagaagaagcgggtagtgatgaactgccaactggaaatcgtatctctcctcaagccggtccctgggatgactgttttggtttttataacggggtgaaggttaagttactgtggcctggtaaactcgcgatgaccatgatctcttctgcaaacagtctggtggtatttgataaacagcccgatgccacctgtattaacccgctgactcaggcacctaacgcaataaatctaacgccggaattggtgacaccagataggccgctggtcatcgaaactcgttggcaatttacacctgaatcttaa

SEQ ID NO: 461090 - DNA, 315 bp, Shigella boydii
atgatcctcggctacaacttaggtccgacgatgatgtttgccgtgcagccaacacttttcacccgcatgttcggtaccaaagtacgatataccggcctttcttttgcttatcaattttccgcgattcttggcggactaagcccccttatcgcctcaagtttgctggcgctagggggaggaaaaccgtggtatgtcgctctgtttttatttgctgtctcagttctttcctttgtttgcgtctggctgattgagccgaccgatgaacaagaaaccgcttcttaccgctacatcagggaacaatctcatgaaaactga

SEQ ID NO: 461091 - DNA, 2574 bp, Shigella boydii
atgcgtctcgatcgtcttactaataaattccagcttgctcttgccgatgcccaatcacttgcactcgggcacgacaaccaattcatcgaaccacttcatttaatgagcgccctgctgaatcaggaagggggttcggttagtcctttattaacatccgctggcataaatgctggccagttgcgcacagatatcaatcaggcattaaatcgtttaccgcaggttgaaggtactggtggtgatgtccagccatcacaggatctggtgcgcgttcttaatctttgcgacaagctggcgcaaaaacgaggtgataactttatctcgtcagaactgttcgttctggcggcacttgagtctcgcggcacgctggccgacatcctgaaagcagcaggggcgaccaccgccaacattactcaagcgattgaacaaatgcgtggaggtgaaagcgtgaacgatcaaggtgctgaagaccaacgtcaggctttgaaaaaatataccatcgaccttaccgaacgagccgaacagggcaaactcgatccggtgattggtcgtgatgaagaaattcgccgtaccattcaggtgctgcaacgtcgtactaaaaataacccggtactgattggtgaacccggcgtcggtaaaactgccatcgttgaaggtctggcgcagcgtattatcaacggcgaagtgccggaaggattgaaaggccgccgcgtactggcgctggatatgggcgcgctggtggctggggcgaaatatcgcggtgagtttgaagaacgtttaaaaggcgtgcttaacgatcttgccaaacaggaaggcaacgtcatcctgtttatcgacgaattacataccatggtcggcgcgggtaaagccgatggcgcaatggacgccggaaacatgctgaaaccggcgctggcgcgtggtgaattgcactgcgtaggtgccacgacgcttgacgaatatcgccagtacatcgaaaaagatgctgcgctggaacgtcgtttccagaaagtgtttgttgccgagccttctgttgaagataccattgcgattctgcgtggcctgaaagaacgttacgaattgcaccaccatgtgcaaattactgacccggcaattgttgcagcagcgacgttgtctcatcgctacattgctgaccgtcagctgccggataaagccatcgacctgatcgatgaagcagcatccagcattcgtatgcagattgactcaaaaccagaagaactcgaccgactcgatcgtcgtatcatccagctcaaactggaacaacaggcgttaatgaaagagtctgatgaagccagtaaaaaacgcctggatatgctcaacgaagaactgagcgacaaagaacgtcagtactccgagttagaagaagagtggaaagcagagaaggcatcgctttctggtacgcagaccattaaagcggaactggaacaggcgaaaatcgctattgaacaggctcgccgtgtgggggacctggcgcggatgtctgaactgcaatacggcaaaatcccggaactggaaaagcaactggaagccgcaacgcagctcgaaggcaaaactatgcgtctgttgcgtaataaagtgaccgacgccgaaattgctgaagtgctggcgcgttggacggggattccggtttctcgcatgatggaaagcgagcgcgaaaaactgctgcgtatggagcaagaactgcaccatcgcgtcattggtcagaacgaagcggttgatgcggtatctaacgctattcgccgtagccgtgcggggttggcggatccaaatcgcccgattggttcattcctgttcctcggcccaacgggtgtggggaaaactgagctttgtaaggcgctggcgaactttatgtttgatagcgacgaggcgatggtccgtatcgatatgtccgagtttatggagaaacactcggtgtctcgtctggttggtgcgcctccgggatatgtcggttatgaagaaggtggctacctgaccgaagctgtgcgtcgtcgtccgtattccgtcatcctgctggatgaagtggaaaaagcgcatccggatgtcttcaacattctgttgcaggtactggatgatggtcgtctgactgacgggcaggggagaacggtcgacttccgtaatacggttgtcattatgacctctaacctcggttccgatttgattcaggaacgcttcggtgaactggattatgcgcacatgaaagagctggtgctcggtgtggtaagccataacttccgtccggaattcattaaccgtattgatgaagtggtggtcttccatccgctgggtgaacagcacattgcctcgattgcgcagattcagttgaaacgtctgtacaaacgtctggaagaacgtggttatgaaatctacatttctgacgaggcgctgaaactgctgagcgagaacggttacgatccagtctatggtgcacgtcctttgaaacgtgctatccagcagcagatcgaaaacccgctggcacagcaaatactgtctggtgaattggttccgggtaaagtgattcgcctggaagttaatgaagaccggattgtcgctgtccagtaa

SEQ ID NO: 461092 - DNA, 732 bp, Shigella boydii
atgagtaagctgattgtcccgcagtggccgctgccaaaaggtgttgcggcctgtagctctacccgtatcggcggcgtgagcttgccaccttacgactctctcaaccttggcgctcattgtggtgataacccggagcacgtagaggagaatcgcaagcaactttttgctgcgggaaatttgccttcaaaaccggtctggcttgagcaggtacacggcaaagatgtgcttaagctcactggcgaaccttatgcctcaaaacgggcggatgcctcttatagcaatacgcccggcacggtttgcgcagtgatgactgccgactgcctccctgtgctgttttgcaatcgagcgggaacggaagtcgccgccgttcatgctggctggcgtggactgtgcgcaggcgtgctggaagagacggtttcctgttttgctgataaacctgaaaacattctcgcctggttagggccggcaattggtccacgcgcgttcgaagtgggggcggaggttcgcgaggcgtttatggcagtagacgctaaagcaagtgcagctttcattcagcatggtgataagtatctggcggatatttatcagcttgcccggcagcgtctggcgaacgtgggtgttgagcaaattttcggcggcgaccgttgtacatatacggaaaatgagactttcttctcttatcgtcgcgacaagaccaccggtcgtatggcaagtttcatttggctgatataa

SEQ ID NO: 461093 - DNA, 981 bp, Shigella boydii
atggcacaacgagtacagctcactgcaacggtgtccgaaaaccaactcggtcaacgcttagatcaggctttggccgaaatgttcccggattattcacgttcgcgaataaaagaatggatcctcgaccagcgcgtgctggtaaacggcaaagtttgtgataagccgaaagaaaaagtattgggtggcgagcaggttgccatcaacgctgagattgaagaagaagcgcgttttgaaccgcaggatatcccgctggatattgtctatgaagatgaagatatcatcgtcattaataaaccgcgcgacctggtggtacatcctggcgcgggtaacctggatggcacggtactgaatgcgttgcttcattattatccgcccattgccgatgtaccgcgtgcgggcatcgtccatcgtctggataaagacaccactggcctgatggttgtggcaaaaaccgttccggctcagacgcgtttagtcgaatctttgcaaaggcgtgaaattactcgtgagtatgaagcggtggcaattggtcatatgaccgctggcggtacagtagatgaaccaatcagccgccacccgaccaaacgtactcacatggcggtgcatcccatgggcaaaccggcggtcactcactatcgcatcatggaacacttccgtgtgcacacgcgtctgcggttgcgtctggaaaccggacgtacgcaccagatccgcgtgcatatggcgcatattacccatccgctggtgggcgatccggtttatggtggccgtccgcgtccgccaaaaggtgcttcggaagcgtttatctccacgctgcgtaagtttgaccgccaggcgcttcatgcaactatgctgcgtctttatcacccgatctccggcatcgaaatggaatggcatgcgcctattccagaagatatggtggagttgattgaggttatgcgcgccgatttcgaagagcataaggatgaagtggactggttatga

SEQ ID NO: 461094 - DNA, 738 bp, Shigella boydii
atgacgcgcatgaaatatctggtggcagccgccacactaagcctgtttttggcgggttgctcggggtcaaaggaagaagtacctgataatccaccaaatgaaatttacgcgactgcacaacaaaagctgcaggacggtaactggagacaggcaataacgcaactggaagcattagataatcgctatccgtttggtccgtattcgcagcaggtgcagctggatctcatctacgcctactataaaaacgccgatttgccgttagcacaggctgccatcgatcgttttattcgccttaacccgacccatccgaatatcgattatgtcatgtacatgcgtggcctgaccaatatggcgctggatgacagtgcgctgcaagggttctttggcgttgaccgtagcgatcgcgatcctcaacatgcacgagctgcgtttagtgacttttccaaactggtgcgcggctatccgaacagtcagtacactaccgatgcaaccaaacgtctggtattcctgaaagatcgtctggcgaaatatgaatactccgttgccgagtactatacagaacgtggtgcatgggttgccgtcgttaaccgcgtagaaggcatgttgcgcgactacccggatacccaggctacgcgtgatgcgctgccactgatggaaaatgcataccgtcagatgcagatgaatgcgcaagctgaaaaagtagcgaaaatcatcgccgcaaacagcagcaatacataa

SEQ ID NO: 461095 - DNA, 3162 bp, Shigella boydii
atggatacccaacgattccaatcccaatttcattggcatttatcgtttaaattttctggcgcgatagcagcgtgcttgtctctgtctcttgtgggaacagggcttgctaatgctgatgattcgcttccttccagtaactatgcgccgcccgccgggggaacattctttttgcttgctgacagcagttttagcagcagtgaagaggcgaaagtgcgactggaagcgccggggcgtgattatcggcgctatcagatggaagagtacggcggcgtggacgttcgcctgtatcgtattcctgacccgatggcatttttgcgccagcagaaaaacctgcatcgcattgtggtgcaaccgcaatatctgggcgacgggctgaacaatacgctgacctggctgtgggataactggtacggcaaatctcgccgcgtaatgcagcgtactttctcttctcagtcacggcagaatgtgactcaggcattacccgaattacatctcggcaatgccattattaaaccttcccgttatgtacagaacaaccagttttccccgctgaaaaaatatcccttggtggaacagttctgttatccactatggcaggctaaaccggtcgagccgcagcaaggggtaaaactggaaggcgcatccagcaatttcatctcgccgcagccgggtaacatttatattcctctcggccaacaagagccgggactgtacctcgtcgaggcgatggttggtgggtatcgggcgacgacggtggtgtttgtttccgataccgtggctcttagcaaagtgtcaggcaacgagcttctggtgtggaccgcgggtaaaaaacagggtgaagcgaagcccggctcagagatcttgtggactgacggtcttggcgtgatgacccgcggtgtgaccgatgacagcggtaccttgcagttacaacatatatcgccagaacgttcatacattctgggtaaggatgctgaaggcggcgtttttgtctccgagaacttcttctacgaaagcgaaatctacaacacccgcttgtatatttttaccgatcgcccgctatatcgcgcaggcgatcgtgtcgatgttaaagtgatgggccgcgagttccacgatccgttgcattcatcccccatcgtcagcgccccggcgaagctttcggtgctggacgctaacggcagtctgttgcaaaccgtcgatgtcacgctggatgcgcgcaatggcgggcagggaagtttccgcctgccagaaaatgccgttgccggaggttatgagttacgtcttgcttaccgcaatcaggtctatagcagcagttttcgcgtggcaaactacatcaagccacatttcgagattggtttagctctcgacaaaaaagagttcaaaactggcgaagcggtcagcggcaaactgcaactgctctacccggatggcgagccggtaaaaaatgcccgcgtgcagttaagtttgcgcgctcagcaattatcaatggtcggtaacgatttgcgttatgccggacgtttccccgtgtcgctggaaggcagcgaaacggtgtccgacgccagcggtcatgtggcgttaaatctccccgccgccgataaaccgagccgttatttgttaaccgtctccgccagtgacggcgcggcgtatcgtgtcaccaccaccaaagagatcctcattgaacgcggtctggcgcattactcattaagtactgccgcacaatacagtaatagcggcgagtcggttgtgttccgttatgccgcgctggaatcttcaaaacaggttcctgttacgtatgaatggttgcgtctcgaagaccgcacgagccatagcggagagctaccgtcaggcggcaaatcctttaccgtcaatttcgctaaacctggcaactacaatctgacattacgcgataaagacggcttaattctcgctgggttaagttatgccgtcagcggtaagggcagcacggcgcatacgggtacggtagatatcgtggcggataaaacgctgtaccagccaggcgaaaccgcgaagatgctgattacctttccggagccaattgatgaagcattattgacgctggaacgcgatcgcgtggaacagcagtcgctgctttcgcatccggcaaactggctaacgctacaacgtttaaacgatacccagtatgaagcccgggttccagtgagcaattcctttgcgcctaacatcactttttcggtgctgtatacccgtaatggtcagtacagttttcagaacgccgggatcaaagttgccgttcctcagcttgatatccgggtgaaaacggacaaaacccattaccagcttggtgaactggtcaatgtcgaattaacctcgtcgctgaaaggtaaacctgtttctgcgcagctaacggtaggcgtggtcgatgaaatgatctacgcgctgcaaccagaaatcgcgccgaatatcggcaaatttttctatccgctggggcgtaacaatgtgcgtaccagctccagtctgtcgtttatcagctacgaccaggcgctctccagcgagccggttgcgcctggcgcaactaaccgcagcgagcggcgagtaaaaatgcttgaacgtccacggcgtgaagaggtggataccgcggcatggatgccgtcactcacaaccgataaacaaggcaaagcgtatttcacgttcctgatgcctgattcgttaacccgctggcgtatcaccgcgcgtgggatgaacggcgacgggctggtcgggcaggggcgtgcttatctgcgttcggaaaaaaatctctacatgaagtggagtatgccaacggtgtatcgcgtgggcgacaaaccggcggcaggactgtttatcttcagtcagcaggataacgaaccggtggcgctggtgactaaatttgcaggcgctgagatgcgccagacgctgacgctgcacaaaggggcgaattatatttcgctggcgcagaatattcagcaatctggcttgttaagtgcagaactgcaacaaaatgggcaagtgcaggacagcattagcacaaaactgtcttttgtggacaacagcaggcccgttgaacagcagaaaaatgtcatgctcggcggtggcgagaacgcgctgatgttgcccgctcagtctcgcctggcgttcgcttgccgatcatcaaagtgccgccgctaa

SEQ ID NO: 461096 - DNA, 765 bp, Shigella boydii
gtgcgcacagttgataactatatcgccctgctctgttcgttgttacgttttgcgtatcagtcgggatttatatcaaccaaaccatttgaaggagtaaaaaaattacagcgaaacagaataaaacctgacccgttatctaaaacagaattcaatgcattaatggaaagtgaaaaaggacagagccaaaacttgtggaaatttgccgtttactccgggcttcgtcacggggaactggcagctctggcgtgggaggatgtggatttcgagaagggaattgtgaatgtcagaagaaacctgacgatacttgatatgttcggtcccccaaaaacaaatgccgggatccggacggtaacattactgcagccggctcttgaagcactgaaggagcaatacaaactgaccgggcatcatcgcaaaagcgaaatcactttttatcatcgggagtacggcagaactgaaaagcaaaaactgcattttgttttcatgcccagggtgtgtaacgaaaaacagaaaccttattactcggtaagcagtttgggtgcaagatggaatgcagcagtaaaacgtgctggtattcgccgccgtaatccgtaccatacgcgacatacttttgcctgctggctgttgacggcaggagcgaacccggcatttatagccagccagatggggcatgaaactgcgcaaatggtgtatgaaatttacggtatgtggattgatgacatgaacgacgaacagatagccatgttgaatgcgcggttatcgtag

SEQ ID NO: 461097 - DNA, 936 bp, Shigella boydii
atgcaagaaaatcaacaaattacaaagaaagaacaatacaacctgaacaaattacaaaaacgtctacgtcgtaacgtgggcgaagccattgctgacttcaatatgattgaagaaggcgatcgcatcatggtttgcctctcagggggtaaagacagctataccatgctggagattctgcgcaatttgcagcaaagcgcgccaatcaatttttcgctggtggctgttaacctcgatcaaaagcaaccgggcttcccagaacacgttctgcccgtgtatcttgaaaagctgggcgttgagtacaagattgtcgaagagaacacttacggtatcgtgaaagagaagattccagagggcaaaaccacttgctcactgtgttctcgccttcgtcgcggtatcctttatcgtaccgcaacggaactgggggcgacgaagatcgcgctgggtcaccatcgtgacgatatcctgcagacgttgttcttaaatatgttctacggcggcaagatgaaaggtatgcctccgaaactgatgagcgatgatggcaaacatatcgttattcgtccgctggcctactgccgcgagaaagatattcagcgatttgccgatgcaaaagcgttcccgattattccgtgcaacctgtgcggttcacagcctaacctgcaacgtcaggtgattgctgacatgttgcgtgactgggataaacgttatccagggcgtatcgagacgatgttcagcgcgatgcagaatgtggtgccgtcgcatctgtgcgataccaacctgttcgatttcaaaggcatcacccacggttctgaagtggttaacgggggtgatctggcgtttgatcgcgaagagatcccactacaaccggcgggctggcagccagaagaagaggaaaatcagttggatgagttacggctgaatgtggttgaagtgaaataa

SEQ ID NO: 461098 - DNA, 1374 bp, Shigella boydii
gtgaccgctttttctaccctgaatgttttgcctcccgcccaactcacgaaccttaatgagttgggttatttaactatgacgccggtgcaggccgccacgcttccggcgatccttgccggaaaagatgttcgcgtgcaggcgaaaaccggcagcggcaaaacggcggcttttggcctcggcttgttacagcaaattgatgcgtcgctatttcaaacccaggctttagtgctgtgtcctacgcgtgaactggcggatcaggtggcaggtgaattgcgtcggctggcgcgttttctgccaaataccaaaattttgacgttgtgcggtggtcaaccgttcggtatgcagcgtgattcgttgcaacatgcgccgcatattatcgtggcaacgccgggtcgtttgctggatcacttgcaaaaaggcacggtatcactggatgcgctgaatactttggtgatggatgaggccgaccgcatgctggatatgggatttagcgatgccattgatgatgtcatccgttttgcgcctgcatctcgacagacgcttctgttttcggcaacctggccggaagccatcgccgtaatcagcggacgagtgcaacgcgatcctttggcgattgaaattgactcaacagatgctttgccacccattgaacaacaattttatgagacatccagcaaaggcaaaattcctctgttgcaacggttattaagcttgcatcagccatcctcttgcgtggtgttttgcaataccaaaaaagattgccaggctgtctgcgacgcgctgaatgaagtagggcaaagtgcattgtcattacacggcgatttggagcaacgcgatcgcgatcagaccctggtacgttttgctaacggtagcgcccgtgtactggttgcgactgatgttgctgcgcgtggtctggatattaaatcgcttgagctggtggtgaactttgagctggcgtgggaccctgaagttcatgtacatcgcatcggccgtacagctcgtgcaggaaatagcggtctggcgatcagtttctgtgctccggaagaagcacagcgggccaatatcatttctgacatgttgcagataaaacttaactggcaaacgccgccagctaatagttccattgtgccgctggaagcagaaatggcaacgttgtgtatcgatggcgggaaaaaagccaaaatgcgcccgggtgatgtattaggtgcactgacaggagatatcgggcttgatggcgcagatattggcaaaatcgccgtgcatccggcgcatgtctatgtcgcggtccgtcaggctgttgctcataaagcatggaaacagttacagggcgggaagattaaaggaaaaacgtgccgggtgcggttattaaaataa

SEQ ID NO: 461099 - DNA, 174 bp, Shigella boydii
atgacgacacttatttatttgcaaattcctgtccctgaaccgattcctggcgatcctgttccagtgcccgatccgatccctcgcccgcaacccatgcctgacccaccacccgatgaagaaccgattaaattgtcgcatcgtgagcgtagatctgcgaggatacgcgcctgctaa

SEQ ID NO: 461100 - DNA, 984 bp, Shigella boydii
gtggaagcgattaagggatcggacgttaatgtcccggatgcagtatttgcctggatgctggatggtagaggcggcgttaaaccgctggaaaatacagatgtgattgatgaagcgcatccctgctggctccaccttaattatgtacaccatgatagcgcccaatggctggcgacaacaccgctgcttcccaataacgtacgtgatgcgctggcaggcgagagcacacggccccgagtcagccgtctcggtgaaggcacgctgattacattgcgctgtataaacggcagcaccgatgaacgccccgatcaactggtcgccatgcgtgtatatatggacgggcggttaattgtttcgacccgacaacgcaaagtgctggcgctggacgatgtggtgagcgatctggaagagggcacgggtccgaccgattgcggagggtggctggtggatgtgtgcgatgcgttgaccgatcattccagcgaatttatcgagcagctgcacgataaaattatcgaccttgaagataatctccttgatcagcaaattccaccgcgtggattcctggctctgctgcgcaaacaattaatcgtgatgcgtcgctatatggcaccgcaacgtgatgtttatgctcgtcttgccagtgaacgtttgccgtggatgagcgatgaccaacgccgtcggatgcaggatattgccgatcgccttgggcgcggtcttgacgaaatcgacgcctgtatagcacggactggcgtgatggcggatgaaatcgctcaggtgatgcaggaaaatttagctcgtcgtacctatacaatgtcattgatggcaatggtctttttacccagtacctttctgacagggttatttggcgtcaaccttggtgggatccctggcggcgggtggcaattcggattttcaatcttttgtattctgttagttgttcttattggtggtgttgctttatggttgcatcgtagtaaatggttgtaa

SEQ ID NO: 461101 - DNA, 2286 bp, Shigella boydii
atgaatcagaatctgctggtgacaaagcgcgacggtagcacagagcgcatcaatctcgacaaaatccatcgcgttctggattgggcggcagaaggactgcataacgtttcgatttcccaggtcgagctgcgctcccacattcagttttatgacggtatcaagacctctgacatccacgaaaccattatcaaggctgccgcagacctgatctcccgtgatgcgccggattatcagtatctcgccgcgcgcctggcgatcttccacctgcgtaaaaaagcctacggccagtttgagccgcctgcgctgtacgaccacgtggtgaaaatggtcgagatgggcaaatacgataatcatctgctggaagactacacggaagaagagttcaagcagatggacacgtttatcgatcacgaccgtgatatgaccttctcttatgctgccgttaagcagctggaaggcaaatatctggtacagaaccgcgtgaccggcgaaatctatgagagcgcccagttcctttatattctggttgccgcgtgcctgttctcgaactacccgcgtgaaacgcgcctgcaatatgtgaagcgtttttacgacgcggtttccacatttaaaatttcgctgccgacgccaatcatgtccggcgtgcgtaccccgactcgtcagttcagctcctgcgtactgatcgagtgcggtgacagcctggattccatcaacgccacctccagcgcgattgttaaatacgtttcccagcgtgccgggatcggcatcaacgccgggcgtattcgtgcgctgggtagcccgattcgcggtggtgaagcgttccataccggctgcattccgttctacaaacatttccagacagcggtgaaatcctgctctcagggcggtgtgcgcggcggtgcggcaacgctgttctacccgatgtggcatctggaagtggaaagcctgctggtgttgaaaaacaaccgtggtgtggaaggcaaccgcgtgcgtcatatggactacggggtacaaatcaacaaactgatgtatacccgtctgctgaaaggtgaagatatcaccctgttcagcccgtccgacgtaccggggctgtacgacgcgttcttcgccgatcaggaagagtttgaacgtctgtataccaaatatgagaaagacgacagcatccgcaagcagcgtgtgaaagccgttgagctgttctcgctgatgatgcaggaacgtgcgtctaccggtcgtatctatattcagaacgttgaccactgtaatacccatagcccgtttgatccggccatcgcgccagtgcgtcagtctaacctgtgcctggagatagccctgccgaccaaaccgctgaacgacgtcaacgacgagaacggtgaaatcgcgctgtgtacgctgtctgctttcaacttgggcgcaattaataacctggatgaactggaagagctggcaattctggcggttcgtgcacttgacgcgctgctggattatcaggattacccgatcccggccgccaaacgtggagcgatgggtcgtcgtacgctgggtattggtgtgatcaacttcgcttactacctggcgaagcacggtaaacgctactccgacggcagcgccaacaacctgacgcataaaaccttcgaagcgattcagtattacctgctgaaagcgtctaatgagctggctaaagagcaaggcgcgtgcccgtggtttaacgaaaccacttacgcgaaagggatcctgccgatcgatacctataagaaagatctggatgccatcgctaatgagccgctgcattacgactgggaagcattgcgtgaatcaatcaaaacgcacggcctgcgtaactccacgctttctgccctgatgccgtccgagacctcttcgcagatctctaacgccactaacggtattgaaccgccgcgcggttacgtcagcatcaaagcgtcgaaagacggtattttgcgccaggtggtgccggactacgagcacctgcacgacgcctatgagctgctgtgggaaatgccgggtaacgatggctacctgcaactggtaggtatcatgcagaaatttatcgatcagtcgatctctgctaacaccaactacgatccgtcacgtttcccgtcaggaaaagtgccgatgcagcagttgctgaaagacctgctcaccgcctacaaattcggggtcaaaacgctgtattatcagaacacccgtgacggcgctgaagacgcgcaggacgatctggtaccgtcaatccaggacgatggctgcgaaagcggcgcatgtaagatctga

SEQ ID NO: 461102 - DNA, 1131 bp, Shigella boydii
atggcatataccaccttttcacagacgaaaaatgatcagctcaaagaaccgatgttctttggtcagccggtcaacgtggcccgctacgatcagcaaaaatatgacatcttcgaaaagctgatcgaaaagcagctctctttcttctggcgtccggaagaagttgacgtctcccgcgaccgtatcgattaccaggcgctgccggagcacgaaaaacacatttttatcagcaacctgaaatatcagacgctgctggattccattcagggtcgtagtccgaacgtggcgctattgccgcttatttctattccggaactggaaacctgggtcgaaacctgggcgttctcagaaacgattcattcccgttcctatactcatatcattcgtaatatcgttaacgatccgtctgttgtgtttgacgatatcgtcaccaacgagcagatccagaaacgtgcggaagggatctccagctattacgatgaactgatcgaaatgaccagctactggcaccttctgggcgaaggcacccacaccgttaacggtaaaaccgtaaccgttagcctgcgcgagctgaagaaaaaactgtatctttgcctgatgagcgttaacgcgctggaagcgatccgcttctacgtcagctttgcttgttcctttgcctttgcagaacgcgaattgatggaaggcaacgccaaaattattcgcctgattgcccgcgacgaagccctgcacctgaccggcacccagcatatgctgaatctgctgcgcagcggcgcggacgatcctgagatggcggaaattgccgaagagtgtaagcaggagtgctatgacctgtttgttcaggcagctcaacaggagaaagactgggcggattatctgttccgcgacggttcgatgattggtctgaataaagacattctctgccagtacgttgaatacatcaccaatatccgtatgcaggcagtcggtttggatctgccgttccagacgcgctccaacccgatcccgtggatcaacacttggctggtgtctgataacgtgcaggttgctccgcaggaagtggaagtcagttcttatctggtcgggcagattgactcggaagtggacaccgacgatttgagtaacttccagctctga

SEQ ID NO: 461103 - DNA, 255 bp, Shigella boydii
atggcccgcgttaccctgcgcatcactggcacacaactgctgtgccaggatgaacacccttcccttctggcagcgctggaatcccacaatgtggcggttgagtaccagtgtcgcgaaggttactgcggctcctgtcgcacacgcctggttgcaggtcaagttgactggattgccgaaccgttagcctttattcagccgggggaaattttgccctgttgttgccgggcaaaaggcgatattgaaatcgagatgtga

SEQ ID NO: 461104 - DNA, 405 bp, Shigella boydii
gtgcctaagatcgtttttggtgaagcggtgaaaattgagggtgaatggcgagcgttgctggtgactgaagatatggcggggttcatcagcattgctgactggtatgcccagcatgcagtatcgccttattctgacgaagtacggcaagccatgttgaaagcagtggcgctggcgtttaagaaaatgcatagcattaatcgtcagcatggctgttgttatgttcgccatatctatgtgaaaacagaaggtaaggcagaagctggttttcttgacctggagaaaagtcgtcgccgcttgcgtcgcgataaagcgattaatcatgacttccgccagctggaaaaatatctggagccaatccccaaagcggactgggagcaggtgaaagcgtattactacgccatgtaa

SEQ ID NO: 461105 - DNA, 225 bp, Shigella boydii
atggcagtttcagcaaagtacgacgaatttaatcactggtgggcaacagagggcgactgggttgaagagcctaactatcgccgtaatggtatgagcggggtgcaatgcgtcgagcgcaacggcaaaaagctgtatgtaaagcgcatgacgcatcatctgtttcattctgtacgttatccgttcggccgaccaacgattgtccgtgaggttgcggtaattaaataa

SEQ ID NO: 461106 - DNA, 300 bp, Shigella boydii
atggacacctcacttgctcatgagaacgcccgcctgcgggcactgttgcagacgcaacaggacactatccaccagatggctgaatacaaccgcctgctctcacagcggatggcggcttatgcttccgaaatcaaccgactgaaggcgctggttgcgaaactgcagcgtatgcagttcggtaaaagctcagaaaaacttcgcgcaaaaaccgaacggcagattccattttcacgggcgatctacgccacacaggctctgggttgcagtgactgctccattaaggcgattttgaactcataa

SEQ ID NO: 461107 - DNA, 1413 bp, Shigella boydii
atgaatatatcagaaacactgaactcagcaaatacccaatgcaatatagattctatggataacagattacatacattatttccaaaagtgacatcagtgcgaaacgctgcacaacaaactatgccagatgaaaaaaatttaaaagatagtgcaaatattattaaagatttctttaggaaaactatagcagcacagagttatagtagaatgttctctcaaggctctaactttaaatctttaaatatagcaattgatgcaccatcagacgctaaagcctcatttaaggctattgagcaccttgacagattatcgaagcattatatatctgaaataagggaaaaacttcatcctctttctgcagaggaactcaatttgctttcgctaattattaattctgatttaatcttcagacatcaaagtaattctgatttgtctgataaaattttaaacattaagtcattcaataaaattcagtctgaaggaatatgcacaaaacgaaacacatacgctgatgatataaaaaaaatagctaatcatgactttgtgttttttggcgttgaaatctctagccatcagaaaaaacaccccctgaatacaaaacatcacactgttgattttggtgcaaatgcgtatatcattgatcatgactctccatatggatatatgacattaaccgatcactttgataatgctattccacctgttttttaccatgagcaccaatcatttttagataaattttcagaggttaataaagaagttagtcgatacgtacatggaagtaaaggaattatagatgtaccaatattcaatactaaagatatgaagttagggctcggattatacctgattgactttattagaaaaagtgaagaccaaagcttcaaggagttttgctatggaaaaaatcttgcccctgtggatctggatagaatcataaactttgtttttcagccagagtaccatatacctaggatggtaagtacagaaaacttcaaaaaagttaagattagagaaatatccttagaggaggctgttacagcatctaattacgaagaaattaacaagcaggtcactaacaaaaaaattgctctccagactctttttctttcgattactaatcaaaaagaggatgtcgccttatatatattatctaattttgagataactagacaagatgttatttccataaagcatgagttgtatgatattgagtatctacttagcgctcataattcaagctgtaaagtacttgagtattttatcaataagggattggttgatgtaaacacaaagttcaaaaaaactaatagtggggattgtatgttggataacgcaataaaatatgagaatgcagaaatgataaaactattattgaaatatggtgcaacatctgacaataaatatatttaa

SEQ ID NO: 461108 - DNA, 1698 bp, Shigella boydii
atgccatcagtaaatttaatcccatcaaggaaaatatgtttgcaaaatatgataaataaagacaacgtctctgttgagacaatccagtctctattgcactcaaaacaattgccatatttttctgacaagaggagttttttattaaatctaaattgccaagttaccgatcactctggaagacttattgtctgtcgacatttagcttcctactggatagcacagtttaacaaaagtagtggtcacgtggattatcatcactttgcttttccggatgaaattaaaaattatgtttcagtgagtgaagaagaaaaggctattaatgtgcctgctattatttattttgttgaaaacggttcatggggagatattattttttatattttcaatgaaatgatttttcattccgaaaaaagcagagcactagaaataagtacatcaaatcacaatatggcattaggcttgaagattaaagaaactaaaaatgggggggattttgtcattcagctttatgatcccaaccatacagcaactcatttacgagcagagtttaacaaatttaacttagctaaaataaaaaaactgactgtagataattttcttgatgaaaaacatcagaaatgttatggtcttatatccgacggtatgtctatatttgtggacagacatactccaacaagcatgtcctccataatcagatggcctaataatttacttcaccccaaagttatttatcacgcgatgcgtatgggattgactgagctaatccaaaaagtaacaagagtcgtacaactatctgacctttcagacaatacgttagaattacttttggcagccaaaaatgacgatggtttgtcaggattgcttttagctttacaaaatgggcattcagatacaatcttagcatacggagaactcctggaaacttctggacttaaccttgataaaacggtagaactactaactgcggaaggaatgggaggacgaatatcgggtttatcccaagcacttcaaaatgggcatgcagaaactatcaaaacatacggaaggcttctcaagaagagagcaataaatatcgaatacaataagctgaaaaatttgctgaccgcttattattatgatgaagtacacagacagatacccggactaatgtttgctcttcaaaatggacatgcagatgctatacgcgcatacggtgagctcattcttagcccccctctcctcaactcagaggatattgtaaatttgctggcctcaaggagatatgacaatgttcccggacttctgttagcattgaataatggacaggctgatgcaatcttagcttatggtgatatcttgaatgaggcaaaacttaacttggataaaaaagcagagctgttagaagcgaaagattctaatggtttatctggattgtttgtagccttgcataatggatgtgtagaaacaattattgcttatgggaaaatacttcacactgcagaccttactccacatcaggcatcaaaattactggcagcagaaggcccaaatggggtatctggattaattatagcttttcaaaataggaattttgaggcaataaaaacttatatggaaataataaaaaatgaaaatattacacctgaagaaatagcagaacacttggacaaaaaaaatggaagtgattttctagaaattatgaagaatataaaaagctga

SEQ ID NO: 461109 - DNA, 123 bp, Shigella boydii
atggaataccggacctggatcactgaagctttacgccttcatttcgaagaacatttaccacgggttgtggccggacgtcgcctgggcgtaccaaaatcaactgtctgtggtatgttcgtgtga

SEQ ID NO: 461110 - DNA, 273 bp, Shigella boydii
atgtcacacaacctggagcaccagaaagtccacaccagaatggtgaaagaggttctgaaagccgtcgccagagccaataatcacccttataagtccgtatttgcagactttatcaccggtcatccctcctgcacggtctgtttctgggaaaccttccacaaaatgtacccggattcaccgtacgaatacgtcacgttctgccatacctgccgtcgttttgatttatacgaaacagaagcggagatgaaggcggatgacccgaagtggtggtga

SEQ ID NO: 461111 - DNA, 381 bp, Shigella boydii; identical to SEQ ID NO: 458903

SEQ ID NO: 461112 - DNA, 840 bp, Shigella boydii
gtgataacagatgtctggaaatataggggcaaatccacccagagcattactaacctgaacaatcaggtcactaatctggatactcgcgttactaatatcgaaaacggtattggcgacattgtcaccaccggtagcaccaagtacttcaagaccaacaccgatggcgtagatgccaacgcccagggtaaagatagcgttgctattggttctggttccattgctgccgctgacaacagcgtcgcactgggtaccggttccgttgcagaggaagaaaatacaatctctgtaggttcttctactaaccaacgccgtatcaccaacgtagctgccggtgttaatgccaccgatgcggttaacgtgtcgcagctgaaatcttctgaagcaggcggcgtgcgctacgacaccaaagctgatggttctatcgactatagcaatatcaccctcggtggtggcaacggcagtacgactcgtatcagcaacgtctccgctggcgtcaacaacaacgacgcggtgaactacgcgcagttgaagcaaagcgtgcaggaaacgaagcaatacaccgatcagcggatggttgagatggataacaaactgtctaaaactgaaagcaagttgagcggtggtatcgcttctgcaatggcaatgaccggtctgccgcaggcttatacaccgggtgccagcatggcttctattggtggcggtacttacaacggtgaatcggcagttgctttaggtgtatcgatggtgagcgccaatggtcgttgggtctacaaattacaaggtagtaccaatagccagggtgaatactccgccgcactcggtgccggtattcagtggtaa

SEQ ID NO: 461113 - DNA, 1656 bp, Shigella boydii
atgaatctctggcaacaaaactacgatcccgccgggaatatctggctttccagtctgatagcatcgcttcccatcctgtttttcttctttgcgctgattaagctcaaactgaaaggatacgtcgccgcctcatggacggtagcaatcgcccttgccgtggctttgctgttctataaaatgccggtcgctaacgcgctggcctcggtggtttatggcttcttctatggtttgtggcccatcgcgtggatcattattgcagcagtgttcgtctataagatctcggtgaaaaccgggcagtttgacatcattcgctcgtctattctttcgataacccctgaccagcgtctgcaaatgctgatcgtcggtttctgtttcggcgctttccttgaaggagccgcaggctttggcgcaccggtagcaattaccgccgcattgctggtcggcctgggttttaaaccgctgtacgccgccggactgtgcctgattgttaacaccgcgccagtggcatttggcgcgatgggcattccaatcctggttgccggacaagtaacaggcatcgacagttttgagattggccagatggtggggcgtcagctaccgtttatgaccattatcgtgctgttctggatcatggcgattatggacggctggcgcggtatcaaagagacgtggcctgcggtcgtggttgcgggcggctcgtttgccatcgctcagtaccttagctccaacttcattgggccggagctgccggacattatctcttcgctggtatcactgctctgcctgacgctgttcctcaaacgctggcaaccagttcgcgtattccgcttcggtgacttgggggcgtcacaggttgatatgacgctggcccacaccggttacaccgcgggtcaggtgttacgtgcctggacaccgttcctgttcctgaccgctaccgtaacactgtggagcatcccgccgtttaaagccctgttcgcatcgggtggtgcgctgtatgagtgggtgatcaacattccggtgccgtacctcgataaactggttgcccgtatgccaccagtggtcagcgaggctacagcctatgccgccgtgtttaagtttgactggttctctgccaccggcaccgccattctgtttgctgcactgctctcgattgtctggctgaagatgaaaccgtctgacgctatcagcaccttcggcagcacgctgaaagaactggctctacccatctactccatcggcatggtgctggcgttcgcctttatctcgaactattccggactgtcatcaacactggcactggcactggcgcacaccggtcatgcattcaccttcttctcgccgttcctcggctggctgggggtattcctgaccgggtcggatacctcatctaacgccctgttcgccgcgctgcaagccaccgcagcacaacaaattggcgtctctgatctgttgctggttgccgccaataccaccggtggcgtcaccggtaagatgatctccccgcaatctatcgctatcgcctgtgcggcggtaggcctggtgggcaaagagtctgatttgttccgctttactgtcaaacacagcctgatcttcacctgtatggtgggcgtgatcaccacgcttcaggcttatgtcttaacgtggatgattccttaa

SEQ ID NO: 461114 - DNA, 777 bp, Shigella boydii
atgattgttttacccagacgcctgtcagacgaggttgccgatcgtgtgcgggcgctgattgatgaaaaaaacctggaagcgggcatgaagttgcccgctgagcgccaactggcgatgcaactcggcgtatcacgtaattcactacgcgaggcgctggcaaaactagtgagcgaaggcgtgctgctcagtcgacgcggcggcgggacgtttattcgctggcgtcatgacacatggccggagcaaaacatcgtccagccgctaaaaacgctgatggccgatgatccggattacagtttcgatattctggaagcccgctacgccattgaagccagcaccgcatggcatgcggcaatgcgcgccacacctggcgacaaagaaaagattcagctttgctttgaagcaacgctaagtgaagacccggatatcgcctcacaagcggacgttcgttttcatctggcgattgccgaagcctcacataacatcgtgctgctgcaaaccatgcgcggtttcttcgatgtcctgcaatcctcagtgaagcatagccgtcagcggatgtatctggtgccaccggttttttcacaactgaccgaacaacatcaggctgtcattgacgccatttttgctggtgatgccgacggggcgcgtaaagcaatgatggcgcaccttagttttgttcacaccaccatgaaacgattcgatgaagatcaggctcgccacgcacggattacccgcctgcccggtgagcataatgagcattcgagggagaaaaacgcatga

SEQ ID NO: 461115 - DNA, 1191 bp, Shigella boydii
atgattatttccgcagccagcgattatcgcgccgcagcgcaacgcattctgccgccgttcctgttccactatatggatggtggtgcatattctgaatacacgctgcgccgcaacgtggaagatttgtcagaagtggcactgcgccagcgtattctgaaaaacatgtccgacttaagcctggaaacgacgctgtttaatgagaaattgtcgatgccggtagcactggcaccggtgggtttgtgtggcatgtatgcgcgtcgtggcgaagttcaggcagccaaagcggcggacgcgcatggcattccgtttactctctcgacggtttccgtttgcccgattgaagaagtcgcgccagccatcaagcgcccaatgtggttccagctttatgtactgcgcgatcgcggctttatgcgtaacgcgctggagcgagcaaaagcagcgggttgttcgacgctggttttcaccgtggatatgccgacaccgggcgcacgctaccgtgatgcgcattcaggtatgagcggcccaaatgcggcaatgcgccgctacttgcaggcggtgacgcatccgcaatgggcgtgggatgtgggcctgaacggtcgtccacatgatttaggtaatatctcagcttatctcggcaaaccaaccggactggaagattacatcggctggctggggaataacttcgatccgtccatctcatggaaagaccttgagtggatccgcgatttctgggatggcccgatggtgatcaaagggatcctcgatccggaagatgcgcgcgatgcagtacgttttggtgctgatggaattgtggtttctaaccacggtggccgccagctggacggtgtactctcttccgctcgtgcgttgcccgctattgcagatgcggtgaaaggtgatatcgccattctggcggatagcggaattcgtaacgggcttgatgtcgtgcgtatgattgcgctcggtgccgacaccgtactgctgggtcgtgctttcctgtatgcgctggcaacagcgggccaggcgggtgtagctaacctgctaaatctgatcgaaaaagagatgaaagtggcgatgacgctgactggcgcgaaatcgatcagtgaaattacgcaagattcgctggtgcaagggctgggtaaagagttgcctacggcactggctcccatggcgaaagggaatgcggcatag

SEQ ID NO: 461116 - DNA, 720 bp, Shigella boydii
gtgaatgtcaatttctttgtcacctgtattggtgacgccctgaaatcaagaatggcacgagactccgtgctgctactggaaaaactcggctgtcgcgtaaatttcccggagaaacagggatgctgcggtcagcctgcgatcaatagcggttatatcaaagaagcgattccagggatgaaaaatctgatcgccgcactggaggataacgacgatcccattatttcaccggctggctcttgcacctatgccgtaaaaagttacccgacgtatctggcggatgaacctgaatgggcatcacgtgccgaaaaggttgccgcgcgtatgcaggatctcacctcttttattgttaataaattaggggtagtcgatgtaggtgccagtttgcaagggagagctgtgtatcacccatcttgtagcctggcccgtaagctgggagtgaaggacgagccacttacgctgctgaaaaatgtgcgtggactggagctgttgacctttgctgaacaggatacctgctgcggatttggcggcacgttctcggtcaaaatggccgaaatatccggcgagatggtgaaagaaaaggttgggcacctgatggaagtccgccctgagtatttaattggtgctgacgtgagttgcctgctgaacatcagtgggcgattacaacgggaagggcagaaagtcaaagtgatgcatattgctgaagtgttgatgagccgctga

SEQ ID NO: 461117 - DNA, 1428 bp, Shigella boydii
atgtcgatcaaaaccagtaatacagattttaagacacgcatccgtcagcaaattgaagatccgatcatgcgcaaagcggtggcaaacgcgcagcagcgtattggggcaaatcggcaaaaaatggtcgatgaattggggcactgggaggagtggcgcgatcgggccgcccagatacgtgatcatgttctgagtaatctcgacgcttatctgtacctgctctcagaaaaagtgacgcaaaacggcggttacgtctggtttgcaaaaaacaaagaagacgctacccgctacattttacaggttgcccaacgcaaaaatgcccggaaggtggtgaaatctaaatcgatggtgaccgaagagattggtgtcaatcatgtgttgcaggatgctggcattcaggtgattgaaaccgatctgggtgaatatattctccagctggatcaagatccgccatctcatgttgtggtcccggcaattcataaagatcgccatcagatccgtcgagtgctacacgaacgtctgggctatgaggggccggaaacgcctgaagcgatgaccttattcatccggcaaaaaatccgcgaagatttcctcagtgctgaaataggtattaccggctgtaatttcgcggtggcagagacaggttcggtatgcctggtgaccaatgaaggtaatgcgcgaatgtgtaccacgctgcctaaaacgcatattgcagtgatgggaatggagcgtattgcccccacgtttgccgaggtagatgtattgatcaccatgctggcgcgcagtgccgttggtgcacgtttgacgggatacaacacctggctgacaggaccgcgcgaagcggggcacattgatggtcctgaagagtttcatctggttattgtcgataacgggcgttctgaggtgctggcctctgaatttcgggatgtgctgcgctgtattcgctgcggggcttgtatgaatacttgtccggcatatcgccatattggcggtcatggatatggctctatttatccagggccaattggtgcggtgatttctccgctacttggcggctataaagattttaaagatttaccctacgcctgctctttatgcactgcttgtgacagcgtgtgtccggtgcgtattccgctgtcaaaactgattttgcgtcatcgtcgggtgatggcagaaaaagggatcaccgcaaaagcagagcaacgggcgataaaaatgttcgcttatgccaatagtcatccaggattgtggaaagtcgggatgatggccggctctcatgcggcaagctggtttatcaatggcggcaaaacaccactcaaatttggcgcgattagcgactggatggaagcacgcgatcttcctgaagctgacggagagagtttccgtagttggtttaagaaacatcaggcgcaggagaaaaagaatggataa

SEQ ID NO: 461118 - DNA, 696 bp, Shigella boydii
atggataatcgaggcgaatttttgaataacgttgctcaggcactgggtcgcccgctgcgacttgaaccgcaagcagaagatgcgccgcttaacaactatgctaacgagcggcttacccaacttaaccaacagcagcgctgtgacgcgtttattcagtttgccagcgatgttatgttgacgcgctgtgagctgaccagcgaggcgaaggcggcagaagctgcaatacgtctgtgtaaagagctgggagatcagtcggtcgtgattagcggtgacacgaggctggaggaattggggattagtgaacgtttgcagcaggaatgcaatgccgttgtttgggatccggcgaaaggtgccgagaatatctcgcaggcagagcaggctaaagtgggtgttgtgtatgctgaatatggtttaaccgaatcgggaggcgtggttcttttttccgccgccgagcgcgggcgttcattgagcctgctcccggaatcttctctttttatcctgcgtaaaagcacaatcctgccgcgtgtagcgcaactcgcagaaaaattgcatcagaaagcgcaggccggtgaacgaatgccgtcctgcattaacatcattagcggccctagttcaacggcggatattgagcttatcaaagtcgtcggggttcatggcccggtgaaagcggtgtatctgattattgaggattgctga

SEQ ID NO: 461119 - DNA, 1275 bp, Shigella boydii
ttgcgacagtctcgtcatcgtcgcccgttaccggagcatctgccccgcgaaataaatcgcctggagccagaagaaagctgttgcccggagtgtggcggtgagctggattatctgggggaagtcagcgcagaacaactggaactggtgagcagcgctctgaaagtgatccgcacagaacgggtaaaaaaagcctgtacaaaatgtgactgcatcgttgaagcaccggcaccatcccgtccgatagagcgtggtatcgcgggcccggggttacttgcccgcgtgttaacgggaaaatactgcgaacacctgccactgtatcgtcagagtgaaatttttgcccgtcagggtgtcgaactgagccgtgcattactctccaactgggttgacgcgtgctgccagttaatgacgccgctgaatgatgctctgtaccgttatgtgatgaacagccgcaaagttcacactgatgacacaccagtaaaagtgctggcaccgggcaggaagaaggcgaaaacaggatatatctggacgtatgtccgggatgacaggaatgccggttcgccagagcctccggcggtctggttcgcctactcaccggaccatcagggtaaacatccggagcagcaccttagtcccttccggggtatcctgcaggcagatgcgtttaatggttacgatcggctgttcagtgccgaacgagaaggcggcgcgttgacggaagcaggatgctgggctcatgcgcggcgcaaagtccacgatgtatatatcagtaccaaaagcgcgacagcggaagaagccctgaaactaatcggtgagctgtacgccatcgagcacgaaatacgcgggttgccggtgtctgaacgcctggcggtcaggcaaatgcagagtaaaccgctactgacttccctgtataagctgatgcaggagaaagaacacacgttatcgaaaaaatgccgtctgagagatgcgttccggtatatcaggaagcactgggttgcgttgtgcaacttcagtgatgatggtctggctgaggcggataataatgccgcggaaagagcgcttcgtgcagtctgtctcggaaagaaaaactttatgttcttcggcagcgatcacggtggagagcgtggtgcgctactgtacgggctgatcggcacctgccgactgaacggtatcgatccggaagcgtatctgcgctatatcctgagcgtactgccggaatggccttccaaccgtgttgacgaactcctgccatggaacgtagcactcaccaataaataa

SEQ ID NO: 461120 - DNA, 1800 bp, Shigella boydii
atgacgacacaggtcccaccttccgcgttgcttccgttgaacccggagcaactggcacgccttcaggcggccacgaccgatttaacgcctacccagcttgcctgggtttctggctatttctggggcgtactcaatcagcagcctgctgcgcttgcagcgacgccagcgccagccgcagaaatgccgggtataactattatctccgcctcgcaaaccggcaatgcgcgccgggttgctgaagcattacgcgatgatttattagcagcaaaactgaacgttaagctggtgaacgcgggcgactataaattcaaacaaatcgccagcgaaaaactgctcatcgtagtgacgtcaacgcaaggggaaggggaaccgccggaagaagccgtcgcgctgcataagttcctgttctccaaaaaagcgccaaagctggaaaacaccgcgtttgccgtgtttagcctcggcgatagctcttatgaatttttctgccagtccgggaaagatttcgacagcaagctggcggaactgggtggtgaacgcctgctcgaccgtgtcgatgccgatgttgaataccaggctgctgccagcgagtggcgcgcccgcgtggttgatgcgcttaaatcgcgtgcgcctgtcgcggcaccttcgcaatccgtcgctactggcgcggtaaatgaaatccacgccagcccgtacagcaaagacgcgccgctggtggctagcctctctgttaaccagaaaattaccgggcgtaactctgaaaaagacgttcgccatatcgaaattgacttaggtgactcgggcctgcgttaccagccgggtgacgcgctgggcgtctggtatcagaacgatccggcactggtgaaagaacttgtcgaactgctgtggctgaaaggcgatgaacctgtcaccgtcgagggcaaaacgttgcctctgaacgaagcgctacagtggcacttcgaactgaccgtcaacaccgccaacattgttgagaattacgccacgcttacccgcagcgaaacactgctgccgctggtgggcgataaagcgaagttacagcattacgccgcgacgacgccgattgtcgacatggtgcgtttctctccggcgcaactggatgccgaagcgctgattaatctgctgcgcccgctgaccccgcgcctgtattccatcgccacctcgcaggcggaagtcgagaacgaagtacacgtcaccgttggtgtggtgcgttacgacgtggaaggccgagcccgtgccggtggtgcctccagcttcctcgcggatcgcgtggaagaagagggcgaagtccgcgtatttatcgaacataacgataactttcgcctgcccgctaacccggaaaccccggtgattatgattggcccaggcaccggtattgcgccgttccgcgcctttatgcagcaacgcgccgccgacgaagcgccaggtaaaaactggctgttctttggtaatccgcactttacggaagacttcctgtaccaggtggagtggcagcgctacgtcaaagatggcgtgctgacacgtatcgatcttgcctggtcgcgcgaccaaaaagaaaaagtttacgtacaagacaaactgcgcgaacagggcgcggagctgtggcgctggatcaatgatggtgcccacatttatgtctgcggcgacgctaatcgcatggcgaaagacgttgagcaggcacttctggaagtgattgccgaatttggtggcatggacaccgaagcggcggatgaatttttaagtgagctgcgcgtagagcgccgttatcagcgagatgtctactaa

SEQ ID NO: 461121 - DNA, 1713 bp, Shigella boydii
atgagcgaaaaacatccagggcctttagtggtcgaaggaaaactgacagacgccgagcgcatgaagcttgaaagcaactacctgcgcggcaccattgcggaagatttaaacgacggtctgaccggcggctttaagggcgacaacttcctgctgatccgcttccacggcatgtatcagcaggatgaccgcgacatccgcgccgaacgtgctgaacagaagctggagccgcgccacgcgatgctgcttcgctgtcgtctgccgggtggggtgattaccactaaacagtggcaggcgatcgacaaatttgccggtgaaaacaccatctatggcagcattcgcctgaccaaccgccagacattccagttccacggcattctgaaaaagaacgtcaaaccggtgcaccagatgctgcactcggtcggtcttgatgcgctggcgacagctaacgacatgaaccgtaacgtactctgcacctcgaacccttacgagtcgcagctgcacgcggaagcgtacgagtgggcgaagaagatttctgagcatctgttgcctcgtacccgcgcgtatgcggagatctggctcgaccaggaaaaagtcgccactactgatgaagaaccgatccttggtcagacctacctgccgcgtaagttcaaaaccacggtagtgatcccgccgcagaacgatatcgatctgcatgccaacgacatgaacttcgtggcaatcgccgaaaacggcaagctggtaggcttcaacctgctggtgggcggtgggctttctatcgaacacggcaacaagaaaacctacgcccgcacggcgagcgagtttggctatctgccgctggagcatacgctggcggtggccgaagccgtcgtgacaactcagcgtgactggggtaaccgaaccgatcgtaaaaatgccaaaaccaaatacacgctggagcgcgtgggggttgagacgtttaaagcggaagtggagcgtcgcgcggggatcaaatttgaaccgatccgtccatatgagttcaccggacgaggcgatcgtattggctgggttaagggcattgatgataactggcacctgacgctgtttatcgaaaatggtcgcatccttgattatcccgggcgtccgctgaaaaccggcctgctggagatcgcgaagatccacaaaggcgatttccgcattacggcgaaccagaatctgatcatcgccggtgtaccggaaagcgagaaagcgaagatcgagaagatcgccaaagagagcgggttaatgaatgccgtcacgccgcagcgtgaaaactcgatggcctgcgtgtcattcccgacttgcccgctggcgatggcggaagcagagcgtttcctgccgtcttttatcgacaacatcgataatttaatggcgaaacatggtgtcagcgatgagcatatcgtgatgcgtgtaacaggctgcccgaacggttgtggtcgcgcgatgctggcggaagtgggcctggtgggtaaagcgccgggtcgctacaacctgcatcttggcggcaaccgcattgggacacgtatcccacggatgtataaagaaaacatcaccgagccggaaatcctggcgtcgcttgatgaactgatagggcgctgggcgaaagagcgcgaagcgggtgaaggcttcggcgactttacggtgcgtgcgggcatcattcgcccggtgctcgatccggcgcgcgatttgtgggattaa

SEQ ID NO: 461122 - DNA, 735 bp, Shigella boydii
atgtccaaactcgatctaaacgccctgaacgaactgccgaaggtagatcgcattctggcgctggcggaaactaacgccgaactggaaaaactggacgctgaaggccgcgtagcctgggcgctggataatctgcccggtgaatatgtactttcttccagctttggcattcaggcggcggtgagcctgcatctggtgaatcaaattcgcccagatattccggtgatcctcaccgatacgggttacttgttcccggaaacctaccgctttattgacgagttaacggacaaactcaagctcaacctgaaagtgtaccgtgctaccgaaagcgcagcctggcaggaagcacgctacggaaaactgtgggagcagggcgttgaaggcattgaaaagtacaatgacatcaacaaagtcgaaccgatgaaccgggctctgaaagaacttaacgcgcaaacctggtttgctggcctgcgccgtgaacaatccggcagtcgcgccaatttaccggtgctggcaattcagcgtggcgtatttaaagtgctgccgattatcgactgggataaccgaactatttatcagtacctgcaaaaacatggcctgaaatatcacccattatgggatgaaggatatttatcggtcggtgatacccatacaacccgtaaatgggaacctggcatgtcggaagaagaaacacgtttctttggcttaaaaagggaatgtggattgcacgaagggtaa

SEQ ID NO: 461123 - DNA, 153 bp, Shigella boydii
atgctgacaaaatatgcccttgtggcaatcatagtgctgtgttttacagtactgggattcacgctgatggtaggcgactcgttgtgtgagttgagtatcagagaacgtggtatggagtttaaggcagttctcgcttacgaatcgaagaagtag

SEQ ID NO: 461124 - DNA, 447 bp, Shigella boydii
atgacaaatcgtgaagagtggttaagtgcaaaaattgcctacatcaacggactgaaatcaccatcagagcagcagagattacttgtgttactggcagagaaaaaaaaccgaacaacgacggatgaaaaaacattgttcgcactgatacgggcagaaaaaaccgcagagaaagcagccgcagcaaaagccagagtaacggcaatcatagcggcagaacggaaggcagccgcaagggcggaacgaaaggcgcgggatcatgaactctacaaggccgcaggcctcatgattgtggcaggactggtggacagcaaaaccggaaagccaaagtttagtgctgccgaactggtaggcgcactcgcaggaatcgcagagctaccgcacaaccatccaaaatggcaggaatgggaaaaacgcgggaaagagctactcaccaaaaacagtgcgtaa

SEQ ID NO: 461125 - DNA, 936 bp, Shigella boydii
atgagcgccgcgcttcaatacttcgaagaaaatttaccccaccgtccctatcacacggatgatctcgctttcggtcttcgtatctccggcaaagggcgtgcgctgcttgctcgctacatccagcaaaatcagcctcatgcgcagttctggctggtttttgacgttgaccgagtaggagctgcgattgactggagcgaccggaacgcccccgcgccgaacatcaccgtaaaaaatcccgagaacgggcacgctcacctgctctacgcgctcaatcttgccgtgagaaccgcgcctgatgcgtcggttaaggcgctgaaatacgccgctgcaattgaacgtgcgctgtgtgagaaacttgacgcagatgtgaactacagcggactgatttgcaaaaatccgttccacctggaatggcaggtgatggagtggcgcgaggaagcctacgccctcgatgaactggctgattatctcgatttgagagcctcagagcgtcgtagcgtcgataaacattacgggctggggcgaaactgccatctgttcgaaatgacgcgcaaatgggcttacagggcgattcgtcagggctggccagcattctcacagtggcttgatgctgtgattcagcgtgtcgaaatgtacaacgcatcgcttcccgttccgctttctccgcctgaatgtcgggctattggcaagagcattgcgaaatacacgcacaggaacttcacgccggaaagtttcgcacagtatgtggctgatacgcacacaccagaaatacaggccaagagaggccggaaaggtggcatcgctaaaggcgaagcctacgatgacaagcgtttcatggcgctatgtatgctggagaatggatattctcagaaagctattgcggcgatgctgaatgtacatcgtaatacgatccgtaattgggcaatgcacaaatag

SEQ ID NO: 461126 - DNA, 267 bp, Shigella boydii
atggaatccatacataccgataaaccgacttactatgtttgtgctcaacgtcttacgcagttcgaaaagatttcgcaccagttcacctttttctggatgagaaagtttgctgttttgacctgttcgctgttcaaaacgagtgaaaccggacatgaatcgctttcgtgcatagttatgcagccccctgaaaacaattctggcgcgtttttttggtctggcctgttgtttccctgtctttttacgttttttgcgccagaaagcgactga

SEQ ID NO: 461127 - DNA, 1110 bp, Shigella boydii
atgggaaaaatgaatattaactttaaacatatccttcctttattgtcgtcattttttatttcaggatgcgactctgatggaataagcaaagtaaagtctttcgtatattacgacattgacgactcaatgactgttggtaaagccttcgatacaaggagtgattgcatcaatggcacatggagtgaaaaagaggataatcgaggcagaaccatcgtcacatatacctgtgatattagtgaaagtggcctaaaaataataaattcagccattatgcaagaacctgaagataaggctgaatattctataacacaaaataacaacagcataaaatcaaccaatgaatcactagaggaatacaaacagaaaacgcctctagtggaaaaaacaaaagaggtcataatagatcatataagaaagctaaacagtgcttttaatgaagatccaatgatatatagcaaactcacaattagcccttatttagacagaatgctatatctaaaggaccataatgacaatgcgctaaatgaaatttgtggtgggtacgaatacattcaatctgccgatagttacagttggcgtgatgtaagtgaagagtatgcaaaagaatcatgcgaaaagcatatatataaagtatatcaatcgtttaagaaaaatgcatcaccattaataactaaaaacttccccggtttctacgaacgtgtccccccctgtgagaacgcagatgaatgcataaaaaaaacaaatatatactttgatgataactttctaaatatctacaaaagaagccaagatagagcacctcaaataatttctaatttaaaaaaacacaatatagaaataggtgaaaagttaaatgattgtataaaaaaactaaatatctcagatgtcaaattaacctattactggtttgtaacagacaccggaggtgttgattatttagatgggatgttgacatataattttcagggaaagaatagggctgaaaactttcataaacaactattgcaatatgcatacattaactacagcaaaaatcaaatacctcgggactttgtaacatcaataaaaaatagtatttattataaaatagaagattgcactaagttttag

SEQ ID NO: 461128 - DNA, 132 bp, Shigella boydii
atgcgacatgagttactggcagaaatggcgcaggaacggcagcaacaggaggaaaaagcactgcgtatacagcgatcctggtccaggggggcatcacgtagtaacgaacgtgatcaagatatggagcgttga

SEQ ID NO: 461129 - DNA, 189 bp, Shigella boydii
atgaaggtgaatgatcgggtaacagtcaaaacggatggcggtccgcgtcgtcctggcgtggtactagcagttgaggagtttagtgaaggcacaatgtacctggtttcgctggaagactacccgctcggcatctggttctttaatgaagcagggcatcaggacggtatctttgtggagaaagcagagtaa

SEQ ID NO: 461130 - DNA, 228 bp, Shigella boydii; identical to SEQ ID NO: 1612

SEQ ID NO: 461131 - DNA, 816 bp, Shigella boydii
atgttttcaattcaacaaccactactggtttttagcgatcttgatggcaccctgctggacagtcatagttatgactggcaaccggctgccccctggctcagccgtttacgcgaagcgaatgttcccgtcattctctgtagcagtaaaacttcagcggaaatgctgtacttgcaaaaaacgttggggttacaaggggtaccactgattgccgaaaatggcgcagtgatccagcttgctgaacaatggcaggatatagacggttttccacgcatcatctcaggtattagccatggcgaaatcagccaggttttaaatacgctacgcgagaaagaacattttaaattcacgactttcgatgatgtcgacgatgcaaccatcgccgaatggacgggattaagccgtagccaggcggcgctgacgcagctgcatgaggcgtcggtaacgctaatctggcgcgacagtgacgagcgtatggcacaatttaccgctcgtctgaacgaactgggcttacagtttatgcagggtgcgcgcttctggcacgtcctggatgcctctgccggaaaagatcaggccgccaactggattatcgcgacctatcaacaattatcaggcaaacgcccaaccacacttggcctgggcgatgggccaaacgatgcgcccttactggaggtaatagattacgcggtgattgtgaaagggctaaaccgtgaaggggtgcatctgcatgatgaggatccggcccgcgtctggcgaacgcagcgtgaaggaccggaaggatggcgtgaagggctggaccattttttctccgctcgttaa

SEQ ID NO: 461132 - DNA, 1695 bp, Shigella boydii
gtgcagcacgagacaaaaatggaaaaccagagctggttgaaaaaaatcgcacgccgcctggggcctggtcatgtcgttaatctctgctttatcgtggtattgcttttttccaccttgctgacctggcgtgaagtggtagtgctggaagatgcctatatctccagccagcgtaatcatctggaaaacgtagccaacgcgctcgataagcatttgcagtataacgtcgacaaactgatctttttgcgtaatggcatgcgcgaagctctcgtagcgccactggatttcacttcactgcgtaatgctgtaaccgagttcgaacagcatcgcgacgagcacgcctggcaaattgaactcaaccgacgacgcaccctgtcagtcaatggcgtatcggatgcattagtcagcgaggggaatctcctgtctcgcgaaaatgaaagcctcgacaatgaaattaccgctgcactggaagttggttacttgctgcgactggcgcacaacacctcgtcgatggttgaacaggcgatgtatgtctcgcgtgccggattttacgtttcgacgcagccgaccttgtttacgcgcaatgtaccaacgcgttattacggctatgtcacccaaccctggtttatcggccattcgcaacgagaaaatcgtcaccgcgcggtacgctggtttacttcgcaaccggaacacgccagcaatactgaaccgcaggttaccgtcagtgttccggtagacagtaataactactggtatggcgtgctggggatgagtattcccgtgcgtaccatgcagcaatttttaagaaacgccatcgataaaaacctcgatggtgagtatcagctctatgacagtaagctgagatttttgacctcttccaatcctgaccatccaacagggaatatttttgatcctcgtgaactggccttgctggcgcaggcgatggaacatgacacgcggggcggcattcgtatggacagtcgctatgttagctgggaacgtctggaccatttcgacggtgtgctggtgcgcgtccatacgctaagcgaaggcgtgcgcggcgatttcggcagtatcagcattgcattaaccctgctgtgggcgctctttaccaccatgttactcatctcctggtatgtgattcgccggatggttagcaacatgtatgttctgcaaagctcgttgcagtggcaggcgtggcacgacaccttaacccgtttatataatcgtggcgcactgtttgaaaaagcccgtccgctcgcgaaattgtgtcagacgcaccaacatcctttttctgtcattcaggtcgaccttgaccattttaaagcgattaatgaccgctttagtcatcaggcgggcgaccgtgttctttctcatgctgccggattaattagcagttccttgcgtgcgcaggacgttgccgggcgggtcggtggtgaggagttttgtgtgattctgccaggcgcgagtctgacggaggctgcggaagtcgcagaacgtattcgcctgaagttaaatgaaaaagagatgttgattgctaagagtacgacgatacgcatcagtgcctcgttgggggtaagtagcagcgaggaaaccggtgattatgattttgaacaactccagtcactggctgaccgtcggctttatctcgctaaacaggccgggcgtaatcgggtatgcgcgagcgataacgcttaa

SEQ ID NO: 461133 - DNA, 183 bp, Shigella boydii
atgagctttatggttagtgaggaagttacggttaaagagggcggcccgcggatgattgtcaccggatactccagcggtatggttgagtgtcgttggtatgacggttacggggtcaagcgggaagcttttcatgaaaccgagcttgttccgggggaggggagtcgttctgcggaagaagtttga

SEQ ID NO: 461134 - DNA, 918 bp, Shigella boydii
atgcttttggccgggagtagtttactgacgttgctcgatgatatcgccacactactggacgatatctccgtgatgggcaaactggcggcgaagaaaaccgccggtgtattaggggatgacttatcgctcaatgcgcaacaagtttcaggcgtgcgggccaaccgggaacttcccgtggtctggggcgtggcgaaaggatcgctgattaataaagtgattctggtgccgctggcgctgatcatcagtgcgtttatcccgtgggcgattacgcctctgttgatgattggtggcgcgtttctctgctttgaaggagtagagaaagtgctgcatatgctggaggcgcgtaaacataaagaagatccggcgcagagccagcagcgtctggagaagctggcggcgcaggatccgctgaagtttgaaaaggacaaaataaaaggggcgattcgtaccgattttatattgtctgccgaaatcgtcgccatcacgctggggattgtggccgaagcgccgttgcttaatcaggtgctggtgctttcaggcatcgcgctggtagtgaccgtgggcgtctacggtctggtaggggttatcgttaagattgatgacctggggtattggctggcggaaaaatccagcgcgctgatgcaggcattaggtaaagggttattgatcattgcgccctggctgatgaaagcgttatcgattgtcggcacgctggcgatgttccttgtcggcggcgggattgtggtacatggtattgcgccgctgcatcacgccattgaacatttcgccgggcagcaaagtgcagtggtggcgatgatattaccgactgttttaaatctgattcttggatttatcatcggcggcatagtggtgctgggagtgaaagccgtagcgaaaatacgcggtcaggcacattaa

SEQ ID NO: 461135 - DNA, 381 bp, Shigella boydii; identical to SEQ ID NO: 4987

SEQ ID NO: 461136 - DNA, 990 bp, Shigella boydii
gtgagagcactactgacccctgaaattgccccgcgtatggggatcgtattgttcagaccaggttcagagctgatgcccctgtttatgcaggggcgtgtcctgctggagcctgagccggagcgttattcatctttcgccagtggtgccgttccggcggcatcacaaccgctggcggatgatcctgccgttcgggccgtgttccgcaatgaggaagtgatccgtcgtgctggtggcgtggaatgtcttgaaagctggttacttcgtgaaaaaggctgccagtggcctcattccgactggcacagcgagaacatgaccacaatgcgacacgctccgggtgcaatccgtctgtgctggcactgtgacaatcttctccgtgaccagttcacggaacggctggaatcaatggcaacggataactgtgcccgctgggtgttgtctgttgtgcgtcgggatctcggttttgatgacagtcacgttgtgacaatgccggaactgtgctggtggctgattcgtaatgatctggcggatgccttaccggaaagtgcagcccgtaaggcactgagattaccgaagcctgttgtgccgactgttacccgggaaagtgatcttgtgccttcggttcctgccaccagcatcatccaggataaggcgaaaaaggtgctggcgctgaaagtggatccggagtcgccggagtcttttatgttacgcccaaaacgtcgccgctgggttaatgaaaagtacacgcgctgggttaagacacagccgtgtgcatgttgtggaaagcccgctgatgatccccaccacctgataggtcacggtcagggtggaatgggaacaaaagcgcatgacctttttgtgttgcctttgtgcagaaaacaccatgacgaactgcatgcggataccgtggcatttgaagagaagtatggctcccaactggagctgatatttcgttttatcgatcgcgcgctggcgattggtgtgctgtcctga

SEQ ID NO: 461137 - DNA, 810 bp, Shigella boydii
atgaataatctgatggtcattgatggtattgaagttcgtcgtgatgcttatgggcgttacagcctgaacgatctgcatcgcgcagcagtagcatctggtgcaaatgccagaaccaaggagccgggaaagtttatttccagccaacaaactgttgagcttgtttatgaattgaccaacacccagaatttgggtgttgacccggtgagtatgattcatgggggaaatgaacggggaacgtatgtctgcaaggaactggtgtatgcctatgcaatgtggatcagcccgtcattccatctgaaggtgatccgtactttcgacatggtaaccagcgcaccggaaaaattatccggacaggctgctgacaagatgcaggctggtgtgattctgctggactttatgcgccgggaattaaacctgtctaactcttcagtgcttggtgcctgtcagaaactccaggaggctgttggcttaccgaatctggcaccgcgctatgccattgatgctcctgctgacgcgcctgatggctcaagtcgccccacgctgtcgctgagtgcactgctgaaacagtatggtatccgccttacggctaatcaggcatatcaccagatggttaagctggggatcgtcgagcagcgcgaacgatacagccgtaccgcgattaacaacatcaaaaaattctggtcgctgacagcgaaaggctgcatgttcggcaagaacatcacctgtcctgcaaatccgcgcgagacgcagccgcatttcttcgaatcccgattccctgagctgttaaagctgctcgataccgttcattga

SEQ ID NO: 461138 - DNA, 390 bp, Shigella boydii
atgaagctaatactgccttttccgcccagcgtgaacacgtactggcgacaccccaacaaaggggcgtttgctggtaagagcctgataagcgcggcggggcgaaaattccagagcgcggcgtgcgcagcaatagttgagcagttacgtcgtctgccgaaaccaacgtcggcacctgcttcagtggagatcgtgttgtttcctccggataaccggatccgcgatctggacaactataacaaggcgctgtttgacgccctgacccacgcgggtgtgtgggaagacgacagtcaggtgaaaagaatgctggtggagtggggaccggttatcccgaaagggaaggtcgagatcactatcagtaagtacgagaaaacggcgggtgcagccgcctga

SEQ ID NO: 461139 - DNA, 654 bp, Shigella boydii
atgagtaataaatattgccaggcgctggtggaactgcggaacaaaccagcccatgaactgaaggaagtgggcgatcagtggcgcacgccggacaacattttctggggaattaacaccttgtttggtccgtttgttctggatctgttcactgacggtgataacgccaaatgtgccgcgtattacacggcggaagacaacgcgctggcgcatgactggtcagaacgtcttgcggagcttaaaggtgctgcctttggcaatcccccgtacagccgcgccagtcagcatgaggggcaatacatcatcggcatgcgttacatcatgaagcatgccagtgccatgcgtgataaaggcgggcgctatgttttcctgatcaaagctgccaccagcgaagtgtggtggccggaagatgcagatcatattgcttttattcgcgggcgtattggttttgaactgcctgcctggtttatcccgaaagacgaaaagcaggtgccaacaggtgctttcttcgctggtgctattgctgttttcgacaagacctggaagggaccggcaatcagctacatcgggcgcgatgaacttgaggcatgtggtgaggcatttctggcgcaggttcgccagcaggcggaaaaactggtcagggagatggtggcatga

SEQ ID NO: 461140 - DNA, 489 bp, Shigella boydii
atgagtcttttgaatgaagttcagaaattcattgaagcccatccggggtgtacttccggagacattgcggatgcttttgcaggttactcacggcagtgcgttctgcagtcagcaagcaaattacgtcagagtggtcgtgtggctcaccgttgtgaaggggatacacgcagacatttcccgcgcctgactgagagagcgcaggaggcggaaccgcaaccagttcgtgaaaccagacctgtgcgcaatttctatgtcggcactaacgacccgcgggagattttgtgcctgacccgccaggcggaagaactggagtccaggggcttataccgtcgtgctgcaacggtgtggatggcggcattccgtgaaagccactcccagccagaacgaaacaattttctggcgcgtcgtgagcagtgtttacggaaaagcagtaagcgcgctgtatcgggtgatgagtggtatctgtcagggaattacgtgggggcttaa

SEQ ID NO: 461141 - DNA, 825 bp, Shigella boydii
atgagtatggagctgatggttaaagcgatgaaaattcgagtgggaaatccattgcgaaaactggttctgattaagctggctgataatgccagcgatcagggtgagtgctggcccagctaccagcatattgctgaccagtgcgagattagcaaacgttctgtgatgaatcatattgcggccctttgtgagtccgggctggtaaaaaaagtcacccggaaaggtgaaaaaggtaactcaagtaatatctatctccttcatcttgatggtgcaggagattcactagggggtagtgcaaataattcactatctggtgcagcaaattcaccaggtagtgcaggagttgcaccaaggggtagtgcaggagattcacccagaaccagtcactcttttgaaccagtcaaagaaccagtcaatgaaccaatagctgttggtgcatcagttgatgagtccgtgcgagttcgttcaaaccgaccggaatactctccggagtttgagcaggcatggctggcatatcccaaacgtgctggtggcaattcaaaatctgcagccttcaaagcctggaaagcccgtttgaacgagggggtaaaccccgaaaccatgctggaaggtgtgaaacgctacgcgggctgggtatctgcgatgggcaatagcggcacacaatttgtgaaacaggctgtcacgttctttggtccagatcgtcatttcgaagaatcctgggaagttcctgcggtatctgcagccagacgcgaggacccgtacttcaaagccagttacgacaacgtggactacagccagatcccggcaggattcagggggggattatga

SEQ ID NO: 461142 - DNA, 225 bp, Shigella boydii
atgatccggaatattttcaaacggtttaccaatcagactttccgttgtcctcgtccgggtcagtggtacaccacgcctgcagggcatgttctacgtgttagcctggttgaccgtgaatgtcagaaggtgatttgtgaaccgctgggccgtaattaccgcatcagtatgccgcttatagcctttcgctccggaaaaaacatgaagcatctcggaggtgctgcatga

SEQ ID NO: 461143 - DNA, 303 bp, Shigella boydii; identical to SEQ ID NO: 459543

SEQ ID NO: 461144 - DNA, 765 bp, Shigella boydii
atgcaaaaagcacaacggatcattaaaacctatcgacgtaatcgaatgattgtttgtacgatttgcgcactcgttacgctcgcttcgaccctgagcgtgcgatttatttcacagcgtaacttaaatcaacaacgggtagtacaattcgccaatcacgctgtagaggaattagataaagtactgcttcccctacaggcaggtagcgaagtcttgcttccgctgattgccctgccctgctctgtcgcccatttgccattacgtaaacaggcggcaaaactccaaactgtgcgatccattggcctggtgcaagacggcacactctattgctccagcatttttggttatcgcaatgtgcccgtcgtggacattctggctgaacttcctgcaccgcaaccacttttacgcctgacgatcgaccgtgccctgattaaaggcagtccggttttgattcaatggacgcctgcagcgggcagtagcaatgctggggtcatggagatgattaacatcgacttactgacggcaatgctccttgagccacaactgcagcaaatcagtagcgccagcctgacggtggacaaacggcatttgctctatggtaatgggctggtagattcccttccgcaacctgaagacaatgaaaactatcaggtttcttcgcaacgctttccttttaccattaacgttaatggtccgggggctacggcgctggcatggcactatcttccaacacaattaccgctggcggtgctgctaagtttgaggtag

SEQ ID NO: 461145 - DNA, 1365 bp, Shigella boydii
gtgattagtctattcgacatgtttaaggtggggattggtccctcatcttcccataccgtagggcctatgaaggcgggtaaacagttcgtcgatgatctggtcgaaaaaggcttactggatagcgttactcgcgttgccgtggacgtttatggttcactgtcgctgacgggtaaaggccaccacaccgatatcgccattattatgggtcttgcaggtaacgaacctgccaccgtggatatcgacagtattcccggttttattcgcgacgtagaagagcacgaacgtctgctgctggcacagggacggcatgaagtggatttcccgcgcgacaacgggatgcgttttcataacggcaacctgccgctgcatgaaaacggtatgcaaatccacgcctataacggcgatgaagtcgtctacagcaaaacttattattccatcggcggcggttttatcgtcgatgaagaacactttggtcaggatgctgccaacgaagtaagcgtgccgtatccgttcaaatctgccaccgaactgctcgcgtactgtaatgaaaccggctattcgctgtcaggtctcgctatgcagaacgaactggcgctgcacagcaagaaagagatcgacgagtatttcgcgcatgtctggcaaaccatgcaggcatgtatcgatcgcgggatgaacaccgaaggtgtactgccaggcccgctgcgcgtgccacgtcgtgcgtctgccctgcgccggatgctggtttccagcgataaactgtctaacgatccgatgaatgtcattgactgggtaaacatgtttgcgctggcagttaacgaagaaaacgccgccggtggtcgtgtggtaactgcgccaaccaacggtgcctgcggtatcgttccggcagtgctggcttactatgaccactttattgaatcggtcagcccggacatctatacccgttactttatggcagcgggcgcgattggtgcattgtataaaatgaacgcctctatttccggtgcggaagttggttgccagggcgaagtgggtgttgcctgttcaatggctgctgcgggtcttgcagaactgctgggcggtagcccggaacaggtttgcgtggcggcggaaattggcatggaacacaaccttggtttaacctgcgacccggttgcagggcaggttcaggtgccgtgcattgagcgtaatgccattgcctctgtgaaggcgattaacgccgcacggatggctctgcgccgcaccagtgcaccgcgcgtctcgctggataaggtcatcgaaacgatgtacgaaaccggtaaggacatgaacgccaaataccgcgaaacctcacgcggtggtctggcaatcaaagtccagtgtgactaa

SEQ ID NO: 461146 - DNA, 579 bp, Shigella boydii
gtggaataccgtagcctgacgcttgatgattttttatctcgctttcaacttttgcgcccgcaaattaaccgggaaaccctaaatcatcgtcaggctgccgtgttaatccccatcgtccgtcgaccgcaaccggggttgttgctgactcagcgttcaattcatctgcgtaaacacgctggacaagtggcattccctggaggtgcagtcgatgacacggacgcatcagttatcgccgccgcgctgcgcgaagctgaagaagaggtcgctataccgccttccgccgttgaagttatcggcgtgctgccgcccgtcgatagcgtaactggctatcaggtaaccccagtggtcggcattatcccacccgatctgccgtatcgcgccagtgaagatgaagtctcggcggtgtttgaaatgccgctcgcccaggcattacatctgggtcgttatcaccctttagatatctaccgccgtggcgattcacatcgggtatggctgtcctggtacgaacagtattttgtatggggaatgaccgcaggcataattcgtgagctggcgctgcaaattggtgtgaaaccctga

SEQ ID NO: 461147 - DNA, 1362 bp, Shigella boydii
atgaagacgttatctcccgctgtgattactttaccctggcgtcaggacgccgctgaattttatttctcccgcttaagccacctgccgtgggcgatgcttttacactccggctatgccgatcatccgtatagccgctttgatattgtggtcgccgagccgatttgcactttaaccactttcggtaaagaaaccgttgttagtgaaagcgaaaaacgcacaacgaccactgatgacccgctacaggtgctccagcaggtgctggatcgcgcagacattcgcccaacgcataacgaagatttgccatttcagggcggcgcactggggttgtttggctacgatctgggccgccgttttgagtcactgccagaaattgcggaacaagatatcgttctgccggatatggcagtgggtatctacgattgggcgctcattgtcgaccaccagcgtcatacagtttctttgctgagtcataatgatgtcaatgcccgtcgggcctggctggaaagccagcaattctcgccgcaggaagatttcacgctcacttccgactggcaatccaatatgacccgcgagcagtacggcgaaaaatttcgccaggtacaggaatatctgcacagcggtgattgctatcaggtgaatctcgcccagcgttttcatgcgacctattctggcgatgaatggcaggcattccttcagcttaatcaggccaaccgcgcgccatttagcgcttttttacgtcttgaacagggtgcaattttaagcctttcgccagagcggtttattctttgtgataatagtgaaatccagacccgcccgattaaaggcacgctaccacgcctgcccgatcctcaggaagatagcaaacaagcagaaaaactggcgaactcagcgaaagatcgtgccgaaaatctgatgattgtcgatttaatgcgtaatgatatcggtcgtgttgccgtagccggttcggtaaaagtaccagagctcttcgtggtggaacccttccctgccgtgcatcatctggtcagcactataacggcgcgactaccagaacagttacacgccagcgatctgctgcgcgcagcttttcctggtggctcaataaccggggctccgaaagtacgggctatggaaattatcgacgaactggaaccgcagcgacgtaatgcctggtgcggcagcattggctatttgagcttttgcggcaacatggataccagcattactatccgcacgctgactgccattaacggacaaatatactgctctgcgggcggtggaattgtcgccgatagccaggaagaagcggaatatcaggaaacttttgataaagttactaagatattacgccaactggagaagtaa

SEQ ID NO: 461148 - DNA, 180 bp, Shigella boydii
atgtttgcaggtttaccttcactcacccatgaacagcagcaaaaagctgtcgagcggatccaggaactgatggcacaagggatgagcagcggccaggcaatcgcgctggtggcagaagagctgcgtgccaaccactccggcgagcgaatcgtggcgcgttttgaggatgaagacgagtaa

SEQ ID NO: 461149 - DNA, 1125 bp, Shigella boydii
atgaatcaacaactctcctggcgcaccatcgtcggctacagcctcggtgacgtcgccaataacttcgccttcgcaatgggggcgctcttcctgttgagttactacactgacgtcgctggcgtcggtgccgctgcggcgggcaccatgctgttactggtgcgggtattcgatgccttcgccgacgtctttgccggacgagtggtggacagtgtgaatacccgctggggaaaattccgcccgtttttactcttcggtactgcgccgttaatgatcttcagcgtgctggtattctgggtaccgaccgactggagccatagcagcaaagtagtgtatgcatatttgacctacatgggcctcgggctttgctatagcctggtgaatattccttatggttcacttgctaccgcgatgacccaacaaccacaatcccgcgcccgtctgggcgcggctcgtgggattgccgcttcattgacctttgtctgcctggcatttctgatagggccgagcattaagaactccagcccggaagagatggtgtcggtataccatttctggacgattgtgctggcgattgccggaatggtgctttacttcatctgcttcaaatcgacgcgtgagaatgtggtacgtatcgttgcgcagccgtcattgaagatcagtctgcaaaccctgaaacggaatcgcccgctgtttatgttgtgcatcggtgcgctgtgtgtgctgatttcgacctttgcggtcagcgcctcgtcgttgttctacgagcgctatgtgttaaatgataccgggctgttcactgtgctggtactggtgcaaaacttggttggtactgtggcatcggcaccgctggtgccggggatggtcgcgaggagcggtaaaaagaataccttcctgattggcgctttgctgggaacctgcggttatctgctattcttctgggtttccgtctggtcactgccggtggcgttggttgcgttggccatcgcttcaattggtcagggcgttactatgactgtgatgtgggcactggaagctgataccgtagaatacggtgaatacctgaccggcgtgcgaattgaagggctcacctattcactaggtgatgctgccaacttactgatttag

SEQ ID NO: 461150 - DNA, 1812 bp, Shigella boydii
atgttacgtcctgtagaaaccccaacccgtgaaatcaaaaaactcgacggcctgtgggcattcagtctggatcgcgaaaactgtggaattgatcagcgttggtgggaaagcgcgttacaagaaagccgggcaattgctgtgccaggcagttttaacgatcagttcgccgatgcagatattcgtaattatgtgggcaacgtctggtatcagcgcgaagtctttataccgaaaggttgggcaggccagcgtatcgtgctgcgtttcgatgcggtcactcattacggcaaagtgtgggtcaataatcaggaagtgatggagcatcagggcggctatacgccatttgaagccgatgttacgccgtatgttattgccgggaaaagtgtacgtatcaccgtttgtgtgaacaacgaactgaactggcagactatcccgccgggaatggtgattaccgatgaaaacggcaagaaaaagcagtcttacttccatgatttctttaactatgccgggatccatcgcagcgtaatggtctacaccacgccgaacacctgggtggacgatatcaccgtggtgacgcatgttgcgcaagactgtaaccacgcgtctgttgactggcaggtggtagcaaatggtgatgtcagcgttgaactgcgtgatgcggatcagcaggtggttgcaactggacaaggtaccagcgggactttgcaagtggtgaatccccacctctggcaaccgggtgaaggttatctctatgaactgtgcgtcacagccaaaagccagacagagtgtgatatctacccgctgcgcgtcggcatccggtcagtggcagtgaaggacgaacagttcctgattaaccacaaaccgttctactttactggctttggtcgtcatgaagatgcggatttgcgaggcaaaggattcgataacgtgctgatggtgcacgatcacgcattaatggactggattggggccaactcctaccgaacctcgcattacccttacgctgaagagatgctcgagtgggcagatgaacatggcatcgtggtgattgatgaaactgcagctgtcggctttaacctctctttaggcattggtttcgaagcgggcaacaagccgaaagaactgtacagcgaagaggctgtcaacggggaaactcagcaggcgcacttacaggcgattaaagagctgatagcgcgtgacaaaaaccacccaagcgtggtgatgtggagtattgccaacgaaccggatacccgtccgcaaggtgcacgagaatatttcgcgccactggcggaagcaacgcgtaaactcgacccgacgcgtccgatcacctgcgtcaatgtaatgttctgcgacgctcacaccgataccatcagcgatctctttgatgtgctgtgcctgaaccgttattacggatggtatgtccaaagcggcgatttggaaacggcagagaaggtactggaaaaagaacttctggcctggcaggagaaactgcatcagccgattatcatcaccgaatacggcgtggatacgttagccgggctgcactcaatgtacaccgacatgtggagtgaagagtatcagtgtgcatggctggatatgtatcaccgcgtctttgatcgcgtcagcgccgtcgtcggtgaacaggtatggaatttcgccgattttgcgacctcgcaaggcatattgcgcgttggcggtaacaagaaggggatcttcacccgcgaccgcaaaccgaagtcggcggcttttctgctgcaaaaacgctggactggcatgaacttcggtgaaaaaccgcagcagggaggcaaacaatga

SEQ ID NO: 461151 - DNA, 579 bp, Shigella boydii
atgcagactgaagcacaaccgacacggacccggatcctcaatgctgccagagagattttttcagaaaatggatttcacagtgcctcgatgaaagccatctgtaaatcctgcgccattagtcccgggacgctttatcaccatttcatctccaaagaagccttgattcaggcgattatcttacaggaccaggagagggcgctggcccgtttccgggaaccgattgaagggattcattttgttgactatatggtcgagtctattgtctctctcacccatgaagcctttgggcaacgggcgctggtggtcgaaattatggcggaagggatgcgtaacccacaggtcgccgccatgcttaaaaataagcatatgacgatcactgaatttgttgcccagcggatgcgtgatgcccagcaaaaaggcgagataagcccagacatcaacacgtcaatgacttcacgtttactgctggatctgacctacggtgtactggccgatatcgaagcggaagatctggcgcgtgaagcgtcgtttgctcagggattacgcgcgatgattggcggtatcttaaccgcatcctga

SEQ ID NO: 461152 - DNA, 336 bp, Shigella boydii
atgatctggctaacattagtctttgccagcttgcttagcgttgccgggcagttgtgtcagaaacaggcaacctgctttgtggcgataaacaaacggcgcaaacatatcgtgctgtggctgggactggcgctggcttgtcttggtcttgccatggtgctctggctgctggtcttgcagaacgtaccggtaggcattgcctacccgatgttaagtctgaattttgtctgggtgacgctggctgcagtaaaactgtggcacgaaccggtatcgccgcgtcactggtgtggggtggcgttcattattggtggcattgtgatcctcgggagtacggtgtaa

SEQ ID NO: 461153 - DNA, 1653 bp, Shigella boydii
atgaaatcggtacgttaccttatcggcctcttcgcgtttattgcctgctattacctgttaccgatcagcacgcgtctgctctggcaacccgatgaaacgcgttatgcggaaatcagtcgagaaatgctggcatccggcgactggattgtgccccatctgttagggctacgttatttcgaaaaacccattgccggatactggattaacagcattgggcaatggctatttggcgcgaataactttggtgtgcgggcaggcgttatctttgcgaccctgttaactgccgcgctggtgacctggtttactctgcgcttatggcgcgataaacgtctggctctactcgccacagtaatttatctctcattgtttattgtctatgccatcggcacttatgccgtgctcgatccgtttattgcattctggctggtggcgggaatgtgcagcttctggctggcaatgcaggcacagacgtggaaaggcaaaagcgcaggatttttactgctgggaatcacctgcggcatgggggtgatgaccaaaggttttctcgcccttgccgtgccggtattaagcgtgctgccatgggtagcgacgcaaaaacgctggaaagatctctttatttacggctggctggcggttatcagttgcgtactgacggttctcccttggggactggcgatagcgcagcgggagcctgacttctggcactattttttctggattgagcatattcaacgctttgcactggatgatgcccaacatagagctccgttctggtactacgtgccggtcatcattgccggtagcctgccgtggctgggattactccccggtgcactgtacacaggctggaaaaaccgcaagcattccgcaaccgtctatttgttgagctggacgataatgccgctgctgtttttctccgtcgctaaaggtaaattgcccacctatattctttcctgctttgcatctctggcaatgctgatggcgcattacgctttgctggcagcaaaaaataatcctctggcgctgcggattaatggctggattaacatcgcttttggcgtcactggcattattgccacatttgtggtctccccgtggggaccaatgaacacgccggtgtggcaaaccttcgagagctataaagtcttttgtgcctggtcgattttttcgctatgggcatttttcggctggtacaccttaacaaacgtcgaaaagacctggtctttcgccgcgctttgcccgctggggctggcgttgctggtaggattttcaattcctgacagagtcatggaaggaaaacatccgcaattttttgtcgagatgacacaagaatcacttcaaccaagccgctatattcttactgatagcgtcggtgttgccgcaggtctggcatggagcctacaacgcgatgacatcatcatgtatcgccagacaggtgagttgaaatacggccttaattatccggatgcgaaagggagatttgtcagcggtgatgagttcgcaaactggcttaatcaacatcgtcaggaggggattattacactcgtgctttcggttgaccgcgatgaagatatcaacagtctcgccattccgcccgcagatgccatcgatcgtcaggagcgtctggtgctgattcagtatcgtcccaaatga

SEQ ID NO: 461154 - DNA, 891 bp, Shigella boydii
atgaccaaagtaggcttacgcattgatgtcgatacctttcgtggcacccgtgaaggcgtgccgcgtctgctggaaatcttgagtaagcataatattcaggccagcatttttttcagcgtcggcccggacaatatgggccgccatctctggcgactggtgaagccacagtttttgtggaagatgctgcgctcaaacgcggcatcgctttatggctgggatattttactggcaggtacggcctggccaggtaaagagattggtcatgccaatgccgatatcattcgtgaagcggctaaacatcacgaagtcggcctgcacgcctgggatcaccatgcctggcaagcccgtagcggtaactgggatcggcaaacaatgatcgacgatattgcacgcggtcttcgcactctggaagagattatcggtcaaccggtaacctgttctgccgctgcgggctggcgtgccgaccagaaggtgatcgaagcaaaagaagcgttccatttgcgctacaacagcgattgtcgtggggccatgccgttccgtccattgctcgaatcaggaaaccctggcactgcgcaaattccggtgaccttacccacctgggatgaagtgattggtcgggatgtgaaaacagaagattttaacggttggttactcaaccgcatcctgcgagataaaggcacgccggtttataccattcatgcagaagttgaaggctgcgcttatcagcataattttgtggatctcctcaaacgcgcagctcaggaaggcgtgacattttgccctttaagcgaactgttatcagagacgttgccgctcggacaagttgttcgcggaaatattgccggacgtgaaggctggctgggttgccaacaaattgcgggtagtcgctga

SEQ ID NO: 461155 - DNA, 1581 bp, Shigella boydii
atggtaaaacgtgccgatgctggggccattgtggcgcaactgcgcgttgccattgcgccagacgatatcgctattacgctgcatcataaattgtgccatgccgcgcgccagctactggaacagacattacccgccattaaacacggtaatattctggaaatcgcccagcgcgaaaacgaagccacctgttttggtcgcagaacgccggatgacagtttccttgaatggcataaaccggcatccgtactgcacaacatggtacgtgccgttgccgatccgtggccgagtgccttcagctatgttggcaatcagaaattcactgtctggtcgtcgcgtgttcatcctcatgccagcaaagcacagccggggagcgtgatttctattgcaccgctgttgattgcctgtggcgatggcgcgctggaaatcgtcaccggacaggcgggcgacggcattactatgcagggctcgcaattagcgcagacgctgggcctggtgcaaggttcacgcttgaatagccagcctgcctgcaccgcccgacgccgtacccgggtactcatcctcggggtgaatggctttattggcaaccatctgacagaacgcctgctgcgcgaagatcattatgaagtttacggtctggatattggcagcgatgcgataagccgttttctgaatcatccgcattttcactttgttgaaggcgatatcagtattcattccgaatggattgagtatcatgtcaaaaaatgtgatgtcgtcttgccgctggtggcgatagccacgccgattgaatatacccgcaacccgctgcgcgtatttgaactcgattttgaagagaatctgcgcattatccgctactgcgtgaagtaccgtaagcgaatcatcttcccgtcaacttcagaagtttatgggatgtgtagcgataaatacttcgatgaggaccattctaatttaatcgtcggcccggtgaataaaccacgctggatttattcggtatcaaaacaattacttgatcgggtgatctgggcctatggcgaaaaagagggtttacagttcaccctcttccgcccgtttaactggatgggaccacgactggataaccttaatgcggcacgaatcggcagctcccgcgctattacgcaactcattctcaatctggtagaaggttcaccgattaagctgattgatggcggaaaacaaaaacgctgctttactgatattcgcgatggtatcgaggcgttataccgcattatcgaaaatgcgggaaatcgctgcgacggtgaaattatcaacattggcaatcctgagaacgaagcgagcattgaggaactgggcaagatgctgctggcgagcttcgaaaaacatccgctgcgccatcatttcccaccgtttgcgggctttcgcgttgtcgaaagtagcagctactacggcaaaggatatcaggacgtagagcatcgtaaaccgagcatccgcaatgcccaccgctgcctggactgggagccgaaaattgatatgcaggaaaccatcgacgaaacgctggatttcttcctgcgcaccgttgatcttacggataaaccatcatga

SEQ ID NO: 461156 - DNA, 276 bp, Shigella boydii; identical to SEQ ID NO: 458859

SEQ ID NO: 461157 - DNA, 387 bp, Shigella boydii
atgaacgtctacgttgccgcgcctgatcacccgattcatcaggagccggaaccgttatctgaagtgacgcgcgtgaaatatcgtggaattgcggtagcggataccgctcgtgagcgcccggtgttgaccgtacagctgctggacaaacagccgcgcttaacggtgagcacgattgaagataaacgtcaggcattactggcggggcttggcgtggcgacgatgccgtatccgatggtcgaaaaagatattgcggaagggcggttgcgtgtcgtcagcccggaatcgaccagcgagatcgatattattatggcctggcgtcgtgacagtatgggggaagcgaaatcctggtgtctgcgggaaattcccaaactttttagcggaaaataa

SEQ ID NO: 461158 - DNA, 510 bp, Shigella boydii
atggccaaagaaagggcattaacgctggaagcactacgggttatggatgcgatcgatcgccggggcagttttgcggcggcggcggatgagctgggacgcgtgccttccgcacttagctacaccatgcaaaaactggaagaagagctggatgtggtgctgtttgaccgctcgggccatcgcaccaaattcaccaatgtcgggaggatgttgctggagcgagggcgcgttttgctggaagcagcagataaactgactaccgatgcggaagccctcgcgcgcggttgggaaacgcatctcaccattgtgaccgaggcgctggtaccgacacctgcctttttcccgttaatcgacaaactggcggcaaaagccaatacccaactggcaatcatcaccgaagtgctggcgggggcgtgggaacgactggagcagggggggcggatatcgttatcgcgccggatatgcattttcgttcctcgtcggagatcaactcgcgcaagctctataccttaa

SEQ ID NO: 461159 - DNA, 702 bp, Shigella boydii
atgattactacccgaactgccaggcagtgtggacaagcagactacggatggttgcaggcccggtatactttttcctttggacactacttcgacccgaaattgttaggctatgcctccctgcgtgtgcttaaccaggaagtgctggccccaggtgccgcctttcagccgcgaacctatcccaaagtcgatattttaaatgtgattctggatggagaagcagagtatcgcgacagcgaaggcaatcatgttcaggccagcgccggtgaggcgttgctgctctctacccagccgggtgtcagctacagcgaacacaatctcagcaaagacaaaccgttaacacgaatgcagctttggctggacgcctgcccgcagcgagagaatccgctgattcaaaaactggcgcttaatatgggcaagcagcaattaatcgcctcgccagagggtacgatgggaagcctgcaattacgccagcaagtgtggctgcaccatatcgtgctcgacaaaggcgaaagtgcgaatttccagttgcatgggccacgcgcgtatttgcaatcgattcacgggaaatttcatgcgcttacgcatcatgaagagaaagcggcgctgacctgcggtgatggggcgtttattcgtgacgaggctaacattacgctggttgccgattccccactgcgcgctttgctgatagatttgcctgtctag

SEQ ID NO: 461160 - DNA, 165 bp, Shigella boydii
atgagtaaaaaatcggccaaaaagcgccagccagtgaagcccgtggtggcgaaagaacctgctcgcaccgccaaaaattttggctatgaagagatgttgagcgagctggaagccatcgtcgcggatgctgaaacgcgtttagccgaggatgaagctaccgcgtaa

SEQ ID NO: 461161 - DNA, 1311 bp, Shigella boydii
atgtttgattcgactttaaatccgttatggcagcgttacatcctcgccgttcaggaggaagtaaaaccggcgctgggatgtactgaaccgatttcactggcgctggcggcggcggttgctgcggcagaactggaaggtccggttgaacgtgtagaagcctgggtttcgccaaatctgatgaagaacggtctgggcgtcaccgttcccggcacgggaatggtggggctgccgattgcggcggcgctgggggcgttaggtggaaatgccaacgccgggctggaagtgctgaaagacgcaactgcgcaggcaattgccgatgccaaagcactgctggcggcggggaaagtctccgttaagatccaggaaccttgcaatgaaatcctcttctcacgcgccaaagtctggaacggtgagaagtgggcgtgtgtcaccatcgtcggcgggcataccaacattgtgcatattgagacgcacaatagtgtggtgtttacccagcaggcgtgtgtggcagagggcgagcaagagtctccgctgacggtgctttccagaacgacgctggctgagatcctgaagttcgtcaatgaagtcccgtttgcggcgatccgctttattctcgattccgcgaagctaaattgtgcgttatcgcaggaaggtttgagcggtaagtgggggctgcatattggcgcgacgctggaaaaacagtgcgagcgcggtttgctggcgaaagatctctcttcatccattgtgattcgtaccagcgcggcatccgatgcgcgtatgggcggcgctacgcttccggctatgagtaactccggctcgggtaaccaggggatcaccgcaacaatgtctgtggtggttgtagcagaacacttcggagcggatgatgaacgactggcgcgtgcgctgatgctttctcatttgagcgcaatttacatccataaccagttaccgcgtttgtctgcactttgtgccgcaacgaccgcagcaatgggggccgccgccgggatggcatggctggtggatgggcgttatgaaactatctcgatggcgatcagcagtatgatcggcgatgtcagcggcatgatttgcgatggtgcgtcgaacagctgcgcgatgaaggtttcgaccagtgcttcggctgcgtggaaagcggtgttaatggcgctggatgataccgccgtgaccggcaatgaagggatcgtggcgcatgatgttgagcagtcgattgccaacctgtgtgcgttagcaagccattcgatgcagcaaacggatcggcagattatcgagattatggcgagcaaggccagataa

SEQ ID NO: 461162 - DNA, 1332 bp, Shigella boydii
atggaaattgcatcgaataaaggcgtcattgcagacgcttcgaccccggcgggtcgtgctggaatgagtgagagcgagtggcgagaagcgatcaaattcgacagaactgacaccggctgggtgattatgagtatcgggatggcgattggcgcggggattgtttttctcccggtgcaggtcggtttgatgggattgtgggtatttttgctctcatcggtgattggttacccggcaatgtatctgtttcagcggttgtttattaatacgctggcagaatcaccagaatgtaaagattacccgagtgtcattagcggttatttaggtaaaaactggggcatcctgttaggtgcgctctatttcgtaatgctggtgatttggatgttcgtctattccaccgccatcaccaacgatagtgcttcctatctgcataccttcggcgtgacggaagggttgctgtcagacagtcccttttatggtctggtactgatttgcattctggtggcgatctcttcacgcggcgagaaattgttattcaaaatttcgaccggcatggtgctgaccaagctgctggtagtcgctgcgctgggcgtgtcgatggtgggaatgtggcatctgtataacgtcggttcgctaccgccgctggggctgctggtgaaaaacgccattattacgctgccgtttaccctgacgtcgattctgtttatccagacgttaagcccgatggtgatctcttatcgctcgcgggaaaaatcaattgaagtggcgcggcataaagcattgcgggcaatgaatatcgcgtttggcattttatttgtcaccgtctttttctacgccgtgtcgttcacgctggcgatgggacatgacgaagcggtaaaagcctacgagcagaatatttccgcgctggcgattgccgcacagtttattagcggtgacggcgcagcgtgggtgaaagtggtcagcgtcattctcaatatctttgctgtcatgactgcattctttggcgtctatttaggctttcgcgaagcaacgcaagggatcgtaatgaacatcctgcgtcgcaagatgcctgccgagaagattaacgaaaatcttgttcagcgcggcatcatgattttcgccattttgctggcctggagcgccatcgtactgaacgcaccggtgttgagcttcacctctatctgtagcccgattttcggcatggtagggtgcctgatcccggcgtggctggtttacaaagtaccggcattgcacaaatacaaagggatgtctctgtacctgattatcgtcactggtttgttgctttgtgtttctccgttcctggcattttcttga

SEQ ID NO: 461163 - DNA, 456 bp, Shigella boydii
atggctcttccgccagaccgcacagacaggggcgcggaacgttacctgaaggatgactggcacggcctgcaactttttgccattgatggcgcacagttcaggacacctgataaacccgagctgcgtgaatattatgggtctgccaacacatccactaagcggcagaacgcctacccggttatgcgtctggtggccttaatgaacctgggaagtcacattctgctgaatgccgtgaccgcaccttaccggcagagcgaaactgtgctggcccactccatgctcgccaccatcccggataactctattacgttgtttgataagcttttttacagcgaagacctgctgctaacgctgaaccagaagggttgtaaccgccactggctactgcctgcgtggaagaatatcgcatcagaaatgatagagctgggaaacacggtaatgactccaacttattga

SEQ ID NO: 461164 - DNA, 186 bp, Shigella boydii; identical to SEQ ID NO: 11302

SEQ ID NO: 461165 - DNA, 2676 bp, Shigella boydii
atggctgttactaatgtcgctgaacttaacgcactcgtagagcgtgtaaagaaagcccagcgtgaatatgccagtttcactcaagagcaagtagacaaaatcttccgcgccgccgctctggctgctgcagatgctcgaatcccactcgcgaaaatggccgttgccgaatccggcatgggtatcgtcgaagataaagtgatcaaaaaccactttgcttctgaatatatctacaacgcctataaagatgaaaaaacctgtggtgttctgtctgaagacgacacttttggtaccatcactatcgctgaaccaatcggtattatttgcggtatcgttccgaccactaacccgacttcaactgctatcttcaaatcgctgatcagtctgaagacccgtaacgccattatcttctccccgcacccgcgtgcaaaagatgccaccaacaaagcggctgatatcgttctgcaggctgctatcgctgccggtgctccgaaagatctgatcggctggatcgatcaaccttctgttgaactgtctaacgcactgatgcaccacccagacatcaacctgatcctcgcgactggtggtccgggcatggttaaagccgcatacagctccggtaaaccagctatcggtgtaggcgcgggcaacactccagttgttatcgatgaaactgctgatatcaaacgtgcagttgcatctgtactgatgtccaaaaccttcgacaacggcgtaatctgtgcttctgaacagtctgttgttgttgttgactctgtttatgacgctgtacgtgaacgttttgcaacccacggcggctatctgttgcagggtaaagagctgaaagctgttcaggatgttatcctgaaaaacggtgcgctgaacgcggctatcgttggtcagccagcctataaaattgctgaactggcaggcttctctgtaccagaaaacaccaagattctgatcggtgaagtgaccgttgttgatgaaagcgaaccgttcgcacatgaaaaactgtccccgactctggcaatgtaccgcgctaaagatttcgaagacgcggtagaaaaagcagagaaactggttgctatgggcggtatcggtcatacctcttgcctgtacactgaccaggataaccaaccggctcgcgtttcttacttcggtcagaaaatgaaaacggctcgtatcctgattaacaccccagcgtctcagggtggtatcggtgacctgtataacttcaaactcgcaccttccctgactctgggttgtggttcttggggtggtaactccatctctgaaaacgttggtccgaaacacctgatcaacaagaaaaccgttgctaagcgagctgaaaacatgttgtggcacaaacttccgaaatctatctacttccgccgtggctccctgccaatcgcgctggatgaagtgattactgatggccacaaacgtgcgctcatcgtgactgaccgcttcctgttcaacaatggttatgctgatcagatcacttccgtactgaaagcagcaggcgttgaaactgaagtcttcttcgaagtagaagcggacccgaccctgagcatcgttcgtaaaggtgcagaactggcaaactccttcaaaccagacgtgattatcgcgctgggtggtggttccccgatggacgccgcgaagatcatgtgggttatgtacgaacatccggaaactcacttcgaagagctggcgctgcgctttatggatatccgtaaacgtatctacaagttcccgaaaatgggcgtgaaagcgaaaatgatcgctgtcaccaccacttctggtacaggttctgaagtcactccgtttgcggttgtaactgacgacgctactggtcagaaatatccgctggcagactatgcgctgactccggatatggcgattgtcgacgccaacctggttatggacatgccgaagtccctgtgtgctttcggtggtctggacgcagtaactcacgccatggaagcttatgtttctgtactggcatctgagttctctgatggtcaggctctgcaggcactgaaactgctgaaagaatatctgccagcgtcctaccacgaagggtctaaaaatccggtagcgcgtgaacgtgttcacagtgcagcgactatcgcgggtatcgcgtttgcgaacgccttcctgggtgtatgtcactcaatggcgcacaaactgggttcccagttccatattccgcacggtctggcaaacgccctgctgatttgtaacgttattcgctacaacgcgaacgacaacccgaccaagcagactgcattcagccagtatgaccgtccgcaggctcgccgtcgttatgctgaaattgctgaccacctgggtctgagcgcaccgggcgaccgtactgctgctaagatcgagaaactgctggcatggctggaaacgctgaaagctgaactgggtattccgaaatctatccgtgaagctggcgttcaggaagcagacttcctggcgaacgtggataaactgtctgaagatgcattcgatgaccagtgcaccggcgctaacccgcgttacccgctgatctccgagctgaaacagattctgctggatacctactacggtcgtgattatgtagaaggtgaaactgcagcgaagaaagaagctgctccggctaaagctgagaaaaaagcgaaaaaatccgcttaa

SEQ ID NO: 461166 - DNA, 648 bp, Shigella boydii
gtgattcagaccttttttgattttcccgtttacttcaaatttttcatcgggttatttgcgctggtcaacccggtagggattattcccgtctttatcagcatgaccagttatcagacagcggcagcgcgaaacaaaactaaccttacagccaacctgtctgtggccattatcttgtggatctcgctttttctcggcgacacgattctgcaactttttggtatatcaattgattcgttccgtatcgccgggggcatcctggtggtgacgatagcgatgtcgatgatcagcggcaagcttggcgaggataaacagaacaagcaagaaaaatcagaaaccgcggtacgtgaaagcattggtgtggtgccattggcgttgccgttgatggcggggccaggggcgatcagttctaccatcgtctggggtacgcgttatcacagcattagctatctgtttggtttctttgtggctattgcattgttcgctttatgttgctggggattgttccgcatggcaccttggctggtacgggttttacgccagaccggcatcaacgtgattacgcgtattatggggctattgctgatggcattggggattgaatttatcgttactggtattaaggggattttccccggcctgattaattaa

SEQ ID NO: 461167 - DNA, 129 bp, Shigella boydii
atgtatctgtccagaatcagtgaggccatcagtttgtctgctggtgaagtggcccaccggttaatcgtcccttcatcggatattgacctaggggagaccgagcttccggtgctcggcgagatcacctag

SEQ ID NO: 461168 - DNA, 591 bp, Shigella boydii
atggattcgttacaggatgattatacaaagctgctgtacggactgatgccgccggggcctgcatggtcagataccgacggtgtacttgacggtctggcaccatcgcttgtgcgtgttcaccagcgggctgatgaactggtgattgaaatcgatcccggtcagtccacagagctgattgaacgttatgaagaattgtatggtttacctgattcctgttcccctgtcggaacccagacattacgccagcgtcagcaacgtcttgaagcaaaagccaatgtggctggtggcataaatgagcagttcttcctggatcagcttgaggcgctgggatataccggcgtaacgatcgaacagttccagcacctggatgcaagccccgatccggaatggggagatcgctggcgttatttctggcgtgtgacgttgccggtggatgccggtgctcagtggcagacatgcacggacgcctgcaacacaccgatccggacgtggggggatacggttgcggagtgcgtgattaataaattatgtccgtcacacaccgtcgttttattttcctatccagatgaggatgaagatgcacaggattga

SEQ ID NO: 461169 - DNA, 654 bp, Shigella boydii
atgcacaggattgatacgctgactgcggtaaaagataagtttggtccgggtaagaacggatttactgacggaaatcttcgcacaggacgtcttgctacctggctgaacagtgccatgtggaatgccattcaggaggaaatctgtggtgtcattgagaaggccgggatagaactgaataaagaagaacacgaccagctatataaggctatattattgctggtgggcggtgcaattaacgaagaggcattgctgataaaaaataacctttcggatgtggaagacagggatgaggctgttgaaaacctcggattaaaacccacggtggataaggcaaaaaatgccgttcagcgtgatggcgacaccatgaccggagagctgaaaatccgtggtgttaatgcgctgaggattttcaacgaagcttttggcctgatttttcgtcgttcggaagagtgcctgcaccttattcccaccagtgaaggtcagggggaaaatggcgatattggtcccctgcgcccgttcaccattaatctgcggacgggtgaaatatccatgtcgcataaagtgtctgttggcggtggttcgcaggtcaatggtgcgctgggtatcggcgttcagaacgccctggggggggaattcaattgctttcggggataa

SEQ ID NO: 461170 - DNA, 546 bp, Shigella boydii
atgttgcatttaaaaaatattacggtaggtaatccgaaaaccgcggaacaatatcagctgacaaaacagtatgatgtcacctggcttttttcggaagacggcaaaaactggtatgaagaacagaagaactttgccagtgacaccataaaaatggtttacaccggagacgggcgcgtggtgtgggtcggtaaggatgtgacaggcattgaaccccgtaacgccagtgttattgaagttcctgatattaccgccaaccgccgcattaccgcgccgggttactggttttaccgcaatgatgaatttgtctttgactacagactcaaagcggaagatgagcgtgatgcccttctggctcaggtcagtgcccggacaggggaatgggaagaagacctgctgctggggctaatcagcgacgaagaccgggaaaaactgaaagcgtaccgtatttacgcgaaatcgctgcaggcgatggatttcagcgccatcactgataaatcctcatacaacgccattgaatggcccgtctctccggaaggttcttcctga

SEQ ID NO: 461171 - DNA, 1059 bp, Shigella boydii
atgtctgtagtgatatcaggtgcgctgactgatggcgcaggcatccccatgtccggatgccagattattctgaaatcccgtgtaaacacctcagaagtggtgatgcgtaccagggctgatgtagtgaccggaaataacggtgaatattcgtttgaggcacaggtcggaaaatattgcgtgtatctgaaacgggactggcgcgacgagtactgtgttggcgacattgctgtatacgacgactcaaagcccggcactctgaaaacggctaaccatctgtctgaaatcgcagcagcaggcgaaaaggcacaacagaagtcccgggataatctggggctgaaaagtgcggccacgatggaagcacagagcgacatttacgaccggacaaaaggccgtctggcgatacccggcgcattcggctttgggtgtgcttttctgcctgaagatgttatccgttttgacactaagagtgatttcctggcctgggtaaggaatgcgctgccaggtgaatattccgttgctggcccctacgacatcatcatacccgacacacggtttgaaggggtgctcagcatccggtggactgatgcacgccctgagacaacagaaccgcggtacagagccaaatcccttactttttacggcattaacggccccatttatcacacccgctactgctactggcccatatccagactgactgactgggtgaaaataaatataaccacagaagatattatttacagaatcgtggcgagctctgtccgcaacagatggggagaccctgacattggcgggctgattattgctgcgtaccagggagaagctgacggtgataaagtcatcagacttgtcagggggcagtcatacagaggctcacgactgggaccggtggggatttcagtgcccagtactcccaccggaacgtatatagcatccccacaatttttcattacgggatgttcagagcattcattaccggggtcatattgcgccctgtccggggtgccggatgctcatgtctctggcgcaatgcccgggctttttattcgcacatcgtga

SEQ ID NO: 461172 - DNA, 618 bp, Shigella boydii
atgtctctggcgcaatgcccgggctttttattcgcacatcgtgaggaatgcaccgtggaaattaaaaaaaccattaatccccgttataccgaaagtggcgcagtagactgtgacgttttttttgacgacagggaccaggcagttccctacacagccaccgctgatgatgtcgcaccgacgggtcagcaaatctggcaggaactgcaaagtggcaaatggggtgagatagccccattcactgtgacaccagaaatgctggaagcggccagagaggccagacgtcaggaaattgaagcatggcgcgcagaacaggaggcgaagccgttcacgtttgaatggaacggtcgtatctggaatgctggtcccgactcactgggccgcctgtccccggtagtcatgctggcaaaatctgtcacagcacaaacacatatggcgtggagcgatgccgataatcagcaggtgaaactgtcgatgccggaactggaagaactggcggcagcaatggtgcaggcgcaggtcgatcgcaacgatgagatttatcgccgtcagcgtgaaatgaaagaggagctgagcggtctggatgatttggcttcaattcgggcgtttgacgttgagtaa

SEQ ID NO: 461173 - DNA, 180 bp, Shigella boydii
atgaataagccgcaactggcggaatcacagaagaccgctttgcttaccgaagcggagtctgtcatccggccgcgggggcgtgctgtcaggctgaacagggaaacggatgaatccggggaggcccgggggcgggcctctgtttttccggagtcagtccggtctgtggtttatgcgatgtga

SEQ ID NO: 461174 - DNA, 822 bp, Shigella boydii
ttgttcaaagccaatcatgttccggtattaatgtatcatcatgtcagtcattgccccggactggttacactttctcccgtgacattccggaagcaaatgaaatggttggctgaaaacaactggaaaacactgtcatcagatgaactggagtttttttatcggggcggaaaactcccccggaaaagcgttatgttgacatttgatgatggataccttgacaactggtttcaggtatatcctttattaaaagagtttaatctcaaagcacatatttttttaattaccggttttattgggaatggtccggttcgtcactctcctggaaaggaatattctcatcgcgattgcgaacatcaaatagcgacagggaatgctgataatgttatgcttcgctggtctgaagtaaacgaaatgttgcaatctggtctggtcgaatttcatgttcatacgcatactcatacacgctgggataaaaagttcagttcacgagaagaacagtgtaaacatcttcggcaggacttgttgagcgggagagaatatttgaaagaaatgacaggaaaatgcagtaaacatttgtgttggccggaaggttattataacaaggattatattcaggtcgctgaagaacttggattctattatttatatacaacagaaagaagaatgaatgctcctgctaaaggaactacacggataggaagaataagcaccaaagaacgggaaagttgcgcatggctgaaaagacgacttttttattatacaacaccgtttttttcatcgttgctggcctttcataaggggccaagattaccggatgattaa

SEQ ID NO: 461175 - DNA, 1089 bp, Shigella boydii
atgaatatactatttacggaatcatcaccgaatataggtggtcaggaattacaggctgttgctcaaatgaaggccctgaagaaaatggggcattcagttctgcttgtctgcagggaaaacagcaaaattgcttttgaagccagtaaattgggaattgatatcacattcgcgttatttcgaaacagtcttcacatccctactgcatggagattactcggaatagttcatggttttcagcccaatgcaatcgtttgtcacagtgggcatgatagcaatattgttggtttagtacggttattcacttggaaacatccattcagaattatcaggcaaaagacatatttgacacgaaaaacaaaagttttttcaataaatcatttttgcgatgaggtgattgttcccggaacaagtatgaagacacatctggagcaggaaggatgtcgaacccgggttactgttgtgcctccaggctttgatttccagaaattatacgttgattcccgaaacagtttgcctccaaatgttctttcttggctggcgtcccgaaggggatgccccgttattgctcaggtaggaatgttgcgcccggaaaaagggcacgaatttatgttgaatttactgttccatttaaaaatgaatggacgacagttctgttggttgattgtggggtctggttcgcctgaactgcgggagcatttacagtatcagattgacagtatgggcatgcatgatgatgtttttattgctgacaatgtttttcctgccgcccccgtatatcgggttgccagtctggtggttctgccttcagaaaacgaatcgtttggtatggtactggcagaagcatcggcattttctgtgcctgtactggccagtcagattggtggaatccctgatgttattcagaacaaccagaccgggacattgttaccagcaggtaataagcacgcatggatgtgcgccctgaatgatttttttaatgaccctgggcgtttttatcagatggctcgccaggcaaaacaggatatagaagagcggtttgatattaataaaactgcgttaaaaatactcacattagcgaagcacaagtaa

SEQ ID NO: 461176 - DNA, 951 bp, Shigella boydii
atgttttctgtaagtaacttatcatttatcggtttccttaaaaggattgttttttcctcagattcactcccggggaagtgggaacacagaaaattccggttcatgtacattttgcgatgtgctataaatccggttgtcagtattcgatattattacgaactgcgttccttgccgtgcattgaggatattctggcaatacaccccacgttgccagcaagaattcatcgcccttatttgcataaaggggggcgcgcctggacccgtggacaatatattcttgagcattatcgctttgtgcaaaatttgccagaaaaatattctaaatttttgtttccacaaaaatcggtatcattagtccaattcatcgggaaagatggagagaattttgatatccagtgttctcccagtggttttgaccgggaaggagagttgatgttgtcattgttttacaataaaacagttattacccggttaacattttcagtcattctgactcaaaatggacacattgcttttattggcggattacagggagcccctaaaaataccggacctgatgttattcggtgcgcaacccgggcctgttatgggattttcccaaaacggattatttttgaagcattttgtgcgttgatgaaagcttgcaatatctctgagtgtctggcagtcagtgagcacagtcatgttttccggcaattgagatactggtatcagaaacgcaaaacctttgttgcggtctatagtgatttctgggagtctgtagcaggaaaaacctgtggtgactggtacagattaccaacccaggtgattcgaaagccgctaagcgatatagccagtaaaaaacgctctgagtaccgaaaacgatacgctttgctggattatatccatgaaactactatccgctctttggatgcatatcctgtacactcagaacatcaggatttaaattaa

SEQ ID NO: 461177 - DNA, 945 bp, Shigella boydii
atgaaaaaatataaatctgagtttattcctgaatttaagaaaaattatctttcccctgtttactggtctacatggttccttttgggaatgattgcaggtatttcaatgtttcccccttcattcagagatcctgtcttggcaaaaatagggcgttgggcgggcagattgagcaaaaaagctcgtcgcagggcgacgattaatttatcgctttgtttcccagaaaagagtgatacagaacgggaaataattgtcgacaaaatgtttgccacagcattgcaatccatagtgatgatggcagaactggcaattcgtggtccggaaaagttccagaaacgagtgttctggaaaggcctcgaaattcttgaggaaattcgatacaataacaaaaatgtgatttttctggttccccatggctggagcgtggatattcctgcaatgttgctggcagctcagggggaaaaaatggccgccatgtttcatcagcaacgaaatccagtgattgattatgtctggaattctgtacggcgtaaattcggggggcgcttacattcccgggaggatgggataaaaccatttattcagtcagtacgccagggatactgggggtattaccttccagatcaggatcatggtcctgaatacagtgaatttgctgatttttttgcgacctataaagcgacattaccaattattggacgtctgatgaacatcagtcaggctatgattataccgcttttcccggtttatgatgaaaaaaaacatttcctgactattgaagttcggccaccaatggatgcatgcattgccagcgcggacaataaaatgattgcccgacaaatgaacaaaacagtggaaattttggtggggtcacatccggaacagtatatctgggttttaaaattgttaaaaacgcgcaaatcaaacgaagcggacccgtacccttga

SEQ ID NO: 461178 - DNA, 219 bp, Shigella boydii
atggtgctaccgaaagccgaaattccacatatcaaagccaaatatacccttgatggtaaagaactcaccgcgccaattagcgcccatcagcgggtaggggaaattgaactttacgaccgtgataaacaggtggcgcactggccgctggttaccctggaatctgtcggggaaggcagcatgttttctcgcctgagtgattatttccaccataaggcctga

SEQ ID NO: 461179 - DNA, 474 bp, Shigella boydii
atgaactacgagattaagcaggaagagaaacgtaccgttgcaggtttccatctcgttggcccgtgggaacagacggtaaagaaaggctttgagcagttgatgatgtgggtagatagcaaaaatattgtgccgaaggagtgggttgctgtctattacgacaatccagatgaaacacccgccgaaaaattacgctgcgacaccgtcgtgacggtgccgggttactttacgcttcccgaaaacagtgagggcgtcattctgacagaaattacaggtggtcagtatgcggtggcggtagctcgtgtagtcggtgatgattttgctaaaccctggtatcagttctttaatagtctcttgcaggacagtgcttatgaaatgttaccaaagccctgcttcgaggtttatttgaacaatggcgcggaagatgggtactgggatatcgaaatgtatgttgcggtgcagccaaaacatcactaa

SEQ ID NO: 461180 - DNA, 681 bp, Shigella boydii
gtgcgtgccgataagtcattaagcccgtttgaaatccgggtataccgccattaccgcattgtgcatggtactcgggtcgcgctggcattcctgctcacttttctcattatccgcctgtttactatcccggaaagcacctggccgctggtcaccatggtggtgattatggggccaatctcgttctggggtaacgttgtccctcgcgcctttgagcgtattggcggtacggtgttgggttcgattttaggtcttatcgctctgcaactggagttaatctcgttaccgctgatgttagtctggtgcgcggcggccatgttcctttgcggttggctggcgctgggcaagaaaccgtatcaaggtttattgattggggtgacgctggcaattgttgtgggttccccgacaggtgaaattgatacggcgttatggcgaagcggcgatgtgatcctcggctctttactggcaatgttgtttaccggtatctggccacaacgggcgttcatccactggcgcattcaactggcgaaaagtctgaccgagtataatcgggtcttgtattatccctccagtgcagagaaaatcggccagttttctctgcctgcagtccgcatgccgtatcgggccttgggttctaacctgttgcgtagatttatgcagcggactgcctttctcccaaagtga

SEQ ID NO: 461181 - DNA, 981 bp, Shigella boydii
atggaacatgaacttcattatatcggtatcgacaccgctaaagagaaactggatgtcgatgtgttgcgtcctgatggtcgtcatcgcaccaaaaaattcgctaacaccactaaagggcacgatgagctggtgagctggctgaaaggtcacaagattgaccatgcgcatatctgcatcgaagcgaccggcacctatatgaaacctgtcgctgagtgcctttacgatgctggctacatagtgtcagtcattaatcctgcgctgggtaaagctttcgctcagagtgaaggactgcgtaacaagactgataccgtggatgcgcgcatgctggcagagttctgtcgtcagaagcgccctgcagcctgggaagcgcctcacccgcttgaacgcgcgttgcgtgccctggtagtccgccaccaggcgctgacagatatgcacacgcaggaactgaatcgcactgaaacggcgcgggaagtccagagaccgagcattgatgctcaccttctgtggcttgaagcagagctgaagcgtcttgagaagcagataaaagacctgacagacgatgatccggatatgaaacaccgcaggaaactgctggaaagcatcccgggtatcggagagaaaacatctgcggtattgctggcttatatcggtctgaaggaccgcttcgcccatgccagacagttcgccgcttttgcgggtctgacaccacggcgttatgaatcaggtagcagtgtgaaaggggcgagccggatgagtaaggccggacatgtgtcgcttcgcagggcgttgtatatgcccgcaatggtagccaccagtaagactgagtggggacgggcgttccgcgaccgtctggcggctaatggcaagaaaggaaaggtgattctcggcgcgatgatgcgcaagctggcacaggtggcgtatggagtgctgaagtcaggcgtgccgttcgatgcgtcacggcataatccggtagcggcgtaa

SEQ ID NO: 461182 - DNA, 423 bp, Shigella boydii
atgcgtggactgattgcgcccgccagcaaagaaacccgtattccaaaatcgatatatgaaggtatccagaccattaaccgcaatctggtttgtatgctggagttgcaaatcaatgcatactgggccacgcgccccagccatttcgtgttattgaacgcgcaaaaacttcgtgatacccagcacatgatgcagcaaatactgctgagccttgttcatgcgctgtacgaaggtaatccgcagccggtttttgccaatacggaaaaattgaacgatgctgtggaagagctgcgtcagttgctcaataaccaccatgacctgaaggttgtggaaacaccaatctatggttatgtgtggctgaacatggaaacggcgcatcagcttgagttgctatcgaatctgatttgccgggccttgcgcaaataa

SEQ ID NO: 461183 - DNA, 330 bp, Shigella boydii
atggaaactaccaagccttcattccaggacgtactggaatttgttcgtctgttccgtcgtaagaacaaactgcaacgtgaaattcaggacgttgagaaaaagatccgtgacaaccagaagcgcgtcctgctgctggacaacctgagcgattacatcaagccggggatgagcgttgaagcaatccagggcatcatcgccagcatgaaaggtgactatgaagatcgcgttgacgattacatcatcaaaaatgccgagctctccaaagaacgccgcgatatctccaaaaagctgaaagctatgggcgaaatgaaaaacggcgaagcgaagtaa

SEQ ID NO: 461184 - DNA, 357 bp, Shigella boydii
atggcaggagttcgtcaacacggttggagggccattccggcagtatgctcagaatatggcgcagatacgcttccggatcgatatcgttcagacggcaggtgcctgcttttctggcaacaagcaggaatctcagcgctgaagcaggaattagaggtaaaaacgccctaccgggccatgaatcacccggtcattggagtagtaaccaaagcagatttagccagcatggaacaaatatctttggtgaaaagttggttacgggaagctggagcgcacaacgtgttagtaaccagtgcagttaataacaatggagttacagaactttttgccttgctgcatacagaagaaggctgttgttaa

SEQ ID NO: 461185 - DNA, 471 bp, Shigella boydii
atgcgtaaattaactgcactgtttgttgcctctaccctggctcttggcgcggctaacctggcccatgccgcagcaccggctgacgcgaagccgatgatgcaccacaaaggcaagttcggtccgcatcaggacatgatgttcaaagacctgaacctgaccgacgcgcagaaacagcagatccgcgaaatcatgaaaggccagcgtgaccagatgaaacgtccgccgctggaagaacgccgcgcaatgcatgacatcattgtcagcgataccttcgataaagcaaaagctgaagcgcagatcgcaaaaatggaagaacagcgcaaagctaacatgctggcgcacatggaaacccagaacaaaatttacaacatcctgacgccggaacagaaaaagcaatttaatgctaattttgagaagcgtctgacagaacgtccagcggcaaaaggtaaaatgcctgcaactgctgaataa

SEQ ID NO: 461186 - DNA, 576 bp, Shigella boydii
atggaatactttgatatgcgtaaaatgtcggtgaatctgtggcgaaatgctgccggtgaaacgcgcgaaatttgcactttcccaccggcaaaacgtgatttttactggcgtgccagcattgcatccatcgcggcgaatggggagttttctttgtttcccggcatggaaaggatagtgacgttgctggaaggcggcgagatgctccttgaaagcgcagaccgctttaaccataccttaaaaccgttacagccttttgcctttgcagcggaccaggtggtaaaagcgaaactgacggaagggcagatgtcgatggatttcaacatcatgacacgcctggatgtctgtaaggcgaaagtcagaattgccgaacgtacgtttactacctttggctcacgcggcggggtggtgtttgtgattaacggggcgtggcaactgggcgataaattgctcactaccgaccagggcgcgtgctggttcgatggcaggcacaccctgcggcttttacaaccgcaaggtaaactgttgttcagtgaaatcaactggctcgctggtcattcgccggatcaagttcagtaa

SEQ ID NO: 461187 - DNA, 888 bp, Shigella boydii
gtggtacggcgtttaacttctccgcggctcgaatttgaagctgcggcaatttatgaatatcccgaacatttacgttcattccttaatgacttacccacccgaccaggggtgtatctgtttcatggtgaaagtgacaccatgccgctctatatcggcaaaagcgttaacatccgcagccgcgtcctttctcatttacgtaccccggatgaagccgccatgctacggcaatcccgacggatcagctggatatgtaccgccggtgaaatcggcgctctgctccttgaagcgcgattaatcaaagaacaacagccgctgtttaataaacggttgcgccgcaatcgccagctctgtgccctgcaattaaatgaaaagcgcgtcgatgtggtgtatgccaaagaggtggatttttcacgagcccccaacctgtttggcctgtttgccaataggcgcgcagctttgcaagcattgcagaccatcgctgatgaacaaaaactttgttatggcctgctgggactggaaccgttaagtcgcggtcgtgcatgttttcgttcagcgctaaaacgttgcgccggagcatgctgcggtaaagagagccatgaggaacatgcgctacgcttgcgccagtctctggagcgtttgcgggtggtgtgttggccttggcaaggggcggtggcgctgaaagaacagcacccggaaatgactcaatatcatattattcaaaactggctgtggctgggggcggttaattcgctggaagacgcgacaacgttaattcggacacccgccgggtttgatcacgacggttataaaattctttgtaagccgctgctttccggtaactatgaaattactgaacttgatccggcgaatgaccagcgagccagttga

SEQ ID NO: 461188 - DNA, 828 bp, Shigella boydii
atgacattgcaacaacaaataataaaggcgctgggctcaaaaccgcagattaatgctgaagaggaaattcgtcgtagtgtcgattttctgaaaagctacctgcaaacttatccgttcattaaatcactggtgctcgggatcagcggcggtcaggactccacgcttgccggtaagctgtgccagatggcgattaatgagctgcgccaggagaccggcaacgaatcactgcaatttattgccgtacgcctgccctatggtgttcaggccgacgaacaagattgccaggatgccattgcctttattcaaccggatcgcgtattaaccgttaatatcaagggcgcggtattggccagcgaacaggcgctgcgcgaagcggacattgaactgagcgattttgtccgtggcaatgaaaaagcgcgtgagcggatgaaagcacaatatagcattgcgggtatgaccagcggtgtcgtggtgggcaccgatcatgcagcagaagctattaccggattcttcactaaatatggtgacggcggtacggacattaatccgctgtatcgtctcaacaaacgtcagggtaaacagttactggcggcattagcttgcccggaacacctttataagaaagcgccaacggccgatctggaagatgatcgcccttctctgccagatgaagtggctctcggcgtgacctatgacaatatcgacgactatctggaagggaaaaacgtacctcaacaggtcgccagaacaatagagaactggtatctgaaaaccgaacataaacgccgtccgccaattaccgttttcgatgatttctggaaaaagtaa

SEQ ID NO: 461189 - DNA, 339 bp, Shigella boydii; identical to SEQ ID NO: 1409

SEQ ID NO: 461190 - DNA, 321 bp, Shigella boydii
atggaaaagaaacacatttatctgttttgttctgcgggcatgtctacctctttactggtatcaaaaatgcgcgcacaggcagaaaaatatgaagttccggtcattattgaagcatttccggaaacactggctggtgaaaaaggtctgaatgccgatgtcgtgttattagggccgcagattgcttatatgttgcccgaaatccagcgtttgttacccaacaaaccggttgaagtaattgactcgctgctttatggcaaagtcgatggtttaggcgtgcttaaggctgcggttgcagcgattaaaaaagccgcagcaaattaa

SEQ ID NO: 461191 - DNA, 1032 bp, Shigella boydii
atgatcgctgaactgtttacaaataatgcgcttaatctggtcattattttcggtagctgcgcagcattgattctgatgagcttttggtttcgccgcggaaatcgtaaaagaaaaggttttttattccatgcggtgcaatttttaatctacaccataattatcagtgctgttggtagcattattaattatgttatagaaaactataaactcaaatttatcaccccaggcgttatcgattttatctgtacgtccctgattgcggttattctgacgattaagctatttttgctgattaatcagtttgaaaaacagcagattaaaaaaggtcgcgatatcaccagtgcgcggattatgtcgcgcattatcaaaatcaccattattgtggtgcttgttctgctttatggcgaacatttcggcatgagcctttctggcttgctgacctttggtggtattggtggtctggctgtcggtatggccggtaaagatattctgagtaatttcttttccgggatcatgctctatttcgaccgtcctttcagtattggcgactggatccgttcaccggacagaaatatcgaaggtacagtagcggaaattggctggcgaattaccaaaattacgacctttgataatcgtccattgtacgtaccgaactcgctgttttcgtcgatcagcgtagaaaacccaggacgaatgaccaaccgccgcattaccacgaccattggtttacgttatgaggatgcggcaaaagtgggcgttattgtcgaagccgtacgtgagatgctgaaaaatcacccggccatcgaccagcgacaaaccttactggtttatttcaaccagtttgccgactcgtcattgaatattatggtttattgctttaccaaaaccacggtatgggctgaatggcttgctgcacaacaagacgtttatttgaagattatcgatattgtgcagtcacacggcgcggactttgccttccccagccagacgctgtatatggataacattacaccgccggaacaggggcgctaa

SEQ ID NO: 461192 - DNA, 1614 bp, Shigella boydii
atgaagcactctgtttcagtcacgtgttgtgcgctgttggtcagcagcatttctctttcgtatgctgcagaagttccgagcggcacagtactggcagagaagcaggagctggtgcgccacattaaagatgagcctgcgtcgctggatcccgctaaagccgtgggcctgccagagattcaggtcattcgcgatctgtttgaaggactggtgaatcagaacgagaaaggggagattgtccccggcgttgcgactcagtggaaaagtaatgacaaccgtatctggacttttaccctgcgcgataacgcaaaatgggcggatggcacaccggtaacggcgcaagattttgtctacagctggcagcgtctggtggacccgaaaacgctatcgccatttgcatggtttgccgcgctggcgggaatcaacaacgcacaggcgattattgatggtaaagctacgcctgaccagcttggcgtcaccgcagttgatgcccataccttgaaaattcagcttgataaaccgttgccgtggtttgtgaatttaaccgctaactttgccttcttcccggtgcaaaaagccaacgtagaaagcggtaaagagtggacgaaacccggaaatctgatcggcaatggcgcttatgttcttaaagaacgcgtagtcaatgaaaaactggtcgtggtaccgaatacccattattgggataacgccaaaacggtactgcaaaaagtgaccttcctgccaattaatcaggaatccgcagccactaagcgttacctcgcgggggatattgatatcaccgaatccttcccgaaaaatatgtatcagaagctgttgaaggatattccggggcaggtttatacgccgccgcagctcgggacctattattatgcgtttaacacgcaaaaagggccgacggcagatcagcgcgttcgcctggcattaagtatgacgatagatcgccgcctgatgaccgaaaaagtgttgggaacgggcgaaaagccagcgtggcattttacaccagatgttaccgccggatttacgccggaaccttcgccgtttgaacaaatgagtcaggaagaactgaatgcgcaggcaaaaactttgttgagcgcagctggttatggtccgcaaaaaccgctgaagctgacgcttttgtataacacttcagaaaaccatcaaaaaattgcgattgctgtagcatcgatgtggaaaaagaaccttggcgtagatgttaaattgcaaaatcaggaatggaaaacctatatcgatagccgtaacaccggcaattttgatgttatccgcgcctcatgggtgggggattataatgaaccctccactttcctgacattattaacgtcaacgcattcaggaaatatttcacgctttaacaatccggcatacgacaaagttctggcccaggcatcgacggaaaataccgttaaagcgcgtaatgccgattacaacgcggcagaaaaaatcctcatggagcaagcaccgattgcaccaatttatcaatataccaatggacgattaatcaagccgtggctgaaaggttatcccattaataacccggaagatgtggcgtacagccggattatgtatattgtgaagcattga

SEQ ID NO: 461193 - DNA, 900 bp, Shigella boydii
atgaagcgtgaagaaatcgctgatctgatggcgtttgtcgtcgttgcagaggagcgtagcttcactcgtgcagcagcccgcctgagcatggcgcagtcagctttaagccagatagtgcgtcgtatagaagaacgattgggattgcggcttctgacgcgaaccacgcgcagcgttgttccaactgaagcgggcgagcattttttgtctgttcttggccctatgttgcatgacatagattcagccctggcatccctgagcgagctgcagaaccgcccatccgggacaatacgtattactactgtagaacatgcagcaaaaacgatattgttaccagcaatgcgcacattcctgaaatcgcatcctgaaattgatattcagctcaccattgattatggtttgaccgatgtcgtttctgaacgttttgatgcaggcgtccgtctgggtggggagatggataaagatatgatcgccattcgaatcgggccagatataccaatggctattgttggctcaccggattatttttctcgccgaagtgttccaacgtcagtgtcacaattaatagatcatcaggcaattaatttgtatcttcccacatcgggtacagcaaatcgctggagattaatacgcggtggacgtgaagttcgtgttcgcatggaaggtcagcttttactgaatacgatagacctgatcattgatgctgcaattgatgggcatggattggcgtatctaccttatgatcaggttgagcgggctattaaagaaaaaaaactgatacgtgttttggataaattcacaccagatttacccggttatcacctgtactatccacaccgtcgacatgctggctcggcattctcattatttatagataggctgaagtataaaggtgctgtttag

SEQ ID NO: 461194 - DNA, 381 bp, Shigella boydii; identical to SEQ ID NO: 458903

SEQ ID NO: 461195 - DNA, 798 bp, Shigella boydii
atggttgaacttaaagagccgtttgccacgttatggcgcggtaaagatccttttgaggaagttaaaaccttgcagggtgaggtttttcgtgaactggaaactcgccgcactctgcgatttgaaatggcgggcaaaagctattttctcaaatggcatcgcggcacgaccctgaaagagataatcaaaaatttactctcattgcggatgccagtattaggcgcagaccgcgaatggagtgcgattcatcgactgcgggatgtcggcgttgatactatgtatggggtggcatttggcgaaaaaggtattaatccgctgagcagaacctcgtttattattaccgaagatctgaccccaaccatcagtctggaagattactgtgctgactgggcgactaacccaccagatgttcgcgtaaagcgtatgcttattaagcgtgtcgcgacgatggtgcgcgatatgcatgctgcgggcattaaccaccgtgactgttatatctgtcatttcctgctgcacttgcctttttccggtaaggaagaggagttaaaaatttcggtaattgacctacaccgggcgcagcttcgcacgcgcgttccacgtcgttggcgcgataaagatcttatagggctttatttttcttcaatgaatattggcctgactcagcgggatatctggcggtttatgaaagtgtattttgccgccccgcttaaagacattctcaagcaggaacaaggactgctgtcgcaagcagaagcaaaagccacaaaaatcagggaaagaacgattcgaaaatcgttgtaa

SEQ ID NO: 461196 - DNA, 1125 bp, Shigella boydii
atgatcgttgctttttgtttatataaatattttccctttggcggtttgcagcgcgattttatgcgtattgctcagacagtcgccgcccgaggtcatcatgttcgggtttatacccagtcgtgggaaggcgaataccctgatgtatttgaactgatcaaagtgccggttaaatcgcataccaatcacgggcgcaatgcggagtattttgcctgggtgcaaaaacatttacgcgaacatcccgtcgataaagtcgttggattcaacaaaatgccggggctggacgtttattatgccgctgatgtttgttatgccgagaaagtcgcgcaggaaaaaggctttttctatcacctgacgtcacgttatcgccattatgccgcctttgagcgggcaaccttcgaacagggaaagccgacacagctgctgatgctgacagataagcaaatcgccgatttccagaaacattatcagactgaagcggagcgttttcatattctgccaccggggatttatcctgatcgtaaatatagccagcagccagctaatagccgtgaaatcttccgtaagaagaatggaataaccgaacaacaatatttattgttgcaggtcggttcagacttcacgcgtaaaggtgtcgatcgttccattgaagcacttgcttcgttaccggattcgctgcgccacaacacattgctatatgttgttggacaggataaaccgcgaaaatttgaggcgctggcagaaaaacgcggcgtgcgcagtaatgttcacttcttctcggggcgcaacgatgtctcggaattaatggcggcggcggatttattactgcatcctgcctaccaggaagcagcgggaattgtgctactggaagcgattactgcaggattaccggtactaacaacagccgtttgtggctatgcgcattatattgtcgacgccaattgcggcgaggctattgctgagccattccgccaggaaacattgaatgagattttacgcaaagcgttaacgcaatcttcattgcgccaggcctgggcggaaaatgcgcgacattatgctgatacacaagatttatacagtctgccagagaaagcggcggatatcataacgggtggtctggatggttga

SEQ ID NO: 461197 - DNA, 1059 bp, Shigella boydii
gtggataagctatttcgaagaattttgctcattaagatgcgttttcatggggatatgttattaactactcccgtcattagttcgctgaaaaaaaattaccctgacgcaaaaatcgatgtgctgctttatcaggacaccatcccgatcctgtctgaaaatccagagattaacgcgctctacggcataaaaaataaaaaagcaaaagcctcagaaaaaattgccaacttttttcatctcatcaaggtattacgtgccaataagtatgaccttatcgtcaatctcaccgatcaatggatggttgctatactggttcgcttattaaatgcccgtgtgaaaatttcccaggattatcatcatcggcagtctgctttttggcgtaaaagtttcacccatttggtgccgttgcagggtggaaatgtggtggaaagtaacttatccgtgctgaccccattgggagttgattcgttggtgaagcagacaaccatgagttacccgcctgcaagctggaaacgtatgcgtcgcgaacttgatcacgctggtgttggacaaaattatgtggttatccaacctacggcgcggcaaatcttcaaatgctgggacaacgccaagttttccgctgtgattgatgccttacatgttcgtggttatgaagttgttctgacgtccggcccagataaagacgatctggcctgcgtcaatgaaattgcgcagggatgccagacgccaccagtaacggcgctggctggaaaggtgaccttcccggaacttggtgcgttaatcgatcatgcgcagctgtttattggcgttgattccgcaccggcgcatattgccgctgcagttaatacgccgctgatatcgctgtttggtgcgacagaccatattttctggcgtccctggtcaaataacatgattcaattctgggcgggagattaccgggaaatgccaacgcgcgatcagcgtgaccgaaatgagatgtatctttcggttattccggcggcagatgtcattgctgctgtcgataaattactgccctcctccacgacaggtacgtcgttatga

SEQ ID NO: 461198 - DNA, 276 bp, Shigella boydii; identical to SEQ ID NO: 458859

SEQ ID NO: 461199 - DNA, 195 bp, Shigella boydii
atgcatcagaaaacagcagaacacgaacaaaccagaatattgctgaccatcaaaaacgggaaagtaatattcattcgccatgttcatgacgatgaacttgtaggaactctttcaacattcctgtttattgcagaaaaggcaggatatgacgttattgcaccagcagatgaagatgaagatgaagatgaggaataa

SEQ ID NO: 461200 - DNA, 582 bp, Shigella boydii
atgcaatacgatgaattccaggctgaagcaacagccaatggtatacgaactggcagtatgacgattgattatcacgacgccatacgtcgtctggatgccggagaattcgatactccttatgtgcgaggtttacgtatccttcagtgtctggcgcaagccgacgaagcaggattactgggtaaacttccggttgagatgaaggttgctcagtggcgatggttgtatgtgacgacattcatcaacgaagaagaagacaagaacggcacaattgatatcctgaatgaacacggaacaactgaacacgccgtggtatataacgggatgtatgggtttatgacgatatatcccggccccattcgatttgccttacaacagtatattgaatggaatttaattcaaaaatacggcgaagctgaaggaatgggaagagcgctgtttctttatcagaaaatgctcactacttcccctgataaaggtttcattctttcagatatgggtcgagaagggcttgaaatccttctggatgaaattattaacgaaatgaatactcatggcatgcaatccgaaacagatattaagtaa

SEQ ID NO: 461201 - DNA, 249 bp, Shigella boydii
atgaccgttatcgagtatatccaggaaaatccagattgcagtagagaagatatatccctcgcacttggaagaagcgcaacttctatcagtaataaattatcacggttattgtggaatgggttaatagtacgaactggagaaaaaaacaaaatgattctgtactgcgtaaacaatctgccgtttggatacagcaatcccctaagtgttatgttcaaccagttacttaaacaggtaagaaatggcaactga

SEQ ID NO: 461202 - DNA, 318 bp, Shigella boydii; identical to SEQ ID NO: 36845

SEQ ID NO: 461203 - DNA, 315 bp, Shigella boydii
atgacgatcacaaaacaacgagtagaaaaaatcatatatcgccatgaaatgggactgaacagcgatgtcactgccgaagaggtttatgacctggctgtactggcgctgaatttatcaaatatcgcaaacctgaagcgatacgagcttgatatggatggttgcgactcgtgcggtcaggattgtggcgcagatatgactgaagatcctgatggtgattatgtcctgtttgatgacgtggttaagttgtttgaatttgatacaaccactcaaaagttagaaatcccggcaaaggaggctgccagtgagcaagattga

SEQ ID NO: 461204 - DNA, 681 bp, Shigella boydii
gtgagcaagattgactatcaggcactgcgcgaggcggcggaacaggcaacgcaagatgaatgggtagcatatattttgccgggtcataacggcatttatcctgcgcgcacgtctgagggtaggcattgcggatactttattgactggcctggcgtctgtcaggggcgggagagcatcagcatcagaacctacgcagtgaattgcaatgacgcatggctaaacaccgaaggtgatgacatctccggctcatacgttaagtacaaagaccatcaggaagtggttgccgctcttgaagccaagtgcgcggcgctggcagcggagaatgcgggaataaagtctgcaattccagaatcacgggatattgaggatgacaatgacaatatggatgacgtatctctcgcggaagacttcgggttcaatcatgcaatagaacggatgaggagacagatacctgaaacgccaaccactgatgctttcctggctgaagtccgggcgcagggggtggatgctgctatagaagctgcaaaaaatctggtggcccaagaatatgagtgtaaggatttcaaagcggcgcagagtgattgctgtatgcaccctagttcagacctggtagggaaggttgaaatgactgagtggttagttgactttgctgcccagcttcgcaaaggaggcaatcagtga

SEQ ID NO: 461205 - DNA, 537 bp, Shigella boydii
gtgagcgaaattaattaccaggcactgcgtgaggtggcggaacgtgcaattccagcaatggaacgcctgttaatgttgccagttgatgatgatttgttaagtgaacaggaacttaaagattacggtgtggatattgatgcgctcaatgccttcaaatttctgaccggaccagaaaccgtgctggcactactggatgaacgggaaagaaaccagcaatacatcaaacgccgcgaccaggagaacgaggatattgcgcttacggttgggaagctgcgcgttgagcttgaagcagcaaaatcaaaactcaacgagcagcgcgagtattacgagggagttatctctgatgggtgcaagcgtattgctgaactggaagcgcgggaagttcaattaccgactcgctacgaccttcgatatggacacccgataaatgcatatgagcgacaagtcatgatacctaaagaaaatggcagttggctttacctgattgacctagaacacgcattacgcgtcgctgacattcgcatcaaaggagagtga

SEQ ID NO: 461206 - DNA, 303 bp, Shigella boydii
atggcgttaacacaccacgaactctgtcagattgcgtacaagttccttaagcgcaacgggttcaaggtttgctttcatgaccgctttgttgctgtaaccagtaccggagaacagccagatgctatgggattcagaaattcagcatcatgcctgatagaggcgaagtgttctcgtgctgacttgttggcagatagaaaaaagcgtttccgtaaaaatccctcacttggcatgggcgactggcgattctttattagtgagccggaaattatttcagttgaggatttacctcccggctggggatga

SEQ ID NO: 461207 - DNA, 522 bp, Shigella boydii
atggctattattctcggcattgacccgggttcgcgcgtgaccggctatggcgtcatccgccaggtaggcaggcaactgtcctacctgggtagcggatgcatacgcaccaaggtggatgatttaccgtctcgtctgaagctcatctatgcgggtgtgacggaaatcatcacccagttccagccagattatttcgccattgaacaagtctttatggccaaaaatgccgactcggctctgaaactggggcaggcgcgcggcgtggcgattgtggcggcggtgaatcaggaattgccggtatttgaatatgcggcacgtcaggtaaagcaaacggtggtaggtattggtagtgccgaaaaaagtcaggtgcagcatatggtccgcaccttgctgaaactgcccgctaatccacaggcggatgccgccgatgcgttagctatcgcgattacccattgtcacgtcagccagaatgcaatgcagatgagcgaatcgcggctgaacctggcgagagggcgactgcgttaa

SEQ ID NO: 461208 - DNA, 741 bp, Shigella boydii
atggcaggtcatagtaaatgggccaacaccagacatcgtaaagctgcgcaggatgctaagcgcggtaaaatcttcactaaaatcattcgtgagctggtaaccgcggctaagctgggcggtggcgatccggacgctaacccgcgtctgcgtgcggcggtggataaagcactgtctaacaacatgacccgtgacacactgaaccgcgcaattgcacgtggtgtgggcggtgatgatgatgcaaacatggaaaccatcatctacgaaggttacggtcctggcggcacggcaatcatgattgaatgtctgtctgacaaccgcaaccgtaccgttgctgaagtgcgtcatgcattcagcaaatgtggcggtaacctcggtacagatggttccgtagcctatctgttcagcaaaaaaggcgtgatctccttcgagaaaggcgatgaagacaccatcatggaagcagctctggaagcaggtgctgaagacgttgtgacctatgatgacggcgcgattgatgtctacactgcatgggaagaaatgggtaaagtgcgcgacgctctggaagcggcaggtctgaaagcagacagcgcggaagtttccatgatcccgtccaccaaagctgatatggatgcagaaaccgcaccgaaactgatgcgtctgatcgatatgctggaagattgcgacgacgtgcaggaagtttaccataacggtgaaatctctgatgagattgcagcgactctctga

SEQ ID NO: 461209 - DNA, 510 bp, Shigella boydii
atgagcatagataactatgtgaatgggatgagcgaaggcagtcaacgaagaggcagcgtgaaggataaagtgtataagcgtcccgtttcgatcttagtggtcatctatgcacaagatacgaaacgggtgctgatgttgcagcggcgtgacgatcccgatttctggcagtcggtaaccggcagcgtggaagagggtgaaaccgcgccgcaagctgccatgcgcgaagtaaaggaagaggtcaccattgatgttgtcgctgaacaactgaccttaattgactgtcagcgcacggtagagtttgaaattttttcacatttacgtcatcgctatgcgccgggcgtgacgcgtaatacggaatcatggttctgtcttgcgcttccgcatgagcggcagatcgttttcactgaacatctggcttacaagtggcttgatgcgcctgctgcggcggcgctcactaagtcctggagcaaccggcaggcgattgaacagtttgtaattaacgctgcctga

SEQ ID NO: 461210 - DNA, 1773 bp, Shigella boydii
atgcgtacagaatattgtggacagctccgtttgtcccacgtggggcagcaggtgactctgtgtggttgggtcaaccgtcgtcgtgatcttggtagcctgatcttcatcgatatgcgcgaccgcgaaggtatcgtgcaggtatttttcgatccggatcgtgcggacgcgttaaagctggcctctgaactgcgtaatgagttctgcattcaggtcacgggcaccgtacgtgcgcgtgacgaaaaaaatattaaccgcgatatggcgaccggcgaaatcgaagtgctggcgtcctcgctgactatcatcaaccgcgcagatgttctgccgcttgactctaaccacgtcaacaccgaagaagcgcgtctgaaataccgctacctcgacctgcgtcgtccggaaatggctcagcgcctgaaaacccgcgctaaaatcaccagcctggtgcgccgttttatggatgaccacggcttcctcgacatcgaaactccgatgctgaccaaagccacgccggaaggcgcgcgtgactacctggtgccttctcgtgtgcacaaaggtaaattctacgcactgccgcaatccccacagttattcaaacagctgctgatgatgtccggttttgaccgttactatcagatcgttaaatgcttccgtgacgaagacctgcgcgctgatcgtcagcctgagtttactcagatcgatgtggaaacttctttcatgaccgcgccgcaagtgcgtgaagtgatggaagcgctggtgcgtcatttgtggctggaagtgaagggcgtggatctgggcgatttcccggtaatgacctttgcggaagcagaacgccgttatggttctgataaaccggatctgcgtaacccgatggaactgaccgacgttgccgatctgctgaaatctgttgagtttgcagtatttgcggggccggcgaacgatccgaaaggccgtgttgccgctctacgtgttccgggtggcgcatcgctgacccgtaagcagatcgacgaatacggtaacttcgttaaaatctacggcgcgaaaggtctggcttacatcaaagttaacgaacgcgcgaaaggtctggaaggtatcaacagcccggtagcgaagttccttaatgcagaaatcatcgaagccatcctggatcgtactgccgcgcaagatggcgatatgattttcttcggtgccgacaacaagaaaattgttgccgacgcgatgggcgcactgcgcctgaaagtgggtaaagaccttggtctgaccgacgaaagcaaatgggcaccgctgtgggttatcgacttcccgatgtttgaagacgacggtgaaggcggcctgacggcaatgcaccatccgttcacctcaccgaaagacatgactgctgcagaactgaaagctgcaccggaaaatgcggtggcgaacgcttacgatatggtcatcaatggttacgaagtgggcggtggttcagtacgtatccataatggtgatatgcagcagacggtgtttggtattctgggtatcaacgaagaggaacagcgcgagaaattcggcttcctgctcgacgccctgaaatacggtactccgccgcacgcaggtctggcattcggtcttgaccgtctgaccatgctgctgactggcaccgacaatatccgtgacgttatcgccttcccgaaaaccacggcggcagcgtgtctgatgactgaagcaccgagctttgctaacccgactgcactggctgagctgagcattcaggttgtgaagaaggcagagaataactga

SEQ ID NO: 461211 - DNA, 255 bp, Shigella boydii
atgcttgaacttaatgctaaaaccactgcgttggtggtgatcgatttacaagaaggcatcttaccttttgccggtggtccacatactgccgatgaggtagttaatcgcgccgggaagctggcggcgaaatttcgcgccagcggtcagcccgtgtttctggtgcgagttggctggtctgccgattacgccgaagcattaaaacagccggttgatgcccccgttactttattcgtaccccttataatggggtgttag

SEQ ID NO: 461212 - DNA, 399 bp, Shigella boydii
gtgactcttaaacgggcctgttccctgctgacggtgaaatccttcagtgaggatgaatgggtgatcaccgggattgcgtcaacgccttctccggatcgggatggtgacatcctggagccggagggcgcggagtttggcagtgcgatcccgtttctctggcagcatgaccattcccgcccggtggggcagtgtacggtgcgccgggtcagcgaagggctggaaatcacggcaacactggtgaagcccgtaccggatatgccgtcgcaactggctgcccggctggatgaggtctgggcggccattaagaccgggctggtcaggggctgtccgtgggcttccgtccccatgaatacacctttctggacggaggcggactgcattttctgcgctgggaactga

SEQ ID NO: 461213 - DNA, 1662 bp, Shigella boydii
atgatacctgtatggagcacggcctgcccggactgggcagagcgcctgaaaaaggggctgtcgattattccggctccgatttatccggaccaggccgcacatgccctggcgatttttaaacaactgcggattgtggatgcaccgggtagcccgacgttcggggagtcctgtgcacagtgggtgtttgacctggtggcggctctgtttggctcctacgatgcgcagaccggtgtccgccatatcaaggaagtgttcattctgatacccaaaaaaaacagcaagtccacactggccgccgggatcatgatgacggcgctgttactgaactggcggcaggcggcgggttacacgattctggccccgactgtggaggtggcagccaacgccttcaatcctgccagggatatggtacgacgggacgatgatctggatgacctctgtcaggtgcagacacatatccggaccatcacccaccgggtgacggacaccaccctgaaggtggtggcagccgatccgaatacggtgtccggtatcaagtccgtggggacgctgattgatgagttgtggctgtttggcaagcagtacaaggcggaggacatgttacgtgaagccatcggcgggcttgcctcccgcccggaagggtttgtggtgtatacgaccacccagtcgaatgaaccgcccgccggggtgttcagacaaaaactgcagtacgcccgggatgtgcgcgacggcaaaattaatgatccgcactttctgccggtgatatttgaacaccctcctgaaatggtggaaagcggggctcacctgctgatggaaaacctcgccatggtcattccgaatctcggctattcagtggatgaggcctttctgtaccgggagtaccgtaaagcccgggaagccggtgaagagacattccgggggttcatgtcaaaacacgccaatgtggaaattggtcttgccctgcgctctgaccgctgggcgggggctgatttctgggaagagcagggccgttgtatcaacctggacgatatcctgcgtcgtgctgatgtggtgacggtggggattgacggcggagggctggatgatctgctggggatgtatgtgattgggcgtgaccgggagacccgcgaatggctgggctggggccatgcctgggcgcatgaaaccgcggtggtccgacggaagagcgaggcgtcccggtttcaggatcttgttgcctgtggagatatgaccattgtccggcgtgtcggggatgacacggcggaagtggcggaatatgtgcgtcgcattcatgaggctgagttactggaccatatcggtattgacccgtcaggggtggggcagattctggattcactggcggaagccgggatccccgacggaattgtggtggggatacgccagggctggaaactgggcggggccattaaaaccaccgagcgcaaactggctgaaggggtgctggtgcatggtgaccagcccctgatggcctggtgtgtcggcaatgcccgggtggagcctaaaggtaacgccattcttatcaccaaacaggccagtggacggggaaaaattgacccgctgatggcgctgttcaatgcggtctccctgatgtcccttaacccggaaccgaaaaagaaagaatatgcggtttttttcatataa

SEQ ID NO: 461214 - DNA, 564 bp, Shigella boydii
gtgctgacaacgcaaaaacgaaaatttgcgctggcgctcatgtccgggaaaaacaaaacagcgtcagccattgccgccggttattcggcgaagaccgccagggttaaaggctcgcagctggcaaaagatccggaggtgctcgcgtttatagcccgtaaacagtgcgaaacggtggaggtggatgaggttcctgtttaccggcagaaaaaatcagagcaggaggataaaccccgtcgccgtgaggcggctgcaataccacagccggacgaaaacaatccggagatgccaccgcccgcggtgatgtctcatggtattgaatatatggaggatggtcttcccgatccggtgaaagctatggggcagatcctggtggaaaacctcagcattgatccgaaactggcactggatgcggcctggcgactggcgcagttcacacaccataaaaaaggcgatgccggtaaaaaatcggcaaaaggtgatgccgcgaaaaaagcggctaaccgttttgcggtaccaccaccaccacgactggtggtgaataacgataatgagggcaacggatga

SEQ ID NO: 461215 - DNA, 366 bp, Shigella boydii
atggctgagcttcgtacactccagagcagaatcaaaacactgaatacccgacgggtgaatattctgaagggtgaacagcgtcgtgtcagtggcagtgcacgtgtttccctcaagcgtcatatctggctcagggacaccgggcagtgccgtctctgtggtcgtgtggttgacctctgtgacagtgaactcgatcaccgaattgcacttcagttcggtggtggtaatgaggagacgaatctctggacgctctgtaccgaatgccatcgacaaaagtctgctcgtgaagcggcgagtgatatgccggatccgacgctgccggaggtgtccggaggtagtggcagagaggacgacatcatcggactgtaa

SEQ ID NO: 461216 - DNA, 201 bp, Shigella boydii; identical to SEQ ID NO: 18786

SEQ ID NO: 461217 - DNA, 255 bp, Shigella boydii
atgaaaattatcagttttgttctgccttgcttgctggtcctggctggttgttcaaccccttctcagccagaagcacctaaaccgccgcagattggtatggcaaatccggcgtcggtctattgccagcagaagggcgggacgctcattccagtgtcgacagcgcaaggggtcagcaacaattgcaaattaccgggcggtgaaacgattgatgaatgggcattgtggcgacgggaccatccggctggtgaaaaataa

SEQ ID NO: 461218 - DNA, 348 bp, Shigella boydii
atgaatattcagtgcaaacgcgtttatgatccggctgaacagagcgatggttatcgcgtactggtcgaccgcctctggccgcgcggtatcaaaaaaaccgatttagcccttgatgagtgggataaagaaatcacgccgtcaacggaactgcgcaaagcctttcacggcgaagtcgtcgattttacaacctttcgcgagcaatatcttgcagaactggcgcaacacgagcaagaaggaaagcggctggcggacatcgccaaaaaacagccgctgaccctgctctacgcagcaaaaaacaccacgcagaaccatgcgctggtgctggccgactggctacgtagcttgtga

SEQ ID NO: 461219 - DNA, 1197 bp, Shigella boydii
atgacctgttcaacttcattaagcggcaaaaacaggattgtccttatcgctggcattctgatgattgccacaacattacgcgtcacctttaccggcgcagcaccgttactggatacgattcgttccgcttactcgctgacgacagcgcaaaccggcttattgaccaccctgccattattggcctttgcgctaatctcacctttggccgccccggtagcgcgacgttttggtatggaacgtagcctgtttgccgcgttacttttgatctgtgctggtatcgcaattcgctctctcccttcgccttacttattatttggcggtacagcggtcattggcggtgggattgcattaggcaatgtcttactgccaggattaattaaacgcgatttccctcattccgtcgccagacttaccggcgcatattccctgacaatgggagctgcggcggcacttggatcggctatggtaatgccgctggctttgaacggttttggctggcaaggcgcgttgctcatgctgatgtgttttcctctgctggctctttttttatggctgccacagtggcgaagccaacaacatgcaaatttgagtacctcgcgcgccttacatactcggggtatctggcgttcgccgcttgcctggcaggtcacattgtttcttgggagcaactcactggtctattacgtgattattggctggcttccggcgatcctcatcagtcacggctatagcgaagcacaggcgggttcactgcattgtttgctgcaactagccacagcagctcccggtttgctgatccctcttttcttacatcatgtgaaagaccagcgtggtattgcagcgttcgttgccttgatgtgcgcagtgggcgctgttgggctctgctttatgccagcgcacgcgatcacctggactctgcttttcggttttggttccggcgcaacaatgatactggggttgacgttcattggtcttcgggcaagttctgcgcatcaggcggcggcactctcggggatggcacaatccgtcgggtatttgctggcagcctgtgggccgccgctaatgggtaaaatacacgatgctaacggtaactggtccgtaccactgatgggtgttgcaatactttcactactgatggcgattttcggactttgcgccgggagagacaaagaaattcgctcatatccggtgctatag

SEQ ID NO: 461220 - DNA, 615 bp, Shigella boydii
atgcacaggttgaatctcaatggctatgaacccgaccgacaccatgaagccgcggtcgcattttgtattcacgccggaacggatgagttaaccagtcctgtacatcagcaccgcaaaggacagctgatactagcattacatggtgcaattacctgtacggtggaaaatgctttgtggatggtgccgccgcaatatgcggtttggataccgggcggggtggaacatagcaatcaagtgacagctaacgctgaactctgttttctgtttatcgaacccagcgcagtgacaatgccgacaacatgttgcacattgaaaatatcgcccttatgccgggaattgattttaaccctggcaaacaggacgacgactcagcgtgctgagccgatgacccgcagattaatacaggtcctgtttgatgaactccctcagcagccacaacaacagctgcacctgcccgtttcttctcatcctaaaatccgcacgatggtggagatgatggcgaaagggcccgtcgagtgggggtcattagggcaatgggctggcttttttgcgatgagtgaacgcaatcttgcgcgactgatagtaaaagagacggggttgagttttcgccagtga

SEQ ID NO: 461221 - DNA, 447 bp, Shigella boydii
atgtttgatgtcactttgctgatcctgctcgggttagctgcgctgggctttatcagtcataacaccactgtcgccgtttcaattctggtgttgatcattgtccgcgtcacaccgttaagcacctttttcccgtggattgaacaacaggggctaagtatcgggataatcattctgacgattggcgttatggcccccatcgccagcgggacgctaccgccctcaaccttgattcactcgtttctgaactggaaatcgctggtagcaattgcagtaggcgtgattgtctcctggctgggtgggcgcggcgtgaccttaatgggcagccagccgcaactggtcgccgggctgctggtaggcactgttttaggcgtggcgctgtttcgcggcgtaccggtcggcccgcttattgccgcgggtctggtttcgctgattgtggggaaacagtag

SEQ ID NO: 461222 - DNA, 504 bp, Shigella boydii
atgactgaaatggctaaaggaagcgtgacgcatcagcggttaatcgctttattatcacaagaaggtgctaacttccgcgtcgttacccatgaagcggtaggtaaatgtgaagcggtgtcagaaattcgtggcaccgctttaggccagggagctaaggcactggtatgtaaagtcaaaggcaatggcgtaaatcaacatgttctggcgatcctcgctgccgatcaacaggccgatctgagccaacttgccagccatataggcggattacgcgcttcgttagccagccctgctgaagtcgatgaactcacaggctgtgtcttcggcgcgatcccccctttcagcttccatccaaaactcaaactggttgccgaccctctactcttcgaacgatttgatgaaatcgccttcaatgcagggatgctggataaatccgttattttgaaaaccacggattatttgcgcattgcgcaaccagaactggtcaatttccgccgcactgcgtaa

SEQ ID NO: 461223 - DNA, 249 bp, Shigella boydii
gtggaaaacaccattgagctgttaagtattgaaagtatcaaacgttgtgtcgcggcgaatatcggtgtcagttacttgccccgctttgcggtggaaaaagagcttgagagcggagaattaattgaattgccttttggcgaacagtcgcagaccattacggccatgtgcgcacaccatgctggaaaagcggttagcccggcgatgcacacttttattcagtgtattgaagagtgttttttgccgggataa

SEQ ID NO: 461224 - DNA, 1335 bp, Shigella boydii
atgactgtaacgactttttccgaacttgaactcgacgaaagcctgctggaagccctccaggataaaggtttcactcgcccgaccgccattcaggctgccgccattccgcctgcgctcgatggccgtgatgtactcggttctgcgccgacaggcaccggtaaaacggcggcgtatctgctgccagcgttgcagcacctgctcgatttcccgcgtaagaaatccggtccgccgcgtattttgatcctcaccccaactcgcgagctggcgatgcaggtggccgatcatgcccgcgaactggcgaaacatacgcatctggatatcgccaccattaccggcggcgtagcctatatgaaccacgcggaagtgttcagcgaaaatcaggacatcgtggtcgccacgaccggacgtctgctgcaatacataaaagaagagaacttcgattgccgcgcggttgaaacgctgatcctcgacgaagcagaccgtatgctggatatgggcttcgctcaggatatcgaacatattgctggcgaaacgcgctggcgtaaacagaccctgctcttttcggcaacgctggaaggcgatgcgattcaggactttgccgagcgtctgctggaagatccggtggaggtttctgccaatccgtccacccgtgagcgcaaaaaaattcatcagtggtattaccgcgccgatgacctggaacataaaaccgcattgctggtgcatctgttaaaacagccggaagcgacccgctcaattgtgtttgtgcgtaagcgtgaacgtgtgcatgagctggcaaactggctgcgcgaagcgggcatcaacaactgctatctcgaaggtgagatggtacagggcaagcgtaatgaagcgattaaacgcctgaccgaaggccgcgtaaacgtactggtagcaaccgatgttgccgcgcgcggtatcgacattccagacgtcagccacgtctttaacttcgatatgccgcgcagtggtgatacttatttgcaccgtatcggacgtaccgcgcgcgccggtcgtaaaggcaccgcgatttcgctggtggaagcccatgaccatctgctgcttggcaaagttggccgttatattgaagagccgataaaagctcgcgtcattgaggaactacgcccgaaaacgcgtacgccaagcgagaagcagaccggcaagccatcgaagaaagtactggcaaaacgcgccgagaagaaaaaagctaaagagaaagagaagccgcgggtgaaaaaacgccatcgcgacaccaaaaatattggtaagcgccgtaaaccgagcggaacgggcgtgccaccgcaaacgacagaagagtaa

SEQ ID NO: 461225 - DNA, 738 bp, Shigella boydii
atgtcacagtctacatccgtgcttcgtcgtaatggatttacttttaaacagttttttgttgctcacgatcgctgtgcgatgaaagtgggaacggatggcattttgctgggcgcatgggcaccggtggctggggtgaaacgttgccttgatatcggcgcgggtagcgggttgctggcactgatgctggcgcagcgaaccagtgacagcgtgataattgatgccgttgagctggaaagtgaagctgccgcgcaggcgcaggaaaatatcaaccagtccccgtgggcagagcggattaacgtccatacggcggatattcagcagtggctcacacagcagacagtacgcttcgatttaatcatcagtaacccaccttactatcagcagggagtagagtgcgcgatccctcaacgggaacaggctcgctataccactacgcttgatcacccatcgctgctgacctgtgcggcggagtgcattaccgaagagggatttttctgcgtagtgctgccagagcagattggtaatggttttacggagctggcattaagcatgggctggcatttacgtttgcggacggatgtggcggaaaacgaagcgcgactgccgcatcgggtgctgctggcattctccccgcaggcgggagaatgctttagcgatcgcttagtcattcgtgggccagaccagaactattccgaagcgtatacggcgctgacccaggctttttatctgtttatgtaa

SEQ ID NO: 461226 - DNA, 1140 bp, Shigella boydii
atgccattctatttcaggaaggagtgtccgttaaactcaggctacctcagggttgtaggcgcgtgggtatggaaccgaaataaagaaacggtggaaacctgccacgcaaaagcagtggtactggcaaccggcggtgcgtcgaaggtgtatcagtacaccaccaatccggatatttcttctggcgatggcattgctatggcgtggcgcgcgggctgtcgggttgccaatctcgaatttaatcagttccaccctaccgcactgtatcacccacaggcacgcaatttcctgttaacggaagcactgcgcggcgaaggcgcttatctcaagcgcccggatggcacgcgttttatgcccgattttgatgagcgcggcgaactggccccgcgcgatattgtcgcccgcgccattgaccatgaaatgaaacgcctcggcgcagattgtatgttcctcgacatcagccataagcccgccgattttattcgccagcatttcccgatgatttatgaaaaattgctcgggctggggattgatctcacacaagaaccggtaccgattgtgcctgctgcacactatacctgcggtggtgtaatggttgatgatcatgggcgtacggacgtcgagggcttgtatgccattggcgaggtgagttataccggcttacacggcgctaaccgcatggcctcgaattcattgctggagtgtctggtctatggctggtcggcggcagaagatatcaccagacgtatgcctgatgcccacggcgtcagtacgttaccaccgtgggatgaaagccgcgttgagaaccctgacgaacgggtagtaattcagcataactggcacgagctacggctgtttatgtgggattacgtcggcattgtgcgcacaacaaaacgtcttgagcgcgccctgcggcgtatcaatatgttgcaacaggaaatagacgaatattacgcccacttccgcgtgtcgaataatttgctggagctgcgtaatctggtgcaggttgcggaattgattgttcgctgtgccatgatgcgcaaggagagtcgtggcctgcatttcacactggattatccggaactgctcacccattccggtccgtcgatcctttcccccggcaatcattacataaacagataa

SEQ ID NO: 461227 - DNA, 339 bp, Shigella boydii
atgatcgagccgctacgggaattgttggttaacccgccgctggaaaactcgcgtaatgaagatcagaactggcgcgataacctggtgcgccaggtgcagcattcacagctggagctggtcaccaactttgccgatatctcgctacgcctgtcgcagattttaaaactgaaacccggcgacgtcctgccgatagaaaaacctgatcgcatcatcgcccatgttgacggcgtcccggtgctgaccagtcagtacggcactctcaacggtcagtatgcgttacggatagaacatttgattaacccgattttaaattctctgaacgaggaacagcccaaatga

SEQ ID NO: 461228 - DNA, 414 bp, Shigella boydii
atgagtgacatgaataatccggccgatgacaacaacggcgcaatggacgatctgtgggctgaagcgttgagcgaacaaaaatcaaccagcagcaaaagcgctgccgacgcggtgttccagcaatttggcggtggtgatgtcagcggaacgttgcaggatatcgacctgataatggatattccggtcaagctgaccgtcgagctgggccgtacgcggatgaccatcaaagagctgttgcgtctgacgcaagggtccgtcgtggcgctggacggtctggcgggcgaaccactggatattctgatcaacggttatttaatcgcccagggcgaagtggtggtcgttgccgataaatatggcgtgcggatcaccgatatcattactccgtctgagcgaatgcgtcgcctgagccgttag

SEQ ID NO: 461229 - DNA, 366 bp, Shigella boydii
atgaataaccacgctactgtgcaatcttccacgccggtttctgctgcgccactgctgcaggtcagcggcgcactcatcgccattattgccctgatcctcgctgctgcctggcaggtaaaacggttgggatttgccccgaaacgcactggcgttaacggtctgaaaattagcgccagtgcttcgctgggcgcgcgtgaacgggttgtggtggtcgatgtggaagatgcacggctggtgctcggcgttaccgcagggcaaatcaatctgctgcataaacttcccccttcagcaccaacagaagagataccgcagaccgattttcagtcggtcatgaaaaatttgcttaagcgtagtgggagatcctga

SEQ ID NO: 461230 - DNA, 738 bp, Shigella boydii
atgcgtcgtttgttgtctgtcgcacctgtccttctctggctggttacgcccctcgccttcgcgcaactgccgggtatcaccagccagccgctgcctggcggtggacaaagctggtcgctcccggtgcagacgctggtgttcatcacctcgttgacgtttattccggcaattttactgatgatgaccagtttcacccgcatcatcattgtttttggtttattgcgtaacgcgctgggaacgccctccgcgccacctaaccaggtattgctggggctggcactatttttgaccttttttattatgtcaccggtgatcgacaaaatttatgtcgatgcgtaccagccattcagcgaagagaaaatatcaatgcaggaggcgctggaaaaaggggcgcagccgctacgtgagtttatgctgcgtcagacccgtgaggcagatttagggttgtttgccagactagcgaataccggcccgttgcagggacctgaagccgtgccgatgcgcattttgctcccggcctacgtgaccagcgagttgaaaaccgcatttcagataggcttcacgattttcattccttttttgattatcgacctggtgattgccagcgtgttgatggcattggggatgatgatggtcccccccgccaccattgctctgccctttaaactgatgctgtttgtactggtggatggctggcaattgctggtcggttcgctggcgcagagcttttacagctag

SEQ ID NO: 461231 - DNA, 270 bp, Shigella boydii
atgacacctgaatcggtcatgatgatggggactgaagcgatgaaagtcgtgctggcactggctgccccgctgttgctggtggcgctggtcacgggccttatcatcagtattttgcaggccgccacgcagatcaacgaaatgacgctgtcgtttattccaaaaatcatcgccgtatttattgccattattattgccggaccgtggatgctcaatctgttgctggattacgtccgcaccttgttcactaacctgccgtatatcatcgggtag

SEQ ID NO: 461232 - DNA, 786 bp, Shigella boydii
atgatgcaggtgacaagcgatcaatggctttcctggttaagcctgtacttctggccgttactgcgcgtgctggcgctcatttctaccgcaccaattctgagcgaacgcagcgtgccgaaacgggtaaaactggggctggcaatgatgatcacgttcgtcattgccccatcattacctgccaacgatgttcctgttttttcgttctttgctctgtggctggccgtgcagcagatcctgatcggcattgcgcttggttttaccatgcaatttgcctttgccgctgtgcgaaccgctggcgaaattatcggtctgcaaatggggctgtcatttgcgacgtttgtcgatccggccagccatctcaatatgcccgttttagcgcgtatcatggatatgctggcgttactgctgttcctgacatttaacggtcatttatggttgatttcactgctggtcgatacctttcacaccctgccaattggtggcgaaccgttgaacagcaatgcgtttctggcactcaccaaagcggggagtttgattttctttaacgggctgatgctggcgttaccgctcattactctgctgctgcccctgaatctggcattaggtttactgaatcgtatggccccgcaattatccatttttgttattggatttccattaactctgactgtcggtatctctttaatggcggcattaatgccgttaattgcacctttttgcgaacatttattcagtgagatgtttaatttgctggctgatattattagtgaattgccattaatataa

SEQ ID NO: 461233 - DNA, 612 bp, Shigella boydii
atgtcaacgattattatggatttatgtagttacacccgactaggtttaaccgggtatctgttgagtagaggggttaaaaaaagagaaatcaacgacattgaaaccgttgatgaccttgccatagcttgtgattcacagcgcccttcagtggtgtttattaatgaggactgtttcatccatgatgcttctaacagtcagcacatcaagcacatcaagcacatcattaatcaacatcccaatacgttatttatcgtttttatggcaattgccaatgttcattttgatgaatatctattggccagaaaaaatttattgataagttctaaatcgattaaaccggaatctctcgacaatatccttggcgatattctgaaaaaagagacaacgataacctcttttttaaatatgccgacgttatcattgagccgaaccgaatcgagtatgttgcgaatgtggatggcaggtcagggaaccattcaaatctctgaccaaatgaatatcaaagccaagaccgtttcatcgcataaaggtaatattaaacgtaagatcaaaacgcataataaacaggttatctaccatgtcgtccgactgacggataatgtgactaggtga

SEQ ID NO: 461234 - DNA, 1230 bp, Shigella boydii
atgtctaatatttggtctaaagaagaaactctgtggagtttcgcgctctacggcacagccgttggtgcaggcacgctcttccttcctattcagttaggttcggcaggggctgtggtcctgtttattactgctctggtcgcctggcctttaacatattggccacataaagctttatgccagttcatcctctcatcgaaaacatcagcaggtgaagggataacgggcgcggtaacacactactatggcaagaagattggtaatctgattaccacgctgtacttcatcgccttttttgtcgtcgtgttgatatatgcagtggcaattaccaactcacttacagaacagctggcaaagcatatggttattgatcttcgcatccgtatgttggtgagtctgggtgttgtattaatcctgaatctcatttttctgatgggacgccatgcaaccattcgggtaatgggttttttggtattcccattgattgcctatttcttatttctttccatttaccttgtcggtagttggcaacctgatctattaacgacccaggtagagttcaatcagaatccccttcaccagatatggatatcgattcccgtgatggttttcgcctttagccatacgcccattatttctacgtttgccatagacagacgtgaaaaatatggcgaacacgctatggataaatgcaaaaaaattatgaaagtcgcttatctcatcatctgcataagtgtactgttctttgtctttagctgcctgctttctattccaccttcgtatattgaagcggctaaagaagaaggggtcaccattttatcggcgctttctatgctgccgaacgccccagcatggttgtcaatttccgggattattgtcgcagtagttgcgatgtcgaaatcattcctgggtacgtactttggcgttattgaaggtgccacggaggtcgtcaaaacaacactacagcaggttggtgtaaagaaaagtcgtgcatttaaccgcgcactatcaattatgttggtatcgctgattaccttcattgtttgttgcattaacccgaacgcgatttcgatgatttatgcgatcagcggcccgctcattgccatgatacttttcatcatgcctacgttgtcaacgtatctgatcccggcgcttaaaccctggcgctccatcggaaatctgattacgctgatcgtgggtatcctgtgcgtatcggtaatgttctttagctaa

SEQ ID NO: 461235 - DNA, 1182 bp, Shigella boydii
atgaaagacgttgtgattgtcggggcgttacggacacctatcggctgctttcgtggtgcgttagcgggtcattccgccgtggaacttggtagtttggtcgtgaaagcgttaatagaacgtaccggcgttcctgcatatgcggtggatgaagtaattcttggtcaggtgttgactgcaggggcagggcagaatccggcaaggcaatcggctattaaaggtggtcttcctaatagcgtttctgcaatcactattaatgacgtttgcggttctgggcttaaagcactgcatctggctactcaggcgatacagtgtggcgaggctgatattgtcatcgccggtggccaggaaaacatgagccgcgcaccacatgttctgactgatagccgcaccggtgcacagcttggcaatagccagttggttgacagtctggtgcatgatgggttgtgggatgccttcaatgattatcatattggtgtcaccgccgaaaatctggctcgcgaatatggcatcagccgtcagttgcaggatgcttacgcacttagctcgcaacaaaaagcgcgagcggcgattgacgccggacgatttaaagatgagatcgtcccggtaatgatccaaagtaacggtcagacgttggttgttgataccgatgaacagccatgcactgacgccagtgcagaaggtttagcccgtttaaatccttcatttgatagtctcggttctgtgaccgcggggaatgcatcatccataaacgatggcgcagctgcggtaatgatgatgagcgaagccaaagcacgagcgttgaatttacccgtgctggcccgcatccgcgcatttgccagcgttggtgtagatccggcattgatgggaattgcgccggtgtatgcgacccgccgttgcctggagcgtgtaggctggcagttggctgatgtcgatcttatcgaggctaatgaagcgtttgctgcacaggcgctttcggttggcaagatgcttgagtgggatgagcgtcgggtcaatgtcaatggtggcgcgatcgcactcggtcacccgataggcgcttccggttgccgaatcctggtttctctggttcatgaaatggtgaaacgtaatgcccgcaaagggctggcaacgctttgtatcggcgggggccagggcgtggcattgaccattgaacgtgacgagtag

SEQ ID NO: 461236 - DNA, 825 bp, Shigella boydii
gtggacgtaagacagagcatccacagtgcgcacgcaaaaacgctggatacccaagggctgcacaatgaatttttggttgaaaaggtatttgtcgccgatgagtacaccatggtttacagccacattgaccgaattattgttggcggcattatgccgataactaaaacggtttccgttggcggggaagttggtaaacaactcggcgtaagctatttccttgaacgtcgcgagttaggtgttatcaatattggcggtgccggtacgattactgtcgatggccaatgctatgaaatcggtcaccgcgacgccctgtatgttggtaaaggtgcaaaagaagttgtctttgccagtattgataccgccatttattacaattgcgcacccgcgcatacgacgtatcccaccaaaaaagtcaccccggacgaagtatctccagtcacgttaggcgataacctcaccagtaaccgtcgcactattaacaaatattttgtcccggatgtgctggaaacctgccaattgagtatggggctgacggagctggctccaggtaacttgtggaacaccatgccgtgtcacacccacgagcgccggatggaagtttatttctatttcaatatggatgatgacgcctgcgttttccacatgatggggcaaccgcaagaaacgcgtcacattgtgatgcataacgagcaggcggtgatctccccgagctggtcgattcattccggcgtcggaaccaaagcttatacctttatctggggcatggttggtgaaaaccaggtctttgatgatatggaccatgtggccgttaaagatttgcgctag

SEQ ID NO: 461237 - DNA, 420 bp, Shigella boydii
ttggagtcattacctgcactggcaacaataacagcagccattatctatctgtacccttctccactggtgtgtaatgccggcgcctttgttatcggtttctcagcagctggcggcattttacagctcggtgtttcggtcatgtcagagtttttcccaaaaagcaaagccaaagtcaccagtatttatatgatgatgggtggactggctaactttgttattccgctgattaccggttatctgtcgaacatcggccttcaatatatcattgttctcgattttactttcgcgctgctggccctgattaccgcaattattgtttttatccgctattaccgcgtttttattattcctgagaatgatgtgcggtttggcgagcgtaaatttagcacccggttaaacacaattaagcatagaggttaa

SEQ ID NO: 461238 - DNA, 867 bp, Shigella boydii
atggatgttaccgcaaaatacgaattgattgggctgatggcctatcctatccgccacagtttatcgcctgaaatgcagaataaagccttagaaaaagcgggattgccatttacctatatggcctttgaagtggataacgatagttttcccggagcaattgaaggattaaaagctctaaaaatgcgcggaactggtgtatcaatgccgaacaaacaactggcttgtgaatatgttgatgaattaacgccagcagccaaactggtgggtgccatcaacaccatcgttaatgatgatggctacctgcgcggctataacaccgacggcacgggccatattcgcgccattaaagagagcggttttgatatcaaaggcaaaacaatggtgctgttaggggccggaggtgcctcaacggcgattggcgcgcagggggcaattgaaggtttaaaagaaattaaactctttaaccgtcgggatgagttcttcgataaagccctcgccttcgcgcagcgggttaacgaaaacaccgattgtgtcgtcacggttaccgatctcgccgatcagcaagcctttgctgaagccctggcttccgccgacattttaaccaatggcacaaaagtgggtatgaaaccccttgagaatgaatcattagttaatgatatcagtctgttacatccgggacttctggtcactgaatgcgtgtataacccgcatatgacgaagttattgcagcaggcgcaacaagctggttgcaaaacgattgatggatacggcatgttgttgtggcaaggggctgaacagttcacgttatggactggcaaagatttccctctggaatatgttaaacaggtcatggggttcggtgcctga

SEQ ID NO: 461239 - DNA, 759 bp, Shigella boydii
atgaaaaccgtaactgtaaaagatctcgtcattggtacgggcgcacctaaaatcatcgtctcgctgatggcgaaagatatcgcccgcgtgaaatccgaagctctcgcctatcgtgaagcggactttgatattctggaatggcgtgtggaccactttgccgacctctccaatgtggagtctgtcatggcggcggcaaaaattctccgcgaaaccatgccagaaaaaccgctgctgtttaccttccgcagtgccaaagaaggcggcgagcaggcgatttccaccgaggcttatattgctctcaatcgtgcagccatcgacagcggcctggttgatatgatagatctggagttatttaccggcgatgatcaggttaaagaagccgtcgcctgcgcccacgcgcatgatgtgaaagttgtcatgtccaaccatgacttccataaaacgccggaagccgaagaaatcattgcccgtctgcgcaaaatgcagtccttcaacgccgatattcctaagattgcgctgatgccgcaaagtaccagcgatgtgctgacgttgcttgccgcgaccctggagatgcaggagcagtatgccgatcgtccaatcatcacaatgtcaatggcaaaaactggcgtaatttctcgtctggctggtgaagtatttggctcggcggcaacttttggtgcggtaaaaaaagcctctgcgccagggcaaatctcggtaaatgatttacgcacagtattaactattttacatcaggcataa

SEQ ID NO: 461240 - DNA, 1584 bp, Shigella boydii
atgaaacctgtaaaaccacctcgtattaatggacgagtgccggtcctgtcggcacaggaagcggtgaattatattcccgacgaagcaacactttgtgtgttaggcgctggcggcggtattctggaagccacgacgttaattactgctcttgctgataaatataaacagactcaaacgccacgtaatttatcgattattagtccaacagggcttggcgatcgcgccgaccgtggtattagtccgctggcgcaagaaggtctggtgaaatgggcattatgtggtcactggggacaatcgccgcgtatttctgaactcgcagaacaaaataaaattattgcttataactatccacaaggtgtacttacacaaaccttacgcgccgccgcagcccaccagcctggtattattagtgatattggcatcgggacatttgtcgatccacgccagcaaggcggcaaactgaatgaagtcacgaaagaagacctgattaaactggtcgagtttgataacaaagaatatctctattacaaagcgattgcgccagatatcgccttcattcgcgctaccacctgcgacagtgaaggctacgccacttttgaagatgaggtgatgtatctcgacgcattggttattgcccaggcggtgcacaataacggcggtattgtgatgatgcaggtgcagaaaatggttaagaaagccacgctgcatcctaaatctgtccgtattccgggttatctggtggatattgtggtggtcgatccggatcaaagccaactgtatggcggtgcgccggttaaccgctttatttctggtgacttcactcttgatgacagcaccaaacttagcctgcccctaaaccaacgtaaattagttgcgaggcgtgcattattcgaaatgcgtaaaggcgcggtggggaatgtcggcgtcgatattgctgacggtattggcctggtcgcccgggaagaaggttgtgctgatgactttattctgacggtagaaacaggtccgattggcggaattacttcacaggggatcgcctttggcgcgaacgtgaatacccgtgccattctggatatgacgtcccagtttgatttttatcacggtggtggtctggatgtttgttatttgagttttgctgaagtcgaccagcacggtaacgtcggcgtgcataaattcaatggcaaaatcatgggtaccggtggatttattgatatcagtgccacctcgaagaaaattattttctgcggcacgttaaccgcgggcagtttaaaaacagaaattgccgatggcaaattaaatatcgtccaggaaggacgggtgaagaaatttattcaggaactaccggaaattacttttagcggaaaaatcgcgctcgaacgggaactggatgttcgttacatcaccgaacgtgctgtattcacgctgaaagaagacggcctgcatttaatcgaaatcgcccctggcgtcgatttacaaaaagatattctcgacaaaatggatttcaccccagtgatttcgccagaactcaaactgatggacgaaagattatttatcgatgcggcggtgatgctgccaacttactga

SEQ ID NO: 461241 - DNA, 276 bp, Shigella boydii; identical to SEQ ID NO: 458859

SEQ ID NO: 461242 - DNA, 1686 bp, Shigella boydii
atgtacgattttaatctggtgttgctgctgcttcagcagatgtgcgtttttttagtcattgcatggttaatgagtaaaacgccattattcataccgttaatgcaggtcacggttcgtctgccgcataaatttctctgctacatcgtcttttccatcttctgcatcatgggcacctggtttgggttgcacattgacgattctattgccaatacccgtgcgataggcgcggtcatgggcggcttactcggcggtccggtcgtcggtgggctggttggcctgaccggcgggttacatcgatattcgatggggggcatgaccgcgctaagttgcatgatctcgaccatcgttgaaggattgctcggcggcctggtacacagcatcctgatccgtcgcgggcgcactgataaagtctttaaccccattaccgccggtgccgtcacgttcgtcgctgaaatggtgcaaatgttgatcatcctggcgatcgcccgaccttatgaagatgcggtgcgtctggtgagtaatattgctgcgccaatgatggtcaccaataccgtcggcgcggcgctgtttatgcgtatattgctagataaacgcgcgatgtttgaaaaatacacttcggctttttctgccactgcgctgaaagtggctgcctcgacggaaggcattttgcgccaggggtttaacgaagtgaacagcatgaaagtggcacaggtgctgtatcaggagctggatattggtgcagtcgcgattaccgatcgagagaaattgctggcctttaccggaattggtgacgaccaccatatacccggcaaaccgatatcttcgacttacaccttaaaagcgattgaaaccggtgaagtggtctacgctgatggcaacgaagtaccttatcgttgctctttgcatccgcaatgcaaactggggtcgacgctggtaattccgttgcgtggtgaaaatcagcgggtgatgggcaccatcaaattgtatgaagccaaaaaccgtttattcagttcaatcaaccgcacgctgggcgaggggattgcgcaactgctttcggcgcagatcctcgccgggcaatatgagcggcaaaaagcgatgctcacccagtcagagatcaaactgcttcacgcccaggtgaacccccattttttgtttaatgcgcttaacaccattaaagcggtgagccgtcgcgacagcgaacaggccagccagctggtgcagtatctttccacttttttccgcaaaaacttaaagcggccttcggagtttgttactctcgccgacgaaattgaacatgtgaacgcttatctgcaaattgaaaaggcgcgcttccagtcgcggttgcaggtcaacattgctattccgcaagaattatcccagcagcaattgcccgcgtttaccctgcaaccgatagtggaaaacgccattaaacatgggacatcacaactgctggatacagggcgagtggcaatcagcgcccgacgtgaggggcaacatttgatgctggagatcgaagacaatgccggtttgtatcaaccggtaaccaatgccagtgggctggggatgaatctggtggataagcgtttacgtgaacggtttggcgatgactatgggataagcgtcgcctgtgagcctgatagttacacccgaataacgttacgactaccatggagggacgaggcatga

SEQ ID NO: 461243 - DNA, 720 bp, Shigella boydii
atgattaaagtcttaattgtcgatgatgaaccgttagcacgggagaacctgcgcgtatttttgcaggagcagagcgatattgaaatcgttggtgagtgttcaaacgccgtggaagggatcggcgcggtgcataaactgcgcccggatgtgctgtttctcgatatccagatgccgcgcatcagtggtctggaaatggtggggatgctcgacccggaacatcgtccgtatattgtttttctcaccgcgtttgacgaatacgccattaaagcctttgaagaacacgcctttgattatctgctgaagccaattgatgaagagcgactggagaaaacgctggcgcgtttgcggcaggaacgcagcaagcaggatgtttcgctgttaccagaaaatcaacaggcgctgaaatttatcccttgtactgggcatagtcggatttatttgctgcaaatgaaagatgtggcatttgtcagcagtcggatgagcggtatctacgttaccagccacgaagggaaagagggctttaccgaattgacattacgtaccctggaaagtcgtacaccactactgcgctgccatcgtcagtatctggttaacctcgcgcatttacaggagattcgtctggaagataacggccaggccgagttgattttgcgtaatggcttaaccgtgccggtcagccgccgttatctgaaaaccttaaaagaggcgattggcctgtaa

SEQ ID NO: 461244 - DNA, 471 bp, Shigella boydii
atgctaagtaacgatattctgcgcagcgtgcgctacattttgaaagccaataataatgacctggtgcgtattctggcgctgggtaatgtcgaagccaccgcggaacagatcgccgtctggctacgtaaagaagacgaagagggttttcagcgttgtccggacattgttttgtcgtcattcctcaatggcctgatttatgaaaaacgcggcaaggatgagtctgctccggcactggagccggaacgtcgcattaataacaacatcgtgctaaaaaaattacgcatcgcgttttcgctgaaaaccgatgacattctggcgatcctcaccgaacagcagttccgcgtttcgatgccggaaattacggcgatgatgcgtgcaccggatcataaaaacttccgcgaatgcggcgatcaatttttacgttattttctgcgtggactggcagcgcgccagcatgtgaagaaaagctaa

SEQ ID NO: 461245 - DNA, 147 bp, Shigella boydii
gtgactatcgatatggaaaaagtggattttaaagccctgcagggtatttcaggaatcaacgtttctgctgaagataccaaaaaaggtatcactatggcgcaaatggaactggtgatgaaagccgctggttttaaagaagtgaaataa

SEQ ID NO: 461246 - DNA, 765 bp, Shigella boydii
atgtatcgctggttcctgcgccatttccgacgcggcggtagttatgccgatattcatcatgcactgattgaggaaggatatacggactgggcggagagtctggttgagtatgcgtggaaaaaatggctggcggatgaaaacttcgcgcatcaggaagtttcctctatgcaaaaactggccacagaccccggagagataccattttgcagtcagtttgcccgcagcgacgatcatgctcgcatcggctgttgtgaggataacgcccgaatcgcaatcgctgggtatgccgcgcaaattgccagtatgggttatagcgtgcggattggaagtgtcggctttaacagtcacattggcagctccggtgaacgcgcacgggttgctgtaaccggtaattcttcgcggataagcagcgctggagatagtagtcggattgcgaataccggaatgcgagtacgcgtttgtacattgggtgaacggtgtcatgtcgccagtaatggtgacctggtgcaaatcgccagctttggcgcaaacgccagaattgccaacagcggcgacaatgtacacatcattgccagcggtgaaaattcaacggtagtgagcacgggcgtggtcgactcaattattctcgggccagggggaagcgccgcactggcatatcatgacggcgaaagagttcgcttcgccgtcgccattgaaggtgaaaacaatattcgaaccggagtccgctatcgtcttaatgaacagcatcagtttgttgagtgctga

SEQ ID NO: 461247 - DNA, 786 bp, Shigella boydii
atgaacccgtcgcaacatgctgaacagtttcagagccagttagcgaactatgtgccacagttcactcccgaattttggccggtgtggttgatcattgccggagtattgctggttgggatgtggttggtgctggggctgcacgccttgcttcgtgctcgtggcgtgaagaaatcagccaccgatcatggtgagaaggtttatctttacagcaaagcggtcagattatggcactggtcgaatgcgttactctttgtattgttgctggcaagtgggctgataaatcactttgcgatggtgggcgcaactgcggttaaaagtctggttgcggtgcatgaagtttgcggatttttgttactggcatgctggctcggctttgtgctgatcaatgccgttggggataatggtcaccactatcgcattcgtcgtcaggggtggctggaacgagcggcaaaacaaacgcgattttatttgtttggcattatgcagggggaagaacatcctttcccggcaacaacacagtctaaatttaatcccttacagcaggtcgcctatgttggtgtcatgtatggattgctgccgttgttactattgacggggctgttgtgtctctatccgcaagccgtgggagatgtgtttcctggcgtaagatactggttattgcaggcgcattttgctctggcatttataagcctcttttttatcttcggacatctttatctttgcaccacggggcgtacgccacacgaaacctttaaaagcatggtcgatggctatcaccggcactaa

SEQ ID NO: 461248 - DNA, 669 bp, Shigella boydii
atgtccttcactcgacgcaaatttgttctggggatgggaacagtaatcttttttactggttctgcgtcttctctgttagcgaacacgaggcaagaaaaggaagttcggtatgccatgattcatgacgagtcacggtgcaatggctgtaatatttgcgcccgcgcatgccgtaaaactaaccacgtccccgctcagggaagccgtttatcgatagcacacattccagtcaccgataacgacaacgaaacgcagtatcacttttttcgccagtcatgtcagcactgcgaagatgctccgtgcatcgacgtttgcccgacgggggcatcgtggcgtgatgagcaggggctcgtgcgggtagaaaaatcgcagtgcatcggctgcagttattgcattggcgcttgtccgtaccaggttcgctaccttaaccctgtcactaaagtggcagataaatgtgatttctgcgctgagtcccgactggcaaaaggctttccgcccatttgcgtcagcgcctgtccggaacacgcattgatctttggtcgcgaagatagcccagaaattcaggcgtggttgcaggataataaatactatcaatatcagctacctggtgccgggaaaccgcatctgtatcgccggttcggtcaacatttgattaaaaaggaaaatgtatga

SEQ ID NO: 461249 - DNA, 639 bp, Shigella boydii
atgaaccatcgggatgaattgccgttagcgaaagtcagcgaagttgacgaggcgaagcggcaatggttacaggggatgcgtcaccccgttgatacggtaaccgaaccagaaccggctgaaatcctggcagagttcattcgccagcattctgcggctgggcagctggtggcgcgcgccgtgtttctctcgccaccctattcggttgcagaagaggagctgtcagttttgctggaaagcattaagcagaacggagactacgctgatatcgcttgtatgacgggaagccaggatgattactattactcaacgcaggccatgagtgaaaactacgcggcgatgtctttgcaagttgtggagcaggacatttgtcgcgccattgcacacgccgttcgttttgagtgccagacatatcctcgtccttacaaagtcgccatgctgatgcaagcgccatattacttccaggaagcgcagattgaagccgcgatcgccgcgatggatgttgcacctgaatatgccgatatacggcaggtggagtcatcgacggcggagttgtacttgtttagtgagcgatttatgacctatggcaaggcttatggcttatgcgaatggttcgaggtagagcagtttcagaacccctga

SEQ ID NO: 461250 - DNA, 642 bp, Shigella boydii
atgttcaaccgtgactgcatgacacatacccatatcaactttattggttccggcttgccattgaaactgcaacgtgaagtggcgaaagagctttttggttctgaagatgcctacgatgaaaccaaaaactacacgccaatcaatgacgcaaaaattaaatatgctaagtggtcgctgttgcgggtctgtttgcataacgccgtcaccctgtgtaactgggtctggccaatgaccgtttcgccgctgaaaagccgtaattaccggggcgatctggcgcttgaagccaaattcttcaaagcgatcaccggcgaagagatgactcaggaaaaattagatttagctgcagagcgtatctttacgttgcatcgtgcctacacggtaaaacttatgcaaaccaaagatatgcgtaatgaacacgatcttatctgttcctgggtattcgacaaggatccgcagatcccggtctttactgaaggtactgacaaaatggatcgtgacgatatgcatgcttcgctcacgatgttctacaaagaaatgggctgggacccacagcttggtagtcccacccgcgaaacattgcagcgtctggggctggaagatattgccgccgatctggcagcacacaatctactgcctgtgtaa

SEQ ID NO: 461251 - DNA, 234 bp, Shigella boydii
atgtcgcatctggatgaagtcatcgcgcgcgtggatgccgcgattgaagagagcgtcattgcccatatgaacgaattattaatcgccctgagcgatgacgcggagttaagtcgggaagatcgctacacccagcagcagcgtttgcgcaccgctattgctcatcacggtcgcaagcataaagaagatatggaagcgcgccacgaacagttaaccaaaggcggcaccatcctctga

SEQ ID NO: 461252 - DNA, 549 bp, Shigella boydii
atgaatcagtcgctcacccttgcttttttgattgccgccggaattggtctggtagtccagaacacgctgatggtgcgcatcacccagacctcctctaccattctcatcgccatgttgctgaactcactggtggggattgtgctctttgtttctattttatggtttaaacaaggcatggcggggtttggcgaactggtgtccagcgtgcgctggtggacacttatacccggcttgctgggatcgttttttgtcttcgccagtatcagcggatatcagaatgtgggagcggcgacaactattgcagtactggtctattgcagtactggtcgccagccagctaattggcggtctgatgctggatatcttccgcagtcatggcgtaccactacgggcgttgttcagcccaatttgtggcgcaattttacttgtggttggcgcctggttggtagccagacgctcattttaatcagaggatggtgccgcctttggttaactgttcgtggcgcgcttccatatcttctttatgcttgcgaccgtgatgagcaatag

SEQ ID NO: 461253 - DNA, 519 bp, Shigella boydii
atgtccatccgttttgcccgcaaagccgattgtgctgccattgcggaaatttataaccacgccgtgttgtatacggcggctatctggaatgaccaaacggttgatgcagataaccgcattgcctggtttgaagcgcggaccatagcaggttatccggtgctggtaagtgaagaagatggcgtagtgacgggatatgcctcgtttggcgactggcgtagtttcgatggttttcgccataccgtggaacattcggtttatgtccatcccgatcatcagggcaaaggtctggggcgtaaattgttaagccgattgattgatgaagcgcgggatagcgggaagcatgtcatggtcgccgggatcgaatcgcaaaatcaggcctcgctgcatctgcaccattcgctgggatttgtcgtcaccgcacaaatgccgcaggtgggcactaaatttgggcgctggctggatctgacatttatgcagttgcaactcgacgaacgcactgaaccggacgcgattggatga

SEQ ID NO: 461254 - DNA, 1038 bp, Shigella boydii
atggggcaacaaaagcagcgtaatcgacgttgggttctggcctcgcgtccacatggcgcaccggttccggagaatttccgtcttgaagaagatgatgtcgccacaccgggtgaaggacaggtgttactgcgcacagtttatttgtccctggacccgtatatgcgtggacgtatgagcgatgagccatcttattcaccgcctgttgatattggcggcgtgatggtcggcggcacggtgagccatgttgtggagtcgaatcatcctgattatcagcctggcgactgggtgctgggctacagtggatggcaggactatgacatatccagtggtgatgatctggtgaaacttggcgatcatccgcaaaatccatcgtggtcgctgggtgtgctggggatgccaggctttaccgcttatatggggctgctggatatcggtcagcctaaagagggcgaaacgttggtggtagctgcggcgacaggtcctgtgggagcaacggtggggcaaatcggcaaacttaaaggttgcagggtggtggggggtgccggtggcgcggaaaaatgccgccatgctatcgaggtgctgggcttcgatgtttgtcttgatcaccacgcgggtgattttgccgaacaactggtgaaagcgtgcccaaaaggtattgatatctattatgaaaacgtgggcggtaaggtatttgatgcagtgctaccattacttaatacatctgcgcgcattcccgtttgtggcttagtgagcagctataacgctacagagctaccacccggtccggatcgtttacccctgttgatggcaacggtgctgaaaaaacgtattcgcttgcaagggtttattatcgctcaggattatggtcaccgcatccatgagtttcagaaggagatggggcaatgggtgaaagaggataaaatccactaccacgaagatattactgatggtttagagaatgcgccacagacgtttatcggcctgctgaagggtaaaaacttcggcaaagtggtgatccgcgtcgcgggtgatgattaa

SEQ ID NO: 461255 - DNA, 303 bp, Shigella boydii
atgcctggaatgggaaaaatgaaacatgtcagtttgactctgcaggttgagaacgacctgaaacatcagcttagtattggcgcattaaaacctggcgcacgcctgattactaaaaatctggcggagcaattaggtatgagtattacacctgtgcgtgaagcattattacgtctggtttcggtgaatgcgctttctgtcgcacctgcacaagcatttacagttccggaagtggggaaacgtcaattagacgaaatcaatcggatccgctacgaactgggtaatgctgccaacttactgatttag

SEQ ID NO: 461256 - DNA, 1146 bp, Shigella boydii
atgaaaatcgtaatcgccccagactcttataaagaaagtttatctgccagcgaggttgcgcaggcgatagaaaaaggatttcgggaaatttttcctgatgcacagtacgtttctgttccggttgccgacggtggcgaaggaacggtggaagcgatgattgcagccacccagggttccgaacgtcacgcctgggttacagggccgttgggcgagaaagtgaatgccagttgggggatctccggcgatggcaaaaccgcgtttattgaaatggcggcggccagtgggctggagctggtacctgcggaaaaacgcgatccactcgtgaccacttcacgcggcacaggcgagttaatcctgcaggcgctggagagcggtgcgacaaacattattatcggcattggcggcagcgctacaaatgatggcggcgcaggcatggtacaggcgctgggggcgaaattatgcgacgccaacggcaatgaaattggttttggcggcggtagtcttaatactctgaatgatattgatatttccggcctcaatccgcgcttaaaagattgcgtcattcgcgtcgcttgtgatgtcaccaatccgctggtgggcgataacggcgcatcgcgcatctttggctcacaaaagggagccagtgaagcgatgattgttgagctggacaataacctctctcactatgccgaggtcattaaaaaagcgctgcatgttgatgtgaaagatgtccccggcgcaggagctgcgggcggtatgggcgcggcgctgatggcgtttcttggtgcggaactgaaaagtggtattgaaatcgtcactacggcgctgaatctggaagaacatattcacgattgtacgctggtgatcaccggtgaagggcgtattgacagccagagtattcacggcaaggtaccgattggtgtcgcaaacgtggcgaagaagtaccataaaccggtgattggcattgcgggtagcctgaccgatgatgttggcgttgtacatcagcatggcattgatgcggtcttcagcgtattgaccagcataggtacgttggacgaagcattccgcggggcttatgacaatatctgccgtgcttcacgtaatatcgccgcgacactggcgattggaatgcgcaacgcggggtga

SEQ ID NO: 461257 - DNA, 891 bp, Shigella boydii
atgactatgaaagttggttttattggcctggggattatgggtaaaccaatgagtaaaaaccttctgaaagcaggttactcgctggtggttgctgaccgtaacccagaagctattgctgacgtgattgctgcaggtgcagaaacagcgtctacggctaaagcgatcgctgaacagtgcgacgtcatcataaccatgctgccaaactcccctcatgtgaaagaggtggcgctgggtgagaatggcattattgaaggcgcgaagccaggtacggtattgatcgatatgagttctatcgcaccgctggcaagccgtgaaatcagcgaagcgctgaaagcgaaaggcattgatatgctggatgctccggtgagcggcggtgaaccgaaagccatcgacggtacgctgtcagtgatggtgggcggcgacaaggctattttcgacaaatactatgatttgatgaaagcgatggcgggttccgtggtgcataccggggaaatcggtgcaggtaacgtcaccaaactggcaaatcaggtcattgtggcgctgaatattgctgcgatgtcagaagcgttaacgctggcaactaaagcgggcgttaacccggacctggtttatcaggcaattcgcggtgggctggcgggcagtaccgtgctggatgccaaagcgccgatggtgatggaccgcaacttcaagccgggcttccgcattgatctgcatattaaggatctggcgaatgcgctggatacttctcacggcgtcggcgcgcaactgccgctcacagctgcggttatggagatgatgcaggcactgcgtgcagatggtttaggaacggcggatcatagcgctctggcgtgctactacgaaaaactggcgaaagtcgaagttactcgttaa

SEQ ID NO: 461258 - DNA, 774 bp, Shigella boydii
ttggagtcattacctgttttcccgaataaattcaaagccgcactggctgcgaaacaggtacaaattggttgctggtcagcactctctaacccgattagcactgaagttcttggtttggctgggtttgactggctggtgctggatggcgaacatgcgccaaacgatatttccacgtttattccgcagttaatggccctgaaaggcagcgccagcgcgccagtagtgcgagtgccgaccaacgagccggtaattattaagcgtcttctggatatcggtttctataacttcctgattccttttgtagaaacaaaagaggaagcagagcaggcggtggcatcaactcgttacccgccggaaggcattcgcggcgtctccgtttctcaccgcgccaatatgtttggcaccgtggcggattatttcgctcagtcgaacaagaacatcactattctggtccagatagaaagtcagcagggcgtagataacgtcgatgctattgccgctaccgaaggtgtagactgtatcttcgtcggccccagcgatctggctgcggcattgggccatctcggcaatgcctcgcatccggatgtacaaaaagcaattcagcatatttttaaccgtgccagtgcgcacggcaaacccagcggtattctcgcgccggtcgaagccgatgcgcgtcgttatctggaatggggcgcgacgtttgtggctgtcggcagcgatcttggcgtcttccgctctgccactcagaaactggctgatacctttaaaaaataa

SEQ ID NO: 461259 - DNA, 699 bp, Shigella boydii
ttggcttatcgtggtttaaccgatgaacaaaagaaagtagttgatgctttaggttctggcttgattaatagcttaaaagtcttggctggtgttattgctgtaaagaaagttgttggtgtaaccagaagtatttacgggcttatgacagctatcacaagattaggtcaggtcgctgatactacagcggataacgtgaatagaaagaatgggaaaccatcaagactaaaccctatgaatatgctattagctggtagtgctatctatgcaggttatgaaagattagcttctacacctgaacgaatggaagcacaagctaaattaccagagctagctaaagagtctggacttaaaccagtgttcactatggacgatgtgaaaggttggtttagtagtgcagctaataaaattgctaacttccaagaaccgatgaataacttcgtaaataacacacaatcaactccaccagctatcacaggtgacatagttaatagtaatgctcaacttgcaatgactattagtgagctatcacgcaaggttgatgctttaacagtagaagccaagaagcccttgtcagttaatatcactggtgaagcaactgttagaccggatgaaccagctttctttactttcaatcaatcagctaatgaccagttcacgcaggatatgctcttaagttcaagctatccagaggaagaatga

SEQ ID NO: 461260 - DNA, 771 bp, Shigella boydii
atgatttgcactaatcagcttcgttacactggcaaagatggcgtttactttcatctacaaggccaaccagataatttcttgtcactatcagcaactgaaaacatggaatttgacagccctatgatggttaccactcaaaatatgcaatcagggcagactgtaacagataatgttcaaagagcacccagaacaatcactattagtggtgtggttgtggttggtgaatccggtagtatccttatctcaagagataataagctggtggagaacttcatcgacactcttgaaagctggcgtgaccagaagcagattatttcagtcatctgtaaagatggaattaaaattgatgactccattattacaagctttaaagcctctaaagatgttggaatttctaatggcctaagaatccagctaacttttcaggaaattaacttcaaagctattgttggtcaaacagatatttcagcagcaactggaaagacagctactacaaatgatggtggtgctaccagtaaaaagaatactggtaacactacgacaagcttaggtaacggtatgttgatgtgtcaggagctatataatcgctctacgagtgaactcactaatgagcaacttcaagcccgtatcaattgtggtaaaaatgtcagagttgagaatggaaaaagcaccttctcagatgccgctaatgagcaagcttcaaaggtgcttaagtcgggtaatgctttacggaagtactctgtgaatccgaataagaagggcacttactga

SEQ ID NO: 461261 - DNA, 1053 bp, Shigella boydii
gtgaagattattcatgtggatatggactgctttttcgcggcggtggagatgcgcgacaatcccgccctgcgcgatatccctattgctattggcggcagccgcgaacgtcggggggtgatcagtaccgccaattatcccgcgcgtaaatttggcgtacgtagcgctatgccgacagggatggcgctcaaattatgcccgcatctcaccttgcttccggggcgctttgacgcctacaaagaagcctcaaatcatatccgcgaaatcttctcgcgctacacctcgcgtattgaaccgttgtcactggatgaggcttatctcgacgtcaccgatagcgtccattgccacggttctgcgaccctcatcgcccaggaaatccgccagacgattttcaacgagctgcaactgacggcgtctgcgggcgtggcacccgtaaagtttctcgccaaaatcgcctccgacatgaataaacccaacggccagtttgtgattacgccggcagaagttccggcatttttacaaaccttaccactggcaaaaatccccggcgtcggcaaagtctcggcggcaaaactggaagcgatggggctacgaacctgcggtgatgtacaaaagtgtgatctggtgatgctgcttaaacgctttggcaaatttggccgcattttgtgggagcgtagtcaggggattgacgagcgcgacgttaacagcgaacggttgcgaaaatccgtcggcgtggaacgcacgatggcggaagatatccaccactggtctgaatgtgaagcgattatcgagcggctgtatccggaacttgaacgccgtctggcaaaggtgaaacctgatttactgattgctcgccagggggtgaaattaaagtttgatgattttcagcaaaccactcaggagcacgtctggccgcggctgaataaagctgacttaatcgccaccgcgcgtaaaacctgggatgaacgccgcggcgggcgcggtgtgcgactggtggggctgcatgtgacgttgcttgacccgcaaatggaaagacaactggtgctgggattatga

SEQ ID NO: 461262 - DNA, 453 bp, Shigella boydii
atgaataacatacaaataagagactatcagcctggcgattttcagcaactatgcgctattttcattagagcggttacgatgactgccagtcagcattattcaccacaacaaattgccgcctgggcgcagattgacgaatctcgctggaaggagaaactcgcgaaatcacaagtgcgggttgcagtcattaatgcaaaactggtcggctttattacctgcgttgaacactatatcgatatgttatttgttgaccctgaatacacccgccgtggggttgccagcgctttgttaaaacctttgattaagtctgaatccgaacttacggtggacgcaagcataaccgcaaaacccttttttgaacgttatggttttcagacagttaagcagcaacgcgttgaatgtcggggagagtggtttattaatttttatatgcgttataaacagcaacattaa

SEQ ID NO: 461263 - DNA, 567 bp, Shigella boydii
atgggcaattatattcgtcccttatccgatgcggtatttaccatcgcatctgatgaccagtggatcgagagtttagcgatccaacaattacacaccacggcaaatttacccaacatgcagcgcgtagtggggatgccagatttacatcccggacgcggctatccgattggcgcagcgttcttctctgttggtcatttttatccggcactggtcggcaatgatatcggctgcggtatggcgctatggcaaacagatattctcgctcgcaaatacaacgccgataagtttgaaaagcgattatcagatctggatgacgttgctgaagaaagctggctggaggaaaacctgccgtcagcatttgcacagcatccttggtgcagctcgcttggctctatcggtggcggcaatcatttcgctgaactgcaacaagttgatcaaatcatcaacgctgaactgtttgcactagcaggtctggatgcacaacatctgcaactgttggttcatagcggctcgcggggggtgcccctattaagttgtcaagcatgttatgacccctgcggggtataa

SEQ ID NO: 461264 - DNA, 1323 bp, Shigella boydii
atgcaagcctattttgaccagctcgatcgcgttcgttatgaaggctcaaaatcctcaaacccgttagcattccgtcactacaatcccgacgaactggtgttgggtaagcgtatggaagagcacttgcgttttgccgcctgctactggcacaccttctgctggaacggggcggacatgtttggtgtgggggcgtttaatcgtccgtggcagcagcctggtgaggcactggcgttggcgaagcgtaaagcagatgtcgcatttgagtttttccacaagttacatgtgccattttattgcttccacgatgtggatgtttcccctgagggcgcgtcgttaaaagagtacatcaataattttgcgcaaatggttgatgtcctggcagccaagcaagaagagagcggcgtgaagctgctgtggggaaccgctaactgctttacaaaccctcgctatggcgcgggtgcggcgacgaacccagatcctgaagtcttcagctgggcggcaacgcaagttgttacagcgatggaagcaacccataaattgggcggtgaaaactatgtcctgtggggtggtcgtgaaggttacgaaacgctgttaaataccgacttgcgtcaggagcgtgaacaactgggccgctttatgcagatggtggttgagcataaacataaaatcggcttccagggcacgttgcttatcgaaccgaaaccgcaagaaccgactaaacatcaatatgattacgatgccgcgacggtctatggcttcctgaaacagtttggtctggaaaaagagattaaactgaacattgaagctaaccacgcgacgctggcaggtcactctttccatcatgaaatagccaccgccattgcgcttggcctgttcggttctgtcgacgccaaccgtggcgatgcgcaactgggctgggacaccgaccagttcccgaacagtgtggaagagaatgcgctggtgatgtatgaaattctcaaagcaggcggtttcaccaccggtggtctgaacttcgatgccaaagtacgtcgtcaaagtactgataaatatgatctgttttacggtcatatcggcgcgatggatacgatggcactggcgctgaaaattgcagcgcgcatgattgaagatggcgagctggataaacgcatcgcgcagcgttattccggctggaatagcgaattgggccagcaaatcctgaaaggccaaatgtcactggcagatttagccaaatatgctcaggaacataatttgtctccggtgcatcagagtggtcgccaggagcaactggaaaatctggtaaatcattatctgttcgacaaataa

SEQ ID NO: 461265 - DNA, 1329 bp, Shigella boydii
atgtatatcgggatagatcttggcacctcgggcgtaaaagttattttgctcaacgagcagggtgaggtggttgcttcgcaaacggaaaagctgaccgtttcgcgcccgcatccactctggtcggaacaagacccggaacagtggtggcaggcaactgatcgcgcaatgaaagctctgggcgatcagcattctctgcaggacgttaaagcattgggtattgccggccagatgcatggagcaaccttactggatgctcaacaacgggtattgcgccctgccattttgtggaacgacgggcgctgtgcgcaagagtgcactttgctggaagcgagagttccgcaatcacgagtgattaccggcaacctgatgatgcccggatttactgcgcctaaattgctatgggttcagcggcatgagccggagatattccgtcaaatcgacaaagtattattaccgaaagattacttgcgtctgcgtatgacgggggagtttgccagcgatatgtctgacgcagctggcaccatgtggctggatgtcgcaaagcgtgaccggagtgacgtcatgctgcaggcttgcgacttatctcgtgaccagatgcccgcattatacgaaggcagcgaaattactggtgctttgttacctgaagttgcgaaagcgtggggtatggcgacggtgccagttgtcgcaggcggtggcgacaatgcagctggtgcagttggtgtgggaatggttgatgctaatcaggcaatgttatcgctggggacgtcgggggtctattttgctgtcagcgaagggttcttaagcaagccagaaagcgctgtacacagcttttgccatgcgctaccgcagcgttggcatttaatgtctgtaatgctgagtgcagcatcgtgtctggattgggtcgcgaaattaaccggcctgtgcaatgtcccagctttaatcgctgcagctcaacaggctgatgaaagtgccgagccagtttggtttctgccttatctttccggcgagcgtacaccacacaataatccccaggcgaagggggttttctttggtttgactcatcaacatggccccaatgaactggcgcgagcagtgctggaaggcgtgggttatgcgctggcagatggcatggatgtcgtgcatgcctgcggcattaaaccgcaaagtgttacgttgattggtggcggggcgcgtagtgagtactggcgtcagatgctggcggatatcagcggtcagcagctcgattaccgtacggggggaagtggggccagcactgggcgcagcaaggctggcgcagattgcggcgaatccagagaaatcgctcattga

SEQ ID NO: 461266 - DNA, 228 bp, Shigella boydii
atgaaaacctcaaaaactgtggcaaaactattatttgttgtcggggcgctggtttatctggttgggctatggatctcatgcccattgctaagtggaaaaggctattttcttggcgtgttaatgacagcaacttttggtaactatgcatatcttcgcgcagaaaaactcgggcaactggataatttttttacccatatctgccagttggtaatgactccaacttactga

SEQ ID NO: 461267 - DNA, 126 bp, Shigella boydii
atgtgtgccattggtgcgctgatgagaaaactcgtgcactggtgctatggcgtactgaagacccaaaaaccgtttgatgtgggctatttgtcttcatatgcgcgtagcgcatgtaaggcggcatga

SEQ ID NO: 461268 - DNA, 858 bp, Shigella boydii
gtgactgatcttcaacaaacttattaccgccaggtaaagaacccgaatccggtgttcacaccccgtgaaggtgcccggacgcttccgttctgcgggaaactgatggaaaaggcggtgggcttcacctcccgttttgatttcgccattcatgtggcacatgcccgttcgcttggtctgcgtcggcgcatgccaccggtactacgtcgccgggccattgatgcgctgctgcaggggctgtgttttcactatgacccactggccaaccgcgtccagtgttccatcaccacgctggccattgagtgcggactggcgacggagtctgctgccggaaaactctccatcacccgggccacccgggccctgacgttccttgcagagctgggactgattacctaccagacggaatatgacccgcttatcgggtgctacattccgaccgatatcacgttcacatctgcactgtttgctgccctcgatgtatcagaggaggcagtggccgccgcgcgccgcagtcgtgtggaatgggaaaacagacagcgcaaaaagcaggggctggataccctgggtatggatgaactgatggcgaaagcctggcgttttgttcgtgagcgtttccgcagttaccagacagagcttaagtcccgtggaatgaagcgtgcccgtgcgcgtcgtgatgcggacaggcagcgtcaggatattgtcaccctggtgaaacggcaactgacgcgtgaaatctcggaagggcgcttcactgccagtcgtgaggcggtaaaacgtgaagtggagcgtcgtgtgaaggagcgcatgattctgtcacgtaaccgtaattacagccggctggccacagcttccccctga

SEQ ID NO: 461269 - DNA, 261 bp, Shigella boydii; identical to SEQ ID NO: 7695

SEQ ID NO: 461270 - DNA, 591 bp, Shigella boydii
atgaagttgattatttttattctcattgttctgattattgcagcgctacttatccggattatcctcagaagtgtaaatcagcattctcctttgctgatgcaattgcatgcggcaggtatacggaccggtgatgcagagcgaatactgtccagcggtgaatactggcaacgtcagaagacgctgctgacagaaagggaagtcagttttatgaaaggactgttcagaattgtggatatgaagcggtggtatctgtgtccgcaggtacgggtcgcggatatcgtccagctgaacgggaatatccggccacgatcacgccagtggtggcagttattcaggatggtgtctcagtggcatgttgatgtggttatcgttgagctgcgttcgttcagtattgttgcagcagtagagctggatgatgccagccatttacgaccggaacgcagacgccgggatattcttctggaagaggttctgaggcaggctggtattccgttgctcagaagccacgatgccagaaaactgctgcagatgaccggagaatggctgaatacaacaggggctgatcagcagtcaccggaacatcgtagctga

SEQ ID NO: 461271 - DNA, 186 bp, Shigella boydii
atgtctaacactagttctaattttgagatgactggaactttgctggggctggagcttcgtaaacgtaaaactcctcaggaaaaaattgccattattcagcagacaatggagcctagcatgacggtgtcccatgtggcgcgtttgcatggtattcagcccagcctgttgcttaagtggaaaaaataa

SEQ ID NO: 461272 - DNA, 639 bp, Shigella boydii
atgattaatggggtgtcgttacagggaactgctggatatgaggcacatacagaggagggaaatgtaaatgttaaaaaattgctggaatctttaaactctaaaagtcttggtgatatggataaagattctgaattggcagcgactttacagaaaatgataaatccgtctggtggggatggtaactgttcagggtgtgcgcttcatgcttgtatggctatgttagggtatggagtaagagaggctcccgtacctaatgaaatatcagagtatatgaccggattttttcataggcatttagagcaaattgatagtgaaggcatagtgtcacatcctaatgaaacttatagtaaatttcgtgagcgtattgcagaaaatattttacaaaacacttcaaaaggaagtgtagtaatgatttctattgaacaggccactcattggatagctggatttaacgatggtgaaaaaattatgtttttggatgttcaaacaggaaagggatttaatctttatgatcctgtagaaaaatcgccagatgcatttgtagatgaaaatagttcggttcaggtaattcatgtatctgatcaggaatttgatcactatgctaacagtagtagttggaagagtaagaggctttgctga

SEQ ID NO: 461273 - DNA, 1602 bp, Shigella boydii
atgaacaatgaactccccgatgatattgagctgcttaaagccatgttgcgtaagcaacagagtcggcttcgacagtatgcctgtcaggtcgcgggctatgagcaggaaattgaacggctgaaagcgcaactcgacaggttgcgtcgtatgctgttcggccagagttcagagaaaaagcgtcataagcttgaaaatcagatccgacaggcagaaaaacgactgtcggaactggaaaaccgactgaacacagccagaaatcttctggaagatgcatcgtcagtcacagattcacctgacaccagtcccccgtcagaaaacccgatcgccagtaagcctgaatccccgggacgaaaatcttcacgaaaaccgctgccggcagaacttccccgggagacacatcgccttctgcctgctgaaaccagttgcccggcctgtggaggtgttctgaaagaaatgggggaaacaatctcagagcaactggatatcattaataccgcctttaaagttatcgaaaccatacgtcccaaactggcctgtagccggtgtgatgtcatcgttcaggcaccacttccccctaaaccgatcgaacgcggttatgccagtgcagggttacttgcacggatcctggtcagcaaatatatggaacatatccctttatatcgccagtcagaaatatacgcgcgacagggcgtggagctgagccgtaataccatggtgcgctgggtatcagaaatggcagacaaactccgtcctctgtatatagcgctgaatgactatgttctggaggcaggaaaggtgcacgcagatgacactccggtgaaagtactggccccggggaacggaaagacgaaaacgggtcgtctgtgggtatacgtcagggatgatcgtaatgcgggttcatccctgccggcagccgtctggttcgcgtattcggcagatcgcaaaggagaacatccgcagctccacctggcaaagtatcagggcgtactgcaggctgatgcctatgcaggttataacgtactgtacgaaacgggccgggtgaaggaagccgggtgcctggcccacgcccgccgaaaaatccatgacgaggatgtgcgccgtccgacagaaatgactcaggaagcgctcagacggatagcagagttatacgacatagaagcggagatacgtggcagtccggcagaggaacggcttgcagtcagaaaagccagaagcgtccagttgatgcagtcattgtacgactggatacagttgcagaggaaaacgctgtcgaaacatgcggagatggcgaaggcgttcgactatatcctgaatcactggaatgcgctgaacgagttctgtcgtgacggctgggtggaaatagacaacaacatcggtgaaaacgcgttacgatcggtggcggttggaagaaaaaattatctctttttcggctcagacaagggaggagaaagtgcggcgatcatctacagtctgctggtcacctgcaaacagaacgaagtggagccggaggactggttgcgcgaagtgatcgagaagctcaatgactggccgtcgaaccaagtgcatgaactgctgccctggaacttctcgtctgtaaaataa

SEQ ID NO: 461274 - DNA, 276 bp, Shigella boydii; identical to SEQ ID NO: 458859

SEQ ID NO: 461275 - DNA, 405 bp, Shigella boydii
atggatcaggtcgttgtttttcaaaagatgtttgagcaagtgagaaaagagcaaaacttctcctggttttattcagaattaaaacatcaccgtattgcacattacatttattatctggctacggataacatcagaattattactcacgatgacacggttttgttattaagaggaaccaggaacctgttaaaagttagtacgaccaagaaccctgctaaaataaaagaggccgcattgcttcatatttacggaaaatctacatttcgggaatactgttcaacactggcaggcgcgggcgttttccgttgggttactgatgttaatcataacaaacgcagttactacgccattgataatacgcttttatatattgaagatgtagaaaataataaaccattaatctag

SEQ ID NO: 461276 - DNA, 732 bp, Shigella boydii
gtggcttattacagcattggtgatgttgctgaacgttgcgggattaatcctgtcactctccgggcctggcaacgccgctacggtttgttaaaaccacagcgcagtgaaggcggacaccgactctttgatgaagaagacatacaacgcatcgaagagatcaagcgttggataagtaatggcgtccctgtaggcaaagttaaagcattactggaaaccaccagccaggatacggaagatgactggagccgcctgcaagaagagatgatgtcaattcttcgcatggctaatcctgccaaactacgcgcgagaattatttcactgggtcgagagtacccagtagatcaattgattaatcatgtttaccttcctgttcgccagcgtctcgtgcttgatcacaacacctcccgcattatgagcagtatgtttgacggcgcattaattgaatacgcagcaacctcgcttttcgaaatgcgccgtaagcccggtaaagaagccattctgatggcgtggaatgttgaagagagagcacgattgtggctggaagcatggcgtttatcattgtcaggatggcacatttctgttcttgctgatcccattgaatcgccgcgcccggaactgttcccgacgcaaacattgattgtctggacaggcatggcaccaacgagaaggcaaaacgaacttttacaacactggggtgagcaaggttataaagtcatctttcatgccccctaa

SEQ ID NO: 461277 - DNA, 1119 bp, Shigella boydii
atgcagtctgacgtaacagggatcttactgtttaatggttctcattttttccagcttctggaaggtccggaagaacaggttaaaatgatatatcgggctatatgccaggatccacggcactataatattgttgagctgctgtgcgattacgcgcctgctcgccgttttggcaaagcgggaatggaattatttgatttgcgcctgcacgagcgagatgacgttttacaggccgtattcgacaaaggcacatcaaaatttcagctaacttatgatgacagagcgctacaattttttcgtacttttgtccttgcaaccgaacaatcaacctatttcgagatccctgccgaagactcctggctttttatcgctgacggatctgataaagaacttgattcctgtgccctttcaccaactataaacgaccactttgcctttcatcctattgtcgatcccttatcgcggcggataatcgcttttgaagccattgtgcaaaaaaatgaagatagcccatcagccatagcggttgggcagcgtaaatacggggaaatctacacagcggatctcaaaagtaaggcgcttgcattcacgatggcacacgcacttgagctcggtgataaaatgatttcaatcaatctattacctatgaccctggttaacgaacctgacgcagtctcttttttacttaatgaaataaaggccaatgctctggtgcctgaacaaatcatcgttgaatttactgaaagtgaagtcatatctcggtttgatgagtttgccgaagcgattaaatcgctaaaggctgctggtatcagtgtagcaattgatcattttggcgcaggttttgctggtttgttactcctgtcacgcttccagcctgacagaattaaaatcagtcaggaattgattaccaatgttcataaaagtgggccacggcaggcaattattcaggcgatcataaaatgctgtacatcacttgaaattcaagtcagtgctatgggcgtggcaacaccagaagagtggatgtggcttgaatccgcaggaattgagatgtttcagggagatctgtttgctaaagctaaattgaatggtatcccttccatagcgtggccagagaaaaaataa

SEQ ID NO: 461278 - DNA, 228 bp, Shigella boydii
atgcgtttaattgtggtgagcatcatggtgaccttgctgagtggctgtggcagcattattagtcgcactataccggggcaggggcatggcaaccaatattatcccggtgtgcaatgggatgtgcgtgactccgcctggcgttatgtcacaatccttgatctgccattctccctggtttttgatactttactgctgccgatcgacattcatcatggcccgtatgagtga

SEQ ID NO: 461279 - DNA, 375 bp, Shigella boydii
atgaccatgtacgcaacgcttgaagaagccattgacgctgcacgcgaagaatttcttgcagacaaccccggcatcgacgccgaagatgcgaatgtgcaacagttcaatgcccaaaaatacgttttgcaggacggcgacatcatgtggcaagttgagttttttgccgacgaagggaaagaaggtgaatgtttacctatgcttagcggtgaagccgcgcaaagtgtttttgatggcgactatgatgagatagagatacgccaggagtggcaggaagagaatacattacatgaatgggacgagggggaatttcagcttgagccaccgctggataccgaggaaggacgcgcagcagctgatgagtgggatgaacgttaa

SEQ ID NO: 461280 - DNA, 972 bp, Shigella boydii
atgctattacgctctgccctcggcatgggcatcgtgatggtgttgatggggctggcacaaaatatctggcagtttttgatcctgcgggcgcttcttgggttacttggcggatttgtccccaacgctaatgctcttatcgccacacaagtaccgcgtaataaaagcggctgggcgctgggtacgctctccacaggcggcgttggtggtgcgttgctcggcccaatggctggcggcctgctcgccgatagctacggcttacgtccggtattctttattaccgccagtgtgctcatactctgctttttcgtcaccctgttttgcatcagagaaaaattccagccggtcagcaaaaaagagatgctgcacatgcgggaagtggtgacatcacttaaaaacccgaaactggtactcagcctgtttgtcactacgttaatcatccaggtggcgacgggctcaattgcccccattctgacgctgtatgtccgcgaactggcgggtaacgtcagtaacgtcgcctttatcagtggcatgatcgcctcggtgccaggcgtggcggctctgctaagtgcaccacgactcggcaaacttggcgatcgaatcggacccgaaaagattctgattacagcgctgatcttttctgtactgctgttgatcccaatgtcttacgttcagacgccattgcaacttgggattttacgttttttgctcggtgccgccgatggtgcactactccccgccgtacagacattgttggtttacaactcgagcaaccagatcgccgggcgtatcttcagctataaccaatcgtttcgtgatattggcaacgttaccggaccattgatgggagcagcgatttcagcgaactacggtttcagagcggtatttctcgtcaccgctggcgtagtgttattcaacgcagtctattcatggaacagtctacgtcgtcgtcgaataccccaggtatcgaactga

SEQ ID NO: 461281 - DNA, 240 bp, Shigella boydii
atgtcaccctgtgaaaatgacacccctataaactggaaacgaaacctgatcgtcgcctggctaggctgttttcttaccggtgccgccttcagtctggtaatgcccttcttacccctctacgttgagcagcttggcgttaccggtcactccgccctgaatatggtccggtattgtcttcagcattacatttttattttcggccatcgcctcaccgttttggggtggactcgccgaccgtaa

SEQ ID NO: 461282 - DNA, 921 bp, Shigella boydii
atgacgaatctacccaagttctccaccgcactgcttcatccgcgttattggttaacctggttgggtattggcgtactttggttagtcgtgcaattgccctacccggttatctaccgcctcggttgtggattaggaaaactggcgttacgttttatgaaacgacgcgcaaaaattgtgcatcgcaacctggaactgtgcttcccggaaatgagcgaacaagaacgccgtaaaatggtggtgaagaatttcgaatccgttggcatgggcctgatggaaaccggcatggcgtggttctggccggaccgccgaatcgcccgctggacggaagtgatcggcatggaacacattcgtgacgtgcaggcgcaaaaacgcggcatcctgttagttggcatccattttctgacactggagctgggtgcgcggcagtttggtatgcaggaaccggggattggcgtttaccgcccgaacgataatccactgattgactggctacaaacctggggccgtttgcgctcaaataaatcgatgctcgaccgcaaagatttaaaaggcatgattaaagccctgaaaaaaggcgaagtggtctggtacgcaccggatcatgattacggcccgcgctcaagcgttttcgtcccgttatttgccgttgagcaggctgcgaccacgaccggaacctggatgctggcacggatgtccggcgcatgtctggtgcccttcgttccacgccgtaagccagatggcaaagggtatcaattgattatgctgccgccagagtgttctccgccactggatgatgccgaaactaccgccgcgtggatgaacaaagtggtcgaaaaatgcatcatgatggcaccagagcagtatatgtggttacaccgtcgctttaaaacacgcccggaaggcgttccttcacgctattaa

SEQ ID NO: 461283 - DNA, 312 bp, Shigella boydii
atgtttaatgtgattactcacccggccgcactggatgaacttctagaattaccagacaatctgcgtggtcgtatgaccagactgattgaacggctggaacaggaaggtaacaaaatgaaaatgcctcacagccgtgtaattggcggagggctttttgaactgagagtcggggataaaaatatcgcaaggacactgtacgcttatgcaacgggtaacgaaatctatctgctgcatgcatttgtgaaaaaaacgcaaaagacaccaacgaaagctattgaaattgccaggatgcgtctgaaggagatgaactga

SEQ ID NO: 461284 - DNA, 288 bp, Shigella boydii
atgaaagtaaaaggtgttccattcagccaggtaaagcaaaaactactcagtactccagaagctgtcaaagggtatgaggatgctgacaaagaactggagatggtggaaatgttatacgaaatgagagaaaaagcgggattaacaaagtcagcactggccgaacgaatggggttacgcccgtcagccatcagtcgcctggaaagtaaccctttaggggccagcatgaaaactttgacaaaatatgctcatgcctgtggcgcaaccatcgatattcacgctgtctattga

SEQ ID NO: 461285 - DNA, 1188 bp, Shigella boydii
atgcttccccgttttgccgatatctttcagcagggaaaccgctggcttaactggctggagaagcagccggaaggggcagtacgtccggtggtgattgagtcggtgaccaaaatcatggcgtgcgggaccacactgatggggtatacacagtggtgctgttcatcaccggactgttgccatacaaaaaaggtctgcttccggtgtaaaagccgctcctgcccgcactgcggggtgaaggctggcgcacagtggatacagtatctgctgagcctggtccccgactgcccatggcagcatattgtgttcacgttaccctgccagtactggtccctggtgttccacaaccggtggttgctggcagagatgagccgcattgcagcggatgtgatactggaaatctgccatcaggcagatgtggagccgaggatattcacggtgatccacacatgggggcgtgaccagcagtggcatccgcatatccatttatcgacaactgccggtggtgtgacgtcgggccacacctggaaaaatcttcatttttacgcccgtaaggtgatgagcatgtggcgctaccggataacacggttactgtcacggaaataccctgacctggtgatgccggatgcgctggcagcagaaggaagcagtaaacgggaatggaatcgcttcctggacacgcattaccgccgtggctggaatgtcaacgtatcccgggtgatggataatgccacccatgtggcggtgtactttggctcttacctgaaaaagccaccggtgccggtgagtcgtctggagcattatgccggtcaggatgaaatcggactgcgttacaacagtcaccgaacaaaacgggaagaatacctgttgatgagtggagatgagttcatggaaaggttctcctggcatgtggcggataaggggttccgtatggtgaggtactacggttttctgagtccggcgaaacggcggttactggaagaagtggtgtacatcataacggagacagtgagaaaaacggcgatgcaaatcacctggagagggatgtatcagaggttactgaaggttgacccgctgaagtgcgtgctgtgcgggagtcagatgcgttttacggggctgaagcggggctaccgtctggcagagcaggtcctgatgcatgagccgctggcccggatgcggtggtgcggctga

SEQ ID NO: 461286 - DNA, 366 bp, Shigella boydii
atggcccgttcagctaaaccccgtaaacgtaaacccgcctttcaaagaagcaaacttccccgctatgtcgtgaagcttcacgaagatgatttttttgacgaagaagacgcagaagttctgcgctttgatagttttgacgatgccgttgaatgctgcgcagacctgaatattccgttctttgtggatgcgggaaacaaaaagctggtcttctggtttgtacgtgttgatgacgaagggtatccggaaatcgcccgctgcacggagcgggaatttgcgaccattctttccggtatcagcgccggcggtatgtactgcccggagtgtggcacggttcactggccggacggagtcgccccgcccttctga

SEQ ID NO: 461287 - DNA, 396 bp, Shigella boydii
atgacattgcctgtttttataacggtaattgcagaccatgacaagccgcagccgtcaggctgcctactcgagcttcagctcaataaaggcgagtatcgacataaattaccccgatggatcttttttgcaaatcagggtgaattcacgaccggtgattacgaagaaatcatgaataaggccagcgccctgagtctggtatcgaatgcaatcctgtactggaacacatcaagaataagcaatattgttgaagggttacgtgaaaatggtgaggttattgatgatgacgtattagcccatatatcattactgccctataaacacgtattacctaatggtacttattttgttgatggagaaccttacggtactgagcctaccgaaagagcaaaaccgtaa

SEQ ID NO: 461288 - DNA, 2070 bp, Shigella boydii
atgtctgagaaaacttttctggtggaaatcggcactgaagagctgccaccaaaagcactgcgcagcctggctgagtcctttgctgcgaattttactgtggagctggataacgctggcctcgcacacggcaccgttcaatggtttgctgctccgcgtcgtctgacgctgaaagtagctaacctggcggaagcgcaaccggatcgtgaaatcgaaaaacgcggcccggcgattgcccaggcgttcgacgctgaaggcaaaccgagcaaagcggcagaaggttgggcgcgtggttgcggtattaccgttgaccaggctgagcgtctgactaccgataaaggcgaatggctgctgtatcgcgcccatgtgaagggcgaaagcaccgaagcactgctgccgaatatggttgcgacttctctggcgaaactgccgatcccgaaactgatgcgttggggcgcaagcgacgtgcacttcgtgcgtccggtgcacaccgtgaccctgctgctgggcgacaaagtcattccggcaactattctgggcattcagtccgatcgcgtgattcgcggccaccgctttatgggcgaaccggaattcaccatcgacaacgccgatcagtatccggaaattctgcgtgagcgcgggaaagtcatcgccgattacgaagaacgtaaagcgaagattaaagccgatgccgaagaagcagcgcgtaagattggcggtaacgctgacttaagcgaaagcctgctggaagaagtggcttcgctggtggagtggccggtcgttctgaccgcaaaattcgaagagaaattcctcgcggtgccggctgaagccctggtttacaccatgaaaggtgaccagaaatacttcccggtgtatgcgaacgatggcaaactgctgccgaacttcatcttcgttgccaacatcgaatcgaaagatccgcagcaaattatctctggtaacgagaaagtcgttcgtccacgtctggcggatgccgagttcttcttcaataccgaccgtaaaaaacgtctggaagataacctgccgcgcctgcaaaccgtgctgttccagcaacagctgggtacgctgcgtgacaaaactgaccgcatccaggcgctggctggctggattgctgaacagattggcgctgacgttaaccacgcaacccgtgcgggcctgctgtctaagtgtgacctgatgaccaacatggtcttcgagttcaccgacacccaaggcgttatggggatgcactacgcgcgtcacgatggcgaagcggaagacgtagccgtcgcgctgaatgagcagtatcagccgcgctttgccggtgatgacctgccgtccaacccggtagcttgtgcgctggcgattgctgataagatggatactctggcgggtatcttcggtatcggtcagcatccgaaaggcgacaaagacccgtttgcgctgcgtcgtgccgcacttggcgtgctgcgaattatcgttgagaagaacctcaaccttgatctgcaaacgctgaccgaagaagcagtgcgtctgtatggcgataagctgactaacgccaacgtggttgatgatgttatcgactttatgctcggtcgcttccgcgcctggtatcaggacgaaggttacaccgttgacaccatccaggcggtactggcgcgtcgtccgactcgtccggctgatttcgatgcccgtatgaaagcggtatcgcatttccgtaccctggatgcagctgctgcactggcggcggcgaacaaacgtgtatctaacattctggcgaaatctgacgaagtgctgagcgaccgcgtgaatgcctctaccctgaaagagccggaagaaattaaactggcgatgcaggttgtggtgctacgtgacaagctggagccgtactttgcggaaggtcgttaccaggatgcgctggtcgaactggcagagctgcgtgagccggttgatgctttcttcgataaagtgatggtcatggttgatgacaaagaattgcgtctcaaccgtctgaccatgctggagaaactgcgcgaactgttcctgcgcgttgcggatatttcgctgttgcagtaa

SEQ ID NO: 461289 - DNA, 912 bp, Shigella boydii
atgcaaaagtttgataccaggaccttccagggcttgatcctgaccttacaggattactgggctcgccagggctgcaccattgttcaaccattggacatggaagtcggcgcgggaacctctcacccaatgacctgtctgcgcgcgctggggccagaaccgatggcggctgcttatgttcagccttctcgtcgcccgaccgatggtcgctacggcgaaaaccccaaccgtttacagcactactatcagttccaggtggtcattaagccatcgccggacaatattcaggagctgtacctcggttctctgaaagagctgggcatggacccgactattcacgacatccgtttcgtggaagataactgggaaaacccgactctgggtgcctggggactgggctgggaagtgtggctaaacggcatggaagtgacgcagttcacttacttccagcaggttggtggtctggagtgtaaaccggttaccggcgagatcacctacggtctggaacgtctggccatgtacattcagggcgtagacagcgtttacgacctggtctggagcgacggcccgctgggtaaaaccacctacggcgacgtgttccatcagaacgaagtggagcagtccacttacaacttcgaatacgcggatgtggacttcctgttcacctgctttgagcagtacgagaaagaagcgcagcagctgctggcgctggaaaatccgctgccgctgccagcctacgagcgtattctgaaagccgcccacagcttcaacctgctggatgcgcgtaaagccatctccgtcaccgagcgtcagcgctacattctgcgcattcgcaccctgaccaaagcagtggcagaagcatactacgcttcccgtgaagccctcggcttcccgatgtgcaacaaagataagtaa

SEQ ID NO: 461290 - DNA, 300 bp, Shigella boydii
atgatgatgaacgctttctttccggcaatggcgcttatggtgctagtgggttgttctacaccgtcacccgtgcagaaagcacaacgggtaaaggttgatcctctgcgttcgttgaatatggaagcgttatgcaaggatcaggcggcaaaacgttataacaccggcgagcaaaaaatcgacgtcaccgccttcgaacagttccagggaagctatgaaatgcgcggttataccttccgtaaagagcagtttgtctgttcttttgacgcagatggccattttttgcatctttccatgcgttaa

SEQ ID NO: 461291 - DNA, 840 bp, Shigella boydii
atgttgaatgtagctattgaaaaccagaacgggtggaattatagtgtacctgcacctcataaaacgggtgccgggattagcaccccgaaagttactcgagcgcataaccgcgctgaagcggtttttttatgcgtaatgcacagccacattcaaattatggtgaggcgtgcggggcagccgcaaggctggccgggttctcgagtgaccggtagtgctaaccctgtgcgtctcaccacccatgagattagcacctctgctggtgagttaattaacttatcacttgaggatgtcattatggctactaccctttctcaccctgacgtaaccatcgaaaatggtcgcgccgtcactacttctatttcgattgctgagttttttggcaagcagcatcaccatgttgttcaaaaaatagaatccctcgaatgttctgaactatttttaaccagcaacttttcgcgggttaaattcgaacaccgcggcaattcttataacgcctaccaaatcaccaaaaacggcttcgttttcctggtgatgggcttcacgggcaaaaaagccgccacattcaaggaagcctacattgctgagttcgaccgcatggaggccgaactgcgccagaataacaccccacctgctgacaagatgattccgggtgatggtcgcactctggttgttcacttcgacaaattcggcaatgtcgaattcaccgaaaccgttcctgatggcgcactggtctgtaccctggagactttccggttttatctggaaaaacagggctggactcttgtaaaccggggcgcaattaaaaacatgaccgtagagcagttgctttccttaaaataa

SEQ ID NO: 461292 - DNA, 153 bp, Shigella boydii
atggatactatcgatcttggcaacaacgaatccctagtgtgtggcgtgtttcccaatcaggacggcacattcaccgccatgacgtataccaaaagcaaaacgtttaaaaccgaagctggcgcacgtcgctggcttgccaaaaataccagctaa

SEQ ID NO: 461293 - DNA, 408 bp, Shigella boydii
atgaaaaacgaaaccttcggtgctcgcctcttacataggcgtaaaaaattaaaactgtctcaggccgcattaggtaagctggtcaaagtggctcacgtaacaatttctcaatgggaaagagatgaaacacagccggcggggaaaagattattcgcactgagccaagcgcttcagtgctcaccgacttggcttctttttggggatgaagataaacaaccaggcgaaccgatcccggataatcagccagccattctgacagaagatcaaaaagagttacttcaactgttcgacgcactgcctgagtcagagcaaaaggccctgttgtcagagatgcgtgctcgagttgaaaatttcaacaaactttttgaagaactactcaaagctcgcaaaagaagcgcaaacaaataa

SEQ ID NO: 461294 - DNA, 153 bp, Shigella boydii
atgttgaaaattgatgctatagcgttttttggcagcaaaacaaagcttgccaatgccgcaggagttaggctggcaagcattgctgcatggggggaactggttcctgaaggtcgcgcgatgcgcctgcaagaggcatctggcggggaactttag

SEQ ID NO: 461295 - DNA, 423 bp, Shigella boydii
atgaaaatcaggcatgagcacatcgaatcagtgctgttagccctggcagccgaaaaagggcaggcgtgggtcgctaacgcaattactgaagaatatctgcggcaggggggcggcgaattgcctctggtaccaggcaaggactggaacaatcagcagaatatctatcaccgttggttgaaaggtgaaacgaaagcgcaaagggaaaaaattcagaaactgatccctgcggttctggcaattcttccgcgtgagctgcgtcaccgactctgtatcttcgataccctggaacgccgtgcattactggcggcgcaggaagcgttgagtacggcaattgatgcgcatgatgacgcagttcaggccgtttaccggaaagcacatttcagcggtggtgggtcgtccgacgattctgtcgttgtgcattga

SEQ ID NO: 461296 - DNA, 174 bp, Shigella boydii
atgagcatgaaactaatggcaaaagcaatggaaattaaagtgggtaatccattgcgtaagctggttctgattaagctggctgtgaagtggcacactgaatttggccacctgaacagaggtgatatgctcacctcagaacaacacaggtgctccaatgaaaaaaagaaattttag

SEQ ID NO: 461297 - DNA, 759 bp, Shigella boydii
atgagccaaattttactgcaacctgctaacgcgatgattacgctggaaaacgtccataaatggtatggacaattccatgttttgaaaaatataaatttaaccgtgcaaccgggagaacggatcgttctgtgtggcccttctggttccggtaaatcgacaaccattcgttgtattaatcatctggaagaacatcaacagggacggattgtcgtagatggcatcgaacttaatgaagatatccgcaatattgagcgcatcaggcaggaagtgggaatggtatttcagcatttcaatctcttccctcatctgaccgttttacagaactgtaccctggcaccgatttgggtacgcaagatgcctaagaaagaggctgaagctctggcgatgcattaccttgagcgggtgagaattgccgaacatgcgcataagtttcccggacagatttcaggtggtcagcagcaacgcgttgccattgcgcgttcgctgtgtatgaagccgaaaattatgttgtttgatgaaccaacgtcggcgctcgatccggagatggtgaaagaggtgctggatacgatgattgggctggcgcagtcgggtatgacaatgttgtgtgtaacacatgagatggggtttgcacgtaccgtcgctgaccgggtaatttttatggatcgtggggagatagtggaacaagctgcacctgatgaattttttacgcatcctaaatcagagcgtacgagggcatttttatcgcaggtaatccattaa

SEQ ID NO: 461298 - DNA, 1104 bp, Shigella boydii
atgacaaaagtattgctgtctcagccctcgcgcccagcgagccataactcaagccgcgcgatggtgtgggtgcgaaaaaatctgttctccagctggagcaatagcctgctgactattggctgcatatggttgatgtgggaactgatcccaccgttgctgaactgggcatttttgcaggctaactgggttggctcaacgcgtgccgactgcacaaaagccggtgcctgttgggtcttcatccacgaacgatttggtcagtttatgtatggactttacccacacgaccaacgctggcgaattaacctggcattactgattggccttgtgtcaatcgcaccaatgttctggaaaatactcccgcatcgcggtcgctatattgcggtctgggcggtgatttacccactgattgtctggtggctgatgtatggcggtttttttggtcttgagcgggttgaaacccggcaatggggcgggctgacgctaactttaattattgcatccgttgggattgcgggggcgctaccgtgggggatcttactggcgttaggtcgccgctcccatatgccgattgtgcgtatcttatcggtcatttttatcgagttctggcgcggcgtaccgctgattaccgtattgtttatgtcttcggtcatgctgccgttgtttatggcagaaggcaccagtatcgacaaactgatccgcgtgctggttggcgtgatcctgtttcagtcagcatatgttgcggaagtcgtgcgaggcggattacaggccctacctaaagggcaatatgaagcggcagagtcgctggcgttggggtactggaaaactcaggggctggttattctgccacaggcgttgaagctggtaattcctgggctggtaaataccatcatcgcactcttcaaagataccagcctggtgatcatcatcggcttgttcgatcttttcagtagcgttcagcaggcaaccgttgatcccgcctggttgggtatgtcgacggaagggtatgttttcgccgcgctgatctactggatcttttgtttcagcatgtcacgttatagccaacatctggaaaaacgttttaacgccgggcgtacaccgcattga

SEQ ID NO: 461299 - DNA, 234 bp, Shigella boydii
gtgattattccgccgttaaccagccagtatctcaacatcgtcaaaaactcctctcttgccgccgctattggctatcccgatatggtttcgctgtttgctggcaccgtgctgaaccagacggggcaagccatcgagacgatagccatgaccatgtcggtctatctgattatcagcctgactatctcgctgctgatgaatatctataaccgccgcatcgcgatcgttgaacgctaa

SEQ ID NO: 461300 - DNA, 330 bp, Shigella boydii
atgaaaacctttcgctggaaagtgaaaccggatatggaggtgaactcgcggccatcggtgcgtgaagtgcgttttggtgacggctattcgcagcgtatggcggcagggctgagtgctgacctgaaaacataccgggtgacgctttccgtgacccgggaggaagcccggcatctggaggaattcctggcagagcacggtggctggaaggcgtttctgtggacaccgccttatgcataccggcagataaaggtgacctgtgccgggtggtctgcgcgggtcgggatgttgcgcgttgagttcagcgcggagtttaagcaggtggtgaactga

SEQ ID NO: 461301 - DNA, 2613 bp, Shigella boydii
atgtcccagccagcgggtgatctggttattgatttgagtctggatgcggcccggtttgatgaacagatggcccgggtacgccgtcatttttccagtctggaggcggatgccagaaaaaccgccagtactgttgaacaggggctgagccgacaggcgctggctgcacaaaaagccgggatatcagtcggacagtataaggctgccatgcgcacactgcccgcacagttcacggatattgtcactcagcttgccggtggtcagaatcccttccttatcatgctgcagcagggggggcagatcagcgattcattcggtgaaccgctcagcctgcttaccctgctgaaggaggaacttctcgggatcagggatgcctctgaatcatcagaggagtcgctgtcagatacggcaaatgcactggctgaaaatgcccggaatgccggtgagctgggacgatttatgtcggtggtccgtgtggcggcaggtggcggggttgccgtactggccgcgcttgctgccgccgcctggcaggcagagcaggctgaccgggccttattgcgttcactgatcctgaccggaggggcggctgccaccacaacggcagaattgtggaaaatggccggggtgatcagcgatgaagccggtggtggtatcagacaggcggcagaaaatctggcccgtctggcagaaagcgggaaatataccgccgggcagctacggatcatgggggaaacctctcagagatggctgcagacggtgggggacgatgccgggaaggtggaaaaagcctttgaagggattgcagcagatccggtgaaggcgctggcctccctgaatcagcagtataacttcctgagcgtttcccagttacgccatattgatgagcttgagcgcacgaaaggtaaacaggctgcggtgacggaggcgatgtccctgtttgcggatgtcatgaatgcacgtctggagcaacttgataaagcggccacgccggtggaaaaaatctgggacgatgttaaaacctggacttctgacgcatgggcatggataggtgatcatacactgggggcactcagtctgatcactgacgtggtggccggaaccgttgaacaggtgaagctgctgcttgtgcagggggatctggcgctggctgaatttattcagtcagcctgggaaacgacaaagaatgtgcccggcgttggtgcgttgtttggtgaactggcagaagagaaccgcgtatttattgagaaaacaaaacgcgatgaactggcgctgagaaaatccattgcggaacgggatgcgcgtatacgccagggggaaatggggtacatcaaccgctcgcgtgcaacaggcgtcagcaaaggtcttgggcagcaggaagccgtcagccgtctggctgaagagctgacaggtaaaaagcatacatcaccgaaaacgcgctctgccggggagagggaagaggagcaggcaagagaggctctgcttgcccttgaagctgagctcaggacgctggaaaaacacagcggtgcgaatgagaaaatcagccggcagcgccgtgatttatggaaggcggaaagtcagtatgcggtcctgaaagaggctgccacgaaacggcagttatcctggcaggaaaaatccctgctggctcatgagaaagagacgctggagtacaaacgccagctggctgagctgggagacaagattgaacaccagaagcggctgaatgagctggcacagcaggcggcgcggtttgaacagcagcagagcgcgaagcaggcggcaatcagcgcaaaagcccgcggactcaccgaccgtcaggcgcagcgggagtcggaagagcagcgccttcgtgaggtgtacggtgataatccggctgcgctggcgaaggccacatctgcactgaagaacacctggtctgcggaggagcagcttcgtggaagctggatggccgggatgaagtccggctggggcgagtgggcggaaagtgcgacggacagtttttcgcaggtaaaaagtgtggccacgcagacctttgacggtattgcacagaatatggcggcgatgctgaccggcagcgaacagaactggcgtggtttcacccgttccgtgctctccatgctgacagagatttttctgaagcaggcgatggtggggattgtcgggcgtatcggcagcgccattggtggtgctttcggtggtggcgcatccgcttccacggggacggccattcaggctgcggcggcgaacttccatttcgcgaccggaggatttacggggacgggcggcaaatatgagcctgcggggattgtccatcgcggggagtttgtcttcacgaaggaggcgaccagccggattggtgtcggcaacctgtatcgtctgatgcgcgggtatgcggaaggtggttatgtcggcggtgccggaagtccggcgcagatgcggcgggccgaaggcattaattttaatcagaacaatcacgtggtgattcagaacgacggccccaacgggcaggcagggccgcagctgatgaaagcggtgtatgagatggcccgtaaaggtgcgcaggatgagctccggctgcagttgcgtgatggcggtctgttatcggggagcgggcgatga

SEQ ID NO: 461302 - DNA, 414 bp, Shigella boydii
atggggagacccgactggcgcgccatgcttgccgggatgacatccaccgaatatgccgactggcgacgtttttactgcacgcattattttcaggatacccaactggacgctcatttttccgggctgatgtacgccgtactcagcctgttttttggcgatccggatatgcatccggcggatttcagtctgcttgctccagcgtgtgaggaagagcagacggagatgccggacgaggaagaaatgctgatgcagaaagcgacaggagttgccggaggcgtccggttcggaggggacggagggcgcgatatttcaccttctgcgaatgtggtggatgtcagcgaggatgatgttgcattaatgatggcttcagcggggatttccggaggtgtgagatatgtcccagccagcgggtga

SEQ ID NO: 461303 - DNA, 147 bp, Shigella boydii
atgaggcactggagcagattcagtgcagaggtgacctgctttatcaaacttaattgtgacaaaatggcgattgagaaggtgcaattgacttatccggattcggtcgtggcgaggtggtgcccctgcattctgctaaccgggttatga

SEQ ID NO: 461304 - DNA, 2091 bp, Shigella boydii
atgcgaataaccactctggcttccgtagtcattccctgtctcggattttcagccagcagcatagctactgcagaggatgtgatgattgtctcggcatccggctatgagaaaaagctgactaacgcagccgccagtgtttctgtgattagccaggaggaattgcagtccagccagtaccacgatctggcggaggctctgagatcagtagagggtgtggatgttgaaagtggtacgggtaaaaccggtgggctggaaatcagcatccgaggaatgccagccagttacacgctgatactgattgatggtgttcgtcagggcggaagcagtgacgtgactcccaacggtttttctgccatgaataccgggttcatgccccctctggccgccattgagcgtattgaggttatcagggggccgatgtccacactgtatggctctgatgcgatgggcggtgtggtgaatatcattaccagaaagaatgcagacaaatggctctcttccgtcaatgcagggctgaatctgcaggaaagcaacaaatggggtaacagcagccagtttaatttctggagcagtggcccccttgtggatgattctgtcagcctgcaggtacgcggtagcacacaacagcgtcagggctcatcggtcacatcactgagcgatacagcagccacgcgtattccttatcccacggagtcacagaattataatcttggtgcacgtcttgactggaaggcgtcggagcaggatgtgctctggtttgatatggataccacccggcagcgttatgataaccgggatgggcaactggggagtctgacggggggatatgaccggaccctgcgctatgagcggaacaaaatttcagctggctatgatcatactttcaccttcggaacatggaaatcgtatctgaactggaacgagacagaaaataaaggtcgtgagctcgtacgcagtgtactgaagcgcgacaaatgggggcttgccggtcagccgcgggagcttaaggaatcgaaccttatcctgaattcattactgcttacccctctgggagaatctcatctggttacggtggggggcgagtttcagagctcgtccatgaaagacggagttgtccttgccagcacaggtgaaactttccggcagaaaagctggtcggtatttgctgaggatgagtggcatctcacggatgcacttgcgctgactgcgggcagccgctatgaacatcatgagcaattcgggggacacttcagtccgcgtgcatatctggtctgggatgtggcagatgcctggacgctgaaaggcggtgtgaccacgggatataaggcacccagaatggggcagctacataaagggattagtggtgtgtccgggcagggaaaaacaaatctacttggtaaccccgacctgaagccggaagagagcgtcagttatgaggctggggtgtattacgataaccccgccggtctgaatgccaatgtcacaggttttatgactgacttctccaacaagattgtctcttattccataaatgataacaccaatagctatgtaaacagcggaaaggcccggttgcacggtgtggaatttgccggcacattgccgctgtggtcagaggatgtcacgctgtcactgaattacacctggacccgaagtgaacaacgtgatggtgataacaaaggtgcgccgctgagttatacccctgaacacatggtgaatgcgaaactgaactggcagatcaccgaagaggtggcatcatggctgggtgcccgttatcgcgggaaaacaccacgtttcacccagaattattcgtcactgagcgctgtacagaagaaagtgtatgatgagaaaggagaatacctgaaagcctggacggtggtggatgcaggtctgtcgtggaagatgacggatgccctgacgctgaatgctgcggtgaataacctgctcaacaaggattacagtgacgtgagcctgtacagtgccggtaagagtacgctgtatgccggtgattacttccagacgggatcatcaacaacaggatatgtgatacctgagcgaaattactggatgtcgctgaactatcagttctga

SEQ ID NO: 461305 - DNA, 615 bp, Shigella boydii
gtgccactaatcattctttttttctttgtggtttcgctggcttatggcatcgctacccgcacaattcgacatcaggcggatttaccgcatttaatgattgaaccgatgaaagagatggcgggatttatcgtgatggtttttcccctcgcccagtttgtcgccatgtttaactggagcaacatggggaaattcatcgccgtggggctgaccgatatactggaaagttcagggcttagcggcatcccggcgtttgtcggtctggcgttgctttcctctttcttatgcatgtttattgccagtggttccgcaatctggtcgattctggcccccattttcgtaccaatgtttatgctacttggctttcacccggcatttgcgcaaatcctctttcgtattgccgactcatccgtattgcctttagcgccggtatctccttttgttccactgtttcttggattcctgcaacgctacaaaccagacgcgaaactgggtacttactattcgttagtcttgccctatccgcttatctttttggtggtatggctgctgatgttgctggcgtggtatcttgttggtctgccgataggtccggggatttacccacgtttgtcttaa

SEQ ID NO: 461306 - DNA, 516 bp, Shigella boydii
atgctgagattacttgaagaaaaaattgccacgccactgggtccactgtgggtgatttgcgatgagcaatttcgcctgcgggcggttgaatgggaagagtacagcgaacgcatggtgcagctgctggacatccattatcgcaaagaaggctatgagcgcatttctgccaccaacccaggcggtttaagcgacaagcttagtgattattttgccggtaatcttagcattattgatacgcttcccactgccacaggggggacgccatttcagcgcgaagtctggaaaactctacgcactatcccctgcgggcaggtaatgcattacggccaactggctgaacaattgggccgccctggcgcggcgcgtgccgttggtgcggcaaacggatcgaatcccatcagcatcgtcgtaccttgccatcgggttattggccgaaacggcaccatgaccggatatgcaggcggagttcagcgaaaagagtggttattgcgccacgaaggttatcttttgctgtaa

SEQ ID NO: 461307 - DNA, 753 bp, Shigella boydii
atgatcccggaaaagcgaattatacggcgcattcagtctggcggttgtgctatccattgccaggattgcagcatcagccagctttgcatcccgttcacactcaacgaacatgagcttgatcagcttgataatatcattgagcggaagaagcctattcagaaaggccagacgctgtttaaggctggtgatgaacttaaatcgctttatgccatccgctccggtacgattaaaagttataccatcactgagcaaggcgacgagcaaatcactggtttccatttagctggcgacctggtgggatttgacgccatcggcagcggccatcacccgagcttcgctcaggcgctggaaacctcgatggtatgtgaaatcccgttcgaaacgctggacgatttgtccggtaaaatgccgaatctgcgtcagcagatgatgcgtctgatgagcggtgaaatcaaaggcgatcaggacatgatcctgctgttgtcgaagaaaaatgccgaggaacgtctggctgcattcatctacaacctgtcccgtcgttttgcccaacgcggcttctcccctcgtgaattccgcctgacgatgactcgtggcgatatcggtaactatctgggcctgacggtagaaaccatcagccgtctgctaggtcgcttccagaaaagcggtatgctggcagtcaaaggtaaatacatcaccatcgaaaataacgatgcgctggcccagcttgctggtcatacgcgtaatgttgcctga

SEQ ID NO: 461308 - DNA, 939 bp, Shigella boydii
atggctatgtatcagaacatgctcgttgttatcgatcctaaccaggacgaccaaccagcattgcggcgagctgtttatttacatcaacggattggtggcaaaattaaagcctttttgccgatctatgacttctcatacgaaatgaccaccctgctctccccggacgaacgtaccgctatgcgtcagggcgtcatcagccagcgtacagcctggatccacgagcaggcaaaatattatctcaatgctggcgttcccattgaaattaaagtggtctggcataaccgtcctttcgaagccatcattcaggaagtgatcagcggcgggcacgatttggtgctaaaaatggcgcaccaacatgaccgtctggaagcggtgatttttactccaacggactggcatctgttacgcaaatgcccaagcccggtgtggatggtgaaagaccagccgtggccggaaggaggtaaggcgctggtggcggtgaatctcgccagtgaagagccgtatcataatgcgctcaatgaaaaactggtcaaagagacgatcgaactggcagaacaagtcaaccataccgaagttcatctggttggcgcttacccagtaacgccaattaatatcgcgattgaactgccggaatttgatccgagcgtttataacgatgccattcgtgggcaacatttgctggcaatgaaagccctgcggcagaaattcggcattaatgaaaacatgacgcacgtagaaaaaggtctgcccgaagaggttattcctgatttggcggagcacttacaggcggggattgtggttctgggcacggtaggacgcaccggtatttcagcagcattcctcagcaacacggcggaacaggtgattgatcatcttcgctgcgatctgttggtcattaaacctgaccagtatcagacacccgttgaactggatgactaa

SEQ ID NO: 461309 - DNA, 258 bp, Shigella boydii
atgattatggcgaaactgaagtcagcgaaagggaagaaatttctctttggtttgttggcggttttcattattgcggcgtcggttgtgactcgcgcgactatcggcggcgttatagaacagtacaatattccgctgtctgagtggacgacatcaatgtatgtgattcagtcatcgatgatttttgtttatagcctggtctttactgtgttgctggcaatcccgttgggaatttatttccttggcggcgaagagcagtaa

SEQ ID NO: 461310 - DNA, 249 bp, Shigella boydii
atgcgtattgaaatctgcatagccaaagaaaaaatgactaaaatgccaaccggtgctgtggatgcgttaaaggaagaattaacccgacgcatcagtaaacgttatgacgatgtagaggtgatcgtaaaagctaccagcaacgatggcctttctgttacgcgcaccgccgataaagattcagctaaaacttttgttcaggaaactctgaaagatacctgggagtctgctgacgagtggtttgttcactaa

SEQ ID NO: 461311 - DNA, 513 bp, Shigella boydii
atgggggtaacatcgggatgggtaggctcttcggctaagagcgaaacaggtgagcagtggatgggagccgccggaaccaaactgggactgagtaaaccttttatgatgagccaaatggttgggcgaactatgggctgtaaaattgcaactgagtactataaatggaaatcctctgacaaggttgataactggggcgcagttggcgctgactggcctttagaagaaaaaagtaaaggtacaattacaaacgccgcaagctgcggatcagggaggctggtaggggctgtcgttacactttctcactttttgacgaactctacaccgacagctgctgtttatttagccggtggtaaagcaggtaatatcaccgtaaacgtaggtggtgctacacaaaccatgatttatcagggcgttgttagtgggttccagtattactggtcaggttctgttagttccgctttcgtggaggcaatgaaaaagacgggagtaccccaggatctaaaaattagttaa

SEQ ID NO: 461312 - DNA, 1236 bp, Shigella boydii
atgacagtaaagatttctggtgtactgaaagacggcacaggaaaaccggtacagaactgcacaatccagctgaaagcaaaacgtaacagtaccacggtggtggtgaacacgctggcctcagaaaatccggatgaagccgggcgttacagtatggacgttgagtatggtcagtacagcgttattctgttggtggagggattcccgccgtcacatgccgggactatcaccgtgtatgaagattctcaacccggtacgctgaatgattttctcggtgccatgacggaggatgatgcccgtccggaggcactgcgtcgctttgaactgatggtggaagaggtggtgcgtaacgcagaggaggcgaagaagaatgccggagaggcggagacgtcagcgaggaatgccggcatatcagccagtcaggcagaagagagcgctgcaaatgctgacacttcagcaggggatgcatcggagtcagcccggcaggcggcagaaagtgcagcctcagcaaagcagtcagaggaggcgtcctcgtcctcggcctctgcggccgctcaaaaagccagtgagtcattacaaagtgcaacagatgctgagttgtcaaaaaagacggcagaaagtgcagccggtaatgcagtcagggatgcaacgaccgcaacagaaaaagcccgggagtcaacagaaagcgcacagtcagcggaacaaagcaggatagcggcggaagaggccgtaaaccgaatccccaccgtggtgggacctcccgggccaaagggggaaccggggcccgcgggtcctcaggggccgaagggagacacaggagcccccgggcaaggaacagaactgcttactactgccaatacatggactcaggcacaaacttttaatggtggtattaatggcaatttgacggtgaccggaaacggctcatttaacgatattcagatccgttcggataaacgcaacaagcgaaatctggtaaaactggataatgcgttagatcgtctggaggcacttactggttatctttacgagatacagtactctgccgacggttggcaaacgtcggttggtttaattgctcaggatgcacaaaaagcattgcctgaactggtaactgaagacgcagacgttatatctggtgaaaaacgtctgcgtcttaactacaacggcataattgcattgttagtcgagggctttaaaacacttcgtcatgagattaaagaactccgggagaagtaa

SEQ ID NO: 461313 - DNA, 693 bp, Shigella boydii
atgattagtcccatcaagaatattaagaacgtatttccaataaatactgcaaatactgaatatatagtgagaaatatttatcctagagttgaacatggttactttaatgaatcaccaaacatatatgacaagaagtatatctctggtataaccagaagtatggcacaattaaaaatagaggagtttattaatgagaaatccagacgacttaattatatgaagacaatgtattctccatgtccggaagattttcagcctatttccagagacgaagccagtataccggaaggaagctggttgacagttatatctggaaaacgtcctatggggcaattttctgtggatagtttgtaccatcctgacttacatgcattatgtgagctcccagagattagttgtaagatcttccctaaagaaaatagtgattttttgtatataattgttgtattcagaaatgattctccccaaggagaactacgggcaaatcggtttatagaactatatgatataaaaagagagattatgcaagtgttaagagatgagtcgccagagttaaagtctattaaatctgagattattattgctcgtgaaatgggagaactttttagttatgcatcagaggaaatagatagctacataaaacaaatgaatgacaggctttctcaaatcaaggctcgaatgtctgttacttaa

SEQ ID NO: 461314 - DNA, 948 bp, Shigella boydii
atgaaattaaaattccttgtacttgcactttgtgtacctgcgatctttactacacatgctaccactaactatccacttttcataccggataacatcagtacggatattagtctaggatctctgagtggcaaaacaaaagaacgcgtttatcatcccaaggaaggggggagaaaaattagtcaactggactggaaatacagtaatgcgactattgttagaggtggcatcgattggaagctaattccaaaagtgtctttcggagtttccggttggactactttaggtaaccagaaagcaagcatggttgataaagactggaacaattccaatacccctcaggtatggaccgaccagagctggcatcccaatacgcatctccgtgatgctaacgaattcgagctgaatcttaaaggttggttattaaataatttggattatcgacttggactaatagcaggttaccaagagagtcgttacagttttaatgcaatgggagggagttatatttatagtgaaaacggggggaacaggaataaaaaaggggcacatcctagtggtgaaagaacaataggttacaaacagctcttcaaaataccttatattggattaactgctaattaccgccatgagaattttgagtttggagcagaactgaaatatagtggttgggttcgttcatctgatacagataaacactatcagactgagacaatttttaaagatgaaataaaaaaccaaaattactgctctgttgctgcgaatattggatactatgtcacccccagtgcaaaattttatatagaaggctccagaaattacatttctaataaaaaaggtgatacatctctttatgagcaaagtaccaatatatctggcaccattaaaaatagtgcaagtattgaatatattggttttctcacttccgcaggtataaagtatattttttga

SEQ ID NO: 461315 - DNA, 168 bp, Shigella boydii
atgactaaaaatacacgtttttcccccgaagtccgtcaacgggcagttcgtatggttctggaaagtcagggcgaatatgactcacaatgggtggcaatttttagccatgaaaacgtaatcaactcggtgaaccaattcaaaaaatatactttatacctgcggaagtga

SEQ ID NO: 461316 - DNA, 1029 bp, Shigella boydii
atgaaccactccttaaaaccctggaacacatttggcattgatcataatgctcagcacattgtatgtgccgaagacgaacaacaattactcaatgcctggcagtatgcaaccgcagaaggacaacccgttcttattctgggtgaaggaagtaatgtactttttctggaagactatcgcggcacggtgatcatcaaccggatcaaaggtatcgaaattcatgatgaacctgatgcgtggtatttacatgtaggagccggagaaaactggcatcgcctggtaaaatacactttgcaggaaggtatgcctggtctggaaaatctggcattaattcctggttgtgtcggctcatcacctatccagaatattggtgcttatggcgtagaattacagcgagtttgcgcttatgttgattgtgttgaactggcgacaggtaagcaagtgcgcttaactgccaaagagtgccgttttggctatcgcgacagtatttttaaacatgaataccaggatcgcttcgccattgtagccgtaggtctgcgtctgctaaaagagtggcaacctgtactaacgtatggtgacttaactcgtctggatcctacaacagtaacgccacagcaagtatttaatgcggtgtgtcatatgcgcaccaccaaactccctgatccaaaagtgaatggcaatgccggtagtttcttcaaaaaccctgttgtatctgccgaaacggctaaagcattactggcgcaatttccaacagcaccaaattacccccaggcgggtggttcagtaaaactggcagcaggttggcttattgatcagtgccagctaaaagggatgcaaatgggtggggctgcggtgcaccgtcaacaggcgttagttctcattaatgaagacaatgcaaaaagcgaagatgtggtgcaactggcacaccatgtaagacaaaaagtgggtgaaaaatttaatgtctggcttgagcctgaagtccgctttattggtgcatcaggtgaagtgagcgcagtggagacaatttcatga

SEQ ID NO: 461317 - DNA, 966 bp, Shigella boydii
atgaaggataacaccgtgccactgaaattgattgccctgttagcgaacggtgaatttcactctggcgagcagttgggtgaaacgctgggaatgagccgggcggctattaataaacacattcagacactgcgtgactggggcgttgatgtctttaccgttccgggtaaaggatacagcctgcctgagcccatccagttacttaatgctgaacagatattgggtcagctggatggcggtagtgtagccgtgctgccagttattgactccacgaatcagtaccttcttgatcgtatcggagagcttaaatcgggcgatgcctgtgttgcagaataccagcaggctggccgtggtcgccgggggcggaaatggttttcgccttttggcgcaaacttatatttgtcgatgttctggcgtctggaacaaggcccggcggcggcgattggtttaagtctggttatcggtatcgtgatggcggaagtattacgcaagctgggagcagataaagttcgtgtcaaatggcctaatgacctctatctgcaggatcgcaagctggcaggcattcttgtggagctgactggcaaaactggcgatgcggcgcaaatagtcattggagccgggatcaacatggcaatgcgccgtgttgaagagagtgtcgttaatcaggggtggatcacgctgcaggaagcggggatcaatctcgatcgtaatacgttggcggccatgctaatacgtgaattacgtgctgcgttggaactcttcgaacaagaaggattggcaccttatctgtcgcgctgggaaaagctggataattttattaatcgcccagtgaaacttatcattggtgataaagaaatatttggcatttcacgcggaatagacaaacagggggctttattacttgagcaggatggaataataaaaccctggatgggcggtgaaatatccctgcgtagtgcagaaaaataa

SEQ ID NO: 461318 - DNA, 927 bp, Shigella boydii
atgacgccttacctacagtttgaccgcaaccagtgggcagctcagcgtgattccgtacctatgacgttatcggaagatgagatcgcccgtctcaaaggtattaatgaagatctctcgttagaagaagttgccgagatctatttacctctgtcacgtttgctgaacttctatataagctcgaatctgcgccgtcaggcagttctggaacagtttcttggtaccaacgggcaacgcattccttacattatcagtattgctggtagtgtcgcggtggggaaaagtacaaccgcccgtgtattgcaggcgctattaagccgttggccggaacatcgtcgtgttgaactgatcactacagatggcttccttcaccctaatcaggttctgaaagaacgtggtctgatgaagaagaaaggcttcccggaatcgtatgatatgcatcgcctggtgaagtttgtttccgatctcaagtccggcgtgccaaacgttacagcccctgtttactcgcatcttatttatgatgtgatcccggatggagataaaactgttgttcagcctgatattttaattcttgaagggttaaatgtcttacagagcggaatggattatccacacgatccacatcatgtatttgtttctgattttgtcgatttttcgatatatgttgatgcaccggaagacttacttcagacgtggtatatcaaccgtttcctgaaattccgcgaaggggcttttaccgacccggattcctattttcataactacgcgaaattaactaaagaagaagcgattaagactgccatgacattgtggaaagagatcaactggctgaacttaaagcaaaatattctacctactcgtgagcgcgccagtttaatcctgacgaaaagtgctaatcatgcggtagaagaggtcagactacgcaaataa

SEQ ID NO: 461319 - DNA, 1650 bp, Shigella boydii
atgctcaatcagaaaattcaaaaccctaatccagacgaactgatgatcgaagtcgatctctgctatgaactggacccgtatgaattaaaactggatgagatgatcgaggcagaaccggaacccgagatgattgaagggctgcccgcctctgatgcgctgacgcctgccgatcgctatctcgaactgttcgagcatgttcagtcggcgaaaattttccccgacagtaaaacctttcccgactgcgcacccaaaatggacccgctggatattttaatccgctaccgtaaagtgcgccgtcatcgtgattttgacttgcgcaagtttgttgaaaatcacttctggctgccggaggtctactccagcgagtatgtatcggacccgcaaaattccctgaaagagcatatcgaccagctgtggccggtgctaacccgcgaaccacaggatcacattccgtggtcttctctgctggcgctaccgcagtcatatattgtcccgggcggccgttttagcgaaacctactattgggattcctatttcaccatgctggggctggcggaaagtggtcgggaagatttgctgaaatgcatggccgataacttcgcctggatgatcgaaaactacggtcacatccccaacggcaaccgcacctattatttgagccgctcgcaaccaccggtttttgcgctgatggtggagttgtttgaagaagatggtgtacgcggtgcgcgccgctatctcgaccacctgaaaatggaatatgccttctggatggacggtgcagaatcgttgatccctaatcaggcctatcgccatgttgtgcggatgccggacggatcgctgctcaaccgttactgggacgatcgcgacacgccgcgtgacgaatcctggcttgaggacgttgaaaccgcgaaacattctggtcgcccgcccaacgaggtgtaccgcgatttacgagcgggggcggcctccggttgggattactcttcccgttggctgcgtgatactggtcgtctggcgagtattcgtaccacccagttcatccccatcgatctgaatgccttcctgtttaaactggagagcgccatcgccaacatctcggcgctgaaaggcgagaaagagacagaagcactgttccgccagaaggccagtgcccgtcgcgatgcggtaaaccgttacctctgggatgatgaaaacggcatctaccgcgattacgactggcgacgcgaacaactggcgctgttttccgctgccgccattgtgccactctatgtcggtatggcgaaccatgaacaggccgatcgtctggcaaatgccgtgcgcagtcggttactgacacctggcgggattctggcaagcgagtacgaaaccggtgaacagtgggataaacccaacggctgggcaccgttacaatggatggcgattcagggatttaaaatgtacggcgatgaccttctgggtgatgaaatcgcgcgaagctggctgaagacggtgaatcagttctatctggaacagcacaaactgatcgaaaaataccatattgccgatggtgttccacgcgaaggcggcggtggcgagtatccgttgcaggatgggtttggctggactaacggtgtggtacgccgtttaattggtttgtacggcgaaccataa

SEQ ID NO: 461320 - DNA, 1053 bp, Shigella boydii
atgaaaatggtctcacgtattaccgcgatcggcctggctggcgtcgcgatttgctatttagggttatctggttatgtgtggtaccacgataataaacgcagtaaacaggccgatgttcaggcatctgctgtcagtgaaaataataaggttttaggctttctccgcgaaaaaggatgcgactattgccacacgccttcggcagaattacccgcctattattatattcctggcgcgaaacagttgatggattacgacattaagcttggatataaatcttttaacctcgaggccgtgcgtgcggcactgctggctgataaacccgtttcgcaaagcgatctgaataagattgaatgggtgatgcagtatgaaactatgccaccaacgcgttataccgcgctacactgggcgggtaaggtgagtgatgaagagcgggcggaaatactggcctggattgcaaaacagcgcgcggaatattacgccagcaatgatactgctccggagcatcgcaatgaaccggtgcagcccatcccgcaaaaactgcctaccgatgcgcaaaaagtggcgttgggctttgcgctgtatcacgatccccgtttatcggctgatagcaccatttcatgcgctcattgccatgcgttgaatgcggggggcgtcgatggcagaaaaacatcgattggtgttggtggcgcagttgggccgattaacgcgccgacggtatttaactcagtatttaacgttgagcagttctgggatggtcgtgcggcaacattgcaggatcaggcaggtggaccgccgttgaacccgattgaaatggcgtcgaaatcctgggacgaaattattgctaagctggaaaaagatccgcagcttaaagcgcagttcctcgaagtttatccgcaaggtttcagtggcgaaaatattactgatgccattgctgaatttgagaaaacattaattacgccggattccccatttgataaatggttgcgtggagatgaaaatgcgctgacggcgcaacagaaaaaaggcggtgatgctgccaacttactgatttag

SEQ ID NO: 461321 - DNA, 276 bp, Shigella boydii; identical to SEQ ID NO: 458859

SEQ ID NO: 461322 - DNA, 1188 bp, Shigella boydii
atgtatagctcacatcagaaacctacaccatcagatattggagcgctgccaacgactggagggactatttcaggtccgttgtttgttactgatgggatcaccggggcactgaaggggaacgccgataccgcgacgaaacttgcggcagccccaaaaattaacggtgttaagtttgatggctcggcggatattaacctcacgccggaaaatattggtgcatttgcccgacgttcgacgggggcttatgcggattcggatggagccgttccctggaatgccgaatcaggcgcttacaatgtcacccgctctggcgacagctatattctggttaacttctataccggagtcggaagttgccggaccctgcagatgaaggcgcattacagaaatggtggtctgttctaccgttcttcaagagacggttatggttttgaggaaggctgggcagaagtttatacctcgaaaaatcttccaccagaaagctacccagtcggcgcaccaatcccgtggccatcagataccgttccgtctggttatgccctgatgcaggggcagacttttgacaaatctgcttacccgaaacttgcagccgcttatccgtcaggcgtgatccctgatatgcgtggctggacgattaagggcaaacctgccagtggtcgggccgtattgtctcaggaacaggacggcattaaatcgcacacccacagcgccagcgcatccagtacggatttggggacgaaaaccacatcgtcgtttgattacggcactaaatccacgaataacaccggggcgcatacgcacagtctgagtggctctacggggtctgccggtgttcatactcatggtaatggtattcgttggccaggaggcggcggttctgcgttagcattttatgatggcggtgggttcacttatgtccagaattcacagtatcaagtaagcccggggacttcttcccgtagatcgtattatcaacgtattcagacacagtcagcaggtgctcatacccactcgctgtctggtactgcagcaagttctggcgcacatgcacatactgtaggtattggtgcgcatacgcactccgttgcgattggttcacatggacacaccatcaccgttaacgctgcgggtaacgcggaaaacaccgtcaaaaacatcgcatttaactatattgtgaggcttgcataa

SEQ ID NO: 461323 - DNA, 573 bp, Shigella boydii
atggcattcagaatgagtgaacaagcacggaccataaaaatttataatctgctggccggaactaatgaatttattggtgaaggtgacgcatatattccgcctcatacaggtctgccagcaaacagtaccgatattgcaccaccagatattcctgctggctttgtggctgttttcaacagtgatgaggcatcgtggcatctcgttgaagatcatcggggtaaaacggtttatgacgtggcttccggcgacgcgttatttatttctgaactcggctcattaccgggaaatgtcacttggttatccccggaaggggagtttcagaagtggaacggcacagcctgggtgaaggatacggaagcagaaaaactcttccggatccgggaggcggaagagaaaaagacaagattaatccaggaagcgactgataacataacaattctgcaggatgctgttaattttgaaatggcaactgatgaggaggtttcgatgctatcttcctggaaaaaataccgggtattagtgagtcggattgatataaatacagccccggatatcgtatggcctgagctgtga

SEQ ID NO: 461324 - DNA, 162 bp, Shigella boydii
atgcagtaccaatgcatgagctcctatttttacattattccctatatgcactttgccaccaaggatggtggcgttacagccaatggttacattatttcctatgacaatatccatatcattaaattcaccgcgaagtccaatagttaccccaggcttaattga

SEQ ID NO: 461325 - DNA, 276 bp, Shigella boydii; identical to SEQ ID NO: 458859

SEQ ID NO: 461326 - DNA, 654 bp, Shigella boydii
atgccacaacgacaccaccagggacataaacgcacaccgaaacagttggcgctcatcatcaaacgctgtttgccgatggtgctcactggcagcggcatgctttgcactaccgctaacgccgaagagtattatttcgaccccattatgctggaaactacaaaaagtggtatgcaaacaactgatctgtcacgtttttcaaaaaaatacgcacaactaccaggaacttatcaggttgatatctggctgaataaaaagaaggtttcacagaaaaaaattacatttaccgccaatgcagagcaacttctgcagccacagtttacggtagaacaactacgtgagctgggtattaaggtggatgaaatcccggcgctggctgaaaaagatgacgatagcgtgatcaactcgcttgaacaaatcattcccggtacagctgctgaatttgatttcaatcatcagcgacttaatttgagcattccccaaattgcactgtaccgtgatgcaagaggttacgtctccccttctcgttgggacgatggtataccaacgctgtttaccaactactcgtttacaggttctgataaccgttaccgccagggcaatcgtagccaacgacagtacctgaatatgcaaaatggtgctaattttggcccctag

SEQ ID NO: 461327 - DNA, 441 bp, Shigella boydii
atgaaaagagcgcctcttataacaggacttttgttgatatccacatcctgcgcttatgcctcctcaggagggtgtggagccgacagcactagcggtgcgacaaattacagcagtgtggttgatgatgttacggtgaaccagacagataacgtgacaggacgggagtttacctctgcaacgctaagtagcactaactggcaatacgcctgttcctgctctgcgggtaaggcagttaaacttgtctatatggtcagccccgtacttaccaccactggacatcagacaggatattacaaactcaatgacagcctggatattaaaaccacattacaggcaaacgacattccaggactctggatttgcccctatatttccagacatctgttatcacttaacccattacaagcccgctgccgcagatattcccgtggcgagcgataa

SEQ ID NO: 461328 - DNA, 1416 bp, Shigella boydii
atgaaaatcaaaactcgcttcgcgccaagcccaacaggctatctgcacgttggcggcgcgcgtactgctctttactcctggctttttgcacgtaaccacggcggtgagttcgtgctgcgtattgaagacaccgatcttgagcgttccacgccggaagctatcgaagccattatggatggcatgaactggctgagcctggagtgggatgaaggtccgtactaccagaccaaacgttttgatcgctacaacgcggtgatcgatcagatgctggaagagggcactgcttataaatgctattgctctaaagagcgcctggaagcgctgcgcgaagagcaaatggcgaaaggtgagaagccgcgttatgacggtcgctgccgccacagccatgagcatcacgctgatgatgaaccgtgcgttgtacgttttgctaacccgcaggaaggttctgttgtttttgacgatcagatccgtggtccgatcgagttcagcaaccaggaactggacgatcttattatccgccgtaccgatggttccccaacctataacttctgtgtggttgtcgatgactgggatatggaaatcacccacgttatccgtggcgaagaccatatcaacaacacgccacgccagatcaacattcttaaggccctgaaagcgccggtgccggtttacgcgcacgtttctatgatcaacggcgatgacggtaaaaaactgtccaaacgtcacggggcggtcagcgtaatgcagtatcgtgatgacggttatttgccagaagcactgctgaactatctggtgcgtctgggctggtcccacggcgatcaggaaatcttcactcgtgaagagatgatcaaatacttcaccctgaatgccgtcagcaaatctgccagtgcgttcaacaccgacaagctgctgtggctgaaccatcactacattaacgcgctgccgccggagtatgttgctactcacttacagtggcacattgagcaggaaaatatcgatacccgtaacggcccgcagctggctgatctggtgaaactgctgggcgaacgctgcaagacgctgaaagagatggcacagagctgccgttatttctacgaagattttgctgagttcgatgccgacgccgcgaaaaaacatctgcgtccggtagcgcgtcagccgctggaagtggttcgtgacaaactggccgcgattactgactggaccgctgaaaacgttcatcacgctattcaggcgacggcggatgagctggaagtgggtatgggtaaagttggtatgccgctgcgtgtcgccgtaaccggtgcggggcagtctccggcactggatgttaccgttcacgcaattggtaggacccgcagtatcgagcgtatcaacaaagcgctggcttttattgctgaacgcgaaaaccagcagtaa

SEQ ID NO: 461329 - DNA, 372 bp, Shigella boydii
atgaccaccgaagaactggctgaatgcctcggtgtggctaaacaaactgttaaccgttggatcagagaaaaaggctggaaaacggaaaaatttcccggcgtgaaaggcggtcgtgccagacttattctggtcgatacgcaagtttgcgagtttattcagaacacgccagccttccataacacaccaatgttgatggaagctgaagagagaattgctgaatacgctcctggagcacgcgccccggcgtatcgacaaatcatcaacgcgatagataatatgacagacattgagcaggaaaaagtcgcgcaatttttgtcacgtgaaggaattcgcaatttcctcgcccgtctcgatattgacgaatcagcataa

SEQ ID NO: 461330 - DNA, 360 bp, Shigella boydii
atgttcaaggagaggatgacaccagatgaacttgccagactgaccggctatagccgccagaccattaataaatgggtacgcaaggaaggctggacaacgtcaccaaaacctggcgtccagggtggcaaagcccgactggttcacgtcaatgaacaggttcgtgaatatattcgcaatgctgaacgtccagaaggtcagggagaagcgcctgccctttctggtgatgcgccgcttgaagtattgctggtgacactggcgaaagagatgacgccagttgaacaaaaacagtttacatccttgcttctgcgggaagggattatcggattgttacaaggcttagggattcgcgatagcaaataa

SEQ ID NO: 461331 - DNA, 243 bp, Shigella boydii
atgtttgtggagcataacctgataaaaaatatcaagatattcacactagcgtttacgctcaccgtggtacttattcagctatcccgttttatttcgccacttgccattatccattccagttatatctttctggcgtggatgccactgtgcgtaatgctgtcaatcttgtttatctttggctggcgaggtgtcgttcccgttttatgcgggatgttttgcaccaatctgtggaactttcggtaa

SEQ ID NO: 461332 - DNA, 717 bp, Shigella boydii
gtgggacgtaaatgggccaatattgttgctaaaaaaacggctaaagacggtgcaacgtctaaaatttatgcaaaattcggtgtagaaatctatgctgctgctaaacaaggtgaacccgatccagaattaaacacatctttaaaattcgttattgaacgtgcaaagcaggcacaagttccaaagcacgttattgataaagcaattgataaagccaaaggcggcggagatgaaacgttcgtgcagggccgttatgaaggctttggtcctaatggctcaatgattatcgccgagacattgacttcaaatgttaaccgtacgattgctaacgttcgcacaattttcaataaaaaaggcggcaatatcggagcggcaggttctgtcagctatatgtttgacaatacgggtgtgattgtatttaaaggatcagaccctgaccatatttttgaaattttacttgaagctgaagttgatgttcgtgatgtgactgaagaagaaggtaacattgttatttataccgaacctactgaccttcataaaggaatcgcggctctaaaagcagctggaatcactgagttctcaacaacagaattagaaatgattgcgcaatctgaagttgagctttccccagaagatttagaaatctttgaagggcttgttgatgcccttgaagatgacgacgatgtacaaaaagtttatcataacgtcgcaaatctctaa

SEQ ID NO: 461333 - DNA, 1149 bp, Shigella boydii
ttgctgtatcaggattatggtgcgcatatctcagtgcaaccctcgcagcatgaaatcccttatccttatgtcatcgatggctctgaattgacacttgatcgctcaatgagcgctgggttaactcgctactttccgacaacagaactggcgcaaattggcgatgaaactgcagacggcatttatcatccaactgaattctccccgctatcgcattttgatgcgcgccgcgtcgatttttccctcgcacggttgcgccattataccggtacgccagttgaacattttcagccgttcgtcttgtttaccaactacacacgttatgtggatgaattcgttcgttggggatgcagccagatcctcgatcctgatagtccctacattgccctttcttgtgctggcgggaactggatcaccgccgaaaccgaagcgccagaagaagccatttccgaccttgcatggaaaaaacatcagatgccagcatggcatttaattaccgccgatggtcagggtattactctggtgaatattggcataggaccgtcaaatgctaaaaccatctgcgatcatctggcagtgctacgcccggatgtctggttgatgattggtcactgtggcggattacgtgaaagtcaggccattggcgattatgtacttgcacacgcttatttacgcgatgaccacgttcttgatgcggttctgccgcccgatattcctattccgagcattgctgaagtgcaacgtgcgctttatgacgccaccaagctggtgagtggcaggcccggtgaggaagtcaaacagcggctacgtactggtactgtggtaaccacagatgacaggaactgggaattacgttactcagcttctgcacttcgttttaacttaagccgggccgtagcaattgatatggaaagtgcaaccattgccgcgcaaggatatcgtttccgcgtgccatacgggacactactgtgtgtttcagataaaccgttgcatggcgagattaaacttcccggtcaggctaaccgtttttatgaaggcgctatttccgaacacctacaaattggcattcgggcgatcgatttgctgcgcgcagaaggcgaccgactgcattcacgtaaattacgaacctttaatgagccgccgttccgataa

SEQ ID NO: 461334 - DNA, 192 bp, Shigella boydii
atggcactcccccgtattacccaaaaagagatgactgaacgcgagcagcgtgaacttaaaacactgctggatcgggcgcggattgcgcatggtcgcgtactgaccaactccgaaaccaacagcattaagaaagagtacatcgataaattaatggtcgagcgtgaggctgaagcgaaaaagcccgccaattga

SEQ ID NO: 461335 - DNA, 873 bp, Shigella boydii
atgctgcccgactcatcagtccgtttaaataaatacatcagcgaaagcggaatttgctcacgccgcgaagcggatcgctatatcgagcaaggcaatgtgttccttaatggcaagcgagccaccattggcgatcaggtgaaacccggcgacattgtgaaagtaaacggtcagttgattgagcctcgggaagccgaagatttggtacttatcgccctgaacaagcccgtcggtattgtcagcaccaccgaagatggcgagcgcgataacattgtcgatttcgttaaccacagcaaacgcgtgttcccgattggccgcctggataaagactcccaggggctgattttcctcaccaatcacggcgatctggtgaataagatcctccgtgcgggtaacgatcatgagaaagagtatctggtgacggtcgataaaccgattaccgatgaatttattcgtggtatgggggcgggggtgccgatcctcgggacggtgacgaaaaagtgcaaagtcaaaaaagaagcgccgtttgtcttccgcattaccctggtgcaggggctgaaccgtcagatccggcgcatgtgcgagcatttcggctatgaagtgaaaaagctggaacgtacgcgcattatgaacgtcagcttaagcggcattccgctgggggagtggcgcgatttaaccgacgatgagttaatcgacctctttaagctcatcgaaaattcctcttccgaggcaaaacctaaagcgaaggccaaaccgaaaacagcgggcatcaaacgtccagtcgttaagatggaaaaaacggcggaaaaaggcggtcgcccggcgtccaacggtaagcgttttacctcgccggggcgtaaaaagaagggacgctga

SEQ ID NO: 461336 - DNA, 948 bp, Shigella boydii
atggaaaacagtgacgatatccgtttgattgtgaagattgcccaactctattacgaacaggatatgacgcaggcgcaaatcgcgcgcgaactgggtatttaccgcaccaccatcagccgcttgcttaaacgaggccgcgatcagggaattgtcaccatcgccatcaactatgactacaacgaaaatctctggctggagcagcaactgaagcaaaagtttggcctgaaagacgttgtggtggtgtcgggaaatgatgaggatgaagagactcaactggcgatgatggggttacacggcgcgcaactgctggatcgcttgctggagcctggcgatattgtcggtttttcctggggtcgcgcggtgagcgcactggttgaaaacttgccgcaggcggggcaatcgcggcagttaatctgcgtaccaattattggcggaccgtccggtaaactcgaaagccgctatcatgtaaacacattaacctacagcgcggcagcgaagctgaaaggggaatcgcatctcgcggattttccggctctgctggataacccattaattcgtaatgggatcatgcagtctcagcactttaaaaccatctctgcctactgggataatctggatgtcgccctggtgggaattggctcaccggccattcgcgacggcgctaactggcatgcgttttatggtggtgaagagagtgacgacctgaatgcccgccaggttgctggcgatatttgctcgcgcttttttgatattcacggcgcaatggttgaaacgaatatgagcgaaaaaacactctctatcgaaatgaataaattaaagcaagcacgatattccattggcattgccatgagtgaagaaaaatacagcggaattgttggtgcactgcgtggaaaatatattaattgtctggtaacgaatagcagcacagctgaactattactgaaataa

SEQ ID NO: 461337 - DNA, 750 bp, Shigella boydii
atgaattcccgacaacaaactattctacagatggtcattgaccagggtcaggttagcgtaaccgatctggcaaaagccactggagtttctgaagttaccattcgccaggatctcaacaccctcgaaaaactgagttacctccgccgtgcacatggctttgcagtttcgcttgatagtgatgacgtcgaaacccgtatgatgagcaactatacgctgaagcgtgaactcgccgagtttgccgcgtcactggttcaaccgggcgaaaccatctttatcgaaaatggcagcagcaatgccctgctcgcccggactctgggggagcagaagaaaaatgtcactatcatcacggtcagcagctacatcgcgcatttgctgaaagacgcgccttgtgaagtcattttgctcggtggcgtgtaccagaaaaaaagcgaaagtatggttggcccgttgacacgccagtgcatccagcaggtgcatttcagcaaagcatttattggtattgatggctggcaacctgaaactggattcaccggtcgcgatatgatgcgtaccgatgtggtcaatgccgtgctggaaaaagagtgcgaagtgatagtcctgactgacagctcgaaatttggtgctgtacattcatactccatcggtcccgttgagcgattcaatcgcgtgattaccgattcgaaaatacgcgccagcgatctgatgcatcttgagcacagtaaactcaccgttcacgtcgttgacatttaa

SEQ ID NO: 461338 - DNA, 174 bp, Shigella boydii; identical to SEQ ID NO: 261832

SEQ ID NO: 461339 - DNA, 1986 bp, Shigella boydii
atgaaaaccgttagggagtccacaacgttgtacaactttctcggatcgcacaatccatactggcggttgacggaaagcagcgatgttttgcgcttttctaccaccgaaaccacagaacctgatcgtactttgcagttatctgccgaacaggctgctcgcatcagggaaatgacggtcatcacctccagcctgatgatgagtctgaccgtcgatgagagcgatctttctgtgcatctggtaggacgaaaaatcaataaccgggaatgggctggcaacgcgtctgcatggcatgacacaccggcagttgctcgtgatttatcacacgggctttcctttgctgagcaggtagtttctgaagcacattccgcaatagtgattctcgacagccgggggaatatccaacgcttcaatcggttatgtgaagattacactgggttgaaagaacacgacgtcattggccaaagcgtgtttaaactgtttatgagccgtcgtgaagctgcggcatccaggcgcaataaccgtgtattttttcgaagcggcaatgcatataaagtcgaactgtggataccaacatgtaaaggccagcggctgtttctgtttcgcaataaatttgtccacagcggcagtggcaagaacgagatttttttaatctgttccggcaccgacattaccgaagagcgccgcgctcaggagcgactgcgtattctggcaaataccgacagtatcaccggactgccgaatcgtaacgcaatgcaggatttaatcgatcacgctattaatcatgcagataacaataaagttggggttgtgtatcttgatttggataatttcaaaaaggtcaacgacgcctatgggcatttgtttggtgaccagttattacgcgacgtgtcattggctattttaagctgtctcgaacatgaccaggtgttggcgcgtccaggtggggatgagtttctggtactggcatccaacacctcacaaagcgcgctggaagcaatggcatcacgaattttgacccgcttacggctcccctttcgcattggtttaattgaagtttataccagctgttcagtaggtattgcactctctcccgaacatggttcagacagcacggctattattcgtcacgccgacacagcaatgtacacagcgaaggaaggcggacgaggacaattttgcgtttttaccccagaaatgaatcaacgggtatttgaatatctctggctggataccaacttgcgtaaagcactggaaaacgatcagttggttattcactatcaaccgaaaatcacctggcgtggcgaagtgcgcagtctggaagcactagtacgttggcagtcacctgaacgtgggttgattccaccgttggacttcatttcctacgccgaagagtcagggctaattgtgcctttaggccgttgggtgattctcgatgtcgtacgccaggtggcaaagtggcgggataaaggcataaacctgcgagtggcggtaaatatttctgcacgtcagctcgccgatcaaaccattttcaccgccctgaaacaggttctccaggaactcaattttgaatactgccctatagatgttgaactgacagagagttgtctgattgagaatgatgaactggcactgtctgttattcaacaatttagccaactaggtgcgcaagtgcatctggatgattttggtcccggctactcttcactttcgcaactggcgcgctttccgatcgatgccatcaaacttgaccaggtttttgttcgagatattcacaaacaacctgtctcgcagtcactggtccgggcgatcgtcgctgtggcccaggcattgaatcttcaggtgatcgccgaaggtgtagagagtgcaaaggaagatgcttttttaaccaagaacgggatcaatgagcggcaaggatttttgtttgccaaaccgatgcccgccgtcgccttcgaacgctggtataaacgctatctgaagcgcgcataa

SEQ ID NO: 461340 - DNA, 558 bp, Shigella boydii
atgaatggtgataattcttttggatggaaccatgaagctacattagataatattcacgcccagaaatacaataaagcttacgcgggtgcgaggttaaccgcagaactgaaatatttattgcaagatgtcgaatccttcgaacccaacagtaaatacacaatacacaaagtggttttgggacctggttatggtactccagactataccggccaaacgataggatacgttgtaacccttcctgcccaaatgcctaattgctggtcatctgaactaccaacaatcgatctttatatcgaccaacttcgcactgttacaggcgtttctaatgccctcggattcatcattgctgcattgctaaacgcgtattctgatttaccccatgatttgaaaattggtctgcgttccttatcaaattcagcagcaatctactcgggtttaggtttcgagcgagtgccgcaggaccgagacataaggagtgatcgtatgcatctaacgccagcaaaccatcctgacttatggacacaagagaatggtgaatggatctacttgcgaaactaa

SEQ ID NO: 461341 - DNA, 450 bp, Shigella boydii
atgcaagttattctgcttgataaagtagcaaacctgggtagcctaggtgatcaggtaaacgttaaagcgggctatgctcgtaacttcctggtaccgcagggtaaagctgttccagctaccaagaaaaacattgaattcttcgaagcacgtcgcgctgaactggaagctaaactggctgaagttctggcagctgctaatgctcgcgctgagaaaatcaatgcactggaaactgttaccatcgcgtctaaagctggcgacgaaggtaaactgttcggttccatcggtactcgcgacatcgctgacgctgtaactgcagctggcgttgaagtggctaagagcgaagttcgtctgccgaacggcgttctgcgtaccactggcgaacacgaagtgagcttccaggttcacagcgaagtattcgcgaaagtgatcgtaaacgtagtagctgaataa

SEQ ID NO: 461342 - DNA, 228 bp, Shigella boydii; identical to SEQ ID NO: 1904

SEQ ID NO: 461343 - DNA, 315 bp, Shigella boydii
atgaccaaccgtctggtgttgtccggcaccgtgtgcaggactccccttcgaaaggtcagtccatcaggaattcctcactgccagttcgtgcttgagcatcgttctgtgcaggaggaagccggttttcaccggcaggcgtggtgccaaatgcccgttattgttagcggacacgaaaaccaggccattactcacagtataacggtcggcagtcgcataaccgttcaggggttcatttcatgccacaaggcaaagaacggactgagcaaaatggttttgcatgccgagcagattgaattgatagattctggagactag

SEQ ID NO: 461344 - DNA, 396 bp, Shigella boydii
atgcgtcattacgaaatcgtttttatggtccatcctgaccagagcgaacaggttccgggcatgatcgagcgctacactgctgccatcactggtgcagaaggcaagatccaccgtctggaagactggggccgccgtcagctggcttacccgatcaacaaactgcacaaagcacactacgttctgatgaacgttgaagctccgcaggaagtgatcgatgagctggaaactaccttccgcttcaacgatgccgttatccgcagcatggttatgcgtaccaagcacgctgttaccgaagcatctccgatggttaaagcgaaagacgagcgccgtgagcgtcgcgatgatttcgcaaacgaaaccgctgatgatgctgaagctggggattctgaagagtaa

SEQ ID NO: 461345 - DNA, 276 bp, Shigella boydii
atgttcagtcgtgttttagcccttctggctgtgcttttgctaagtgcaaatacatgggcagccattgaaattaataaccaccaggccagaaatatggacgacgtacagagcttaggcgtgatttatatcaatcataatttcgccactgaaagcgaagcacgtcaggcattaaatgaagagacagatgcgcagggcgcaacgtactaccacgtaattctgatgcgggaaccggggagtaacggcaatatgcacgccagcgcggatatttatcgctag

SEQ ID NO: 461346 - DNA, 477 bp, Shigella boydii
atgtatttcagcggcgacggcgcgcgtcgcgatgaagatggctattactggatcaccgggcgtgtggacgacgtgctgaacgtctccggtcaccgtctggggacggcagagattgagtcggcgctggtggcgcatccgaagattgccgaagccgccgtagtaggtattccgcacaatattaaaggtcaggcgatctacgcctacgtcacgcttaatcacggggaggaaccgtcaccagaactgtacgcagaagtccgcaactgggtgcgtaaagagattggcccgctggcgacgccagacgtgctgcactggaccgactccctgcctaaaacccgctccggcaaaattatgcgccgtattctgcgcaaaattgcggcgggcgataccagcaacctgggcgatacctcgacgcttgccgatcctggcgtagtcgagaagctgcttgaagagaagcaggctatcgcgatgccatcgtaa

SEQ ID NO: 461347 - DNA, 315 bp, Shigella boydii
atgaatggcactatttatcagcggatagaagacaatgcgcatttcagggagttagtcgaaaaacggcaacggtttgccaccatcctgtcgattattatgctggcagtttatatcggctttattttactgatcgccttcgcgcccggctggctgggcacgccgctgaatccgaacaccagcgtcacacgcggtattccaattggtgttggagtgattgtgatctcctttgttctcaccggtatctacatctggcgggcgaacggcgaattcgaccgtcttaataatgaagtcctgcatgaggtacaagcatcatga

SEQ ID NO: 461348 - DNA, 1650 bp, Shigella boydii
atgaaaagagttctgacggcgcttgccgccacactccctttcgcagctaacgccgcggatgctattagcggggccgtagagcgccagccaacgaactggcaggcgattattatgttcctgattttcgtcgtgtttacgctcggcattacctactgggcatcaaaacgcgtacgttctcgtagcgactactacacggcaggcggcaatatcacaggcttccagaacgggctggcgattgccggtgactatatgtccgccgcctcatttttggggatctccgcgctggtgtttacctccggctatgacggcttaatttactcgctgggcttcctggtgggctggccgatcattttgttcctgattgccgaacgtctgcgtaacctgggacgctacacctttgccgatgtagcctcttaccgcctgaaacaagggccgattcgtattctttcggcctgtggttctctggtggtggtggcgctttaccttatcgcccagatggtaggcgcaggtaaactgatcgagctgctgtttggccttaactatcacattgcggtggtgctggtcggcgtgctgatgatgatgtacgtcctgttcggcggcatgctggcgaccacctgggtgcaaattattaaagccgtgctgttgctgttcggtgccagctttatggcctttatggtgatgaaacacgtcggctttagcttcaataatctgttcagcgaagcgatggcggtacacccgaaaggtgtcgacatcatgaagccgggcgggctggtgaaagatccgatctccgcgctctctctgggtctgggactgatgtttggtacggcgggcttgccgcacattctgatgcgcttctttacagtcagcgatgcccgcgaagcacgtaagagcgtgttctacgccaccgggtttatgggctacttctatattctgacctttattatcggcttcggcgcgatcatgctggttggtgcgaatccggaatataaagacgcggcgggccatctgattggtggtaacaacatggcggccgttcacctggcgaatgcagtgggcggcaacctgttcctcggttttatttcagcggttgctttcgccactatcctcgcggtggttgcgggtctgacgctggcgggcgcatccgcggtttcgcatgacttgttcgctaacgtcttcaaaaaaggtgcgaccgaacgtgaagaactgcgggtatcgaaaatcaccgtcctgattttgggtgtgattgcgattatcctcggcgtgctgtttgagaatcagaacatcgcctttatggtaggccttgcgtttgccatcgcggcgagctgtaacttcccgatcattctgctttccatgtactggtcgaaactgactacccgtggcacgatgctgggcggctggctggggctgattaccgcagtggtgctgatgatcctcggcccaactatttgggtacagatcctcggtcacgaaaaagccatcttcccgtatgaatacccggcgctgttctctatcagcgtggcattcctcggcatctggttcttctcggcaaccgataactcagcggaaggtgcgcgcgagcgtgaactgttccgtgcgcagtttatccgctcccagaccggctttggcgttgagcaaggccgcgcacattaa

SEQ ID NO: 461349 - DNA, 1251 bp, Shigella boydii
atggatataatgagaagtgttgtggggatggtggtgttactggcaatagcatttctgttgtcagtgaataaaaagagcatcagtttgcgcacggttggagccgcactgctgctgcaaatcgctattggtggcatcatgctctacttcccaccgggaaagtgggcagtagaacaggcggcattaggcgttcataaagtgatgtcttacagtgatgccggtagcgccttcatttttggttcgctggttgggccgaaaatggatgtcctgtttgacggtgcgggttttatcttcgcctttcgcgtacttccggcgattattttcgttactgcgctcatcagtctgctgtactacattggcgtgatggggctgctgattcgcatccttggcagcattttccagaaagctcttaacatcagcaaaatcgaatcttttgtcgcagtcacaactattttcctcgggcaaaatgagatcccggcgatcgttaaaccgtttatcgatcgcatgaatcgcaacgagttgtttaccgcaatttgtagcgggatggcgtccattgctggttcgatgatgattggttatgccggaatgggcgtaccaattgactacctgttagcggcatcgctgatggcgatcccaggtggtattttgtttgcacgtattcttagcccggccaccgagccttcgcaggtcacatttgaaaatctgtcgttcagcgaaacgccgccaaaaagctttatcgaagcggcggcgagcggtgcgatgaccgggctgaaaatcgccgctggtgtagcgacggtggtaatggcgtttgtcgcaattattgcgctgatcaacggcattatcggcggaattggtggctggtttggtttcgccaatgcctctctggaaagtatttttggctatgtgctggcaccgctggcgtggatcatgggtgtggactggagtgatgccaatcttgcgggtagcctgattgggcagaaactggcgattaacgaattcgtcgcttacctgagtttctccccatacctgcaaacgggcggcacgctggaagtgaaaaccattgcgattatctcctttgcgctttgtggttttgctaactttggttctatcggtgttgtcgttggcgcattttcggctatttcgccaaaacgcgcgccggaaatcgcccagcttggtttacgggcgctggcagcagcaacgctttccaacctgatgagtgcgactattgccgggttctttattggtttagcttga

SEQ ID NO: 461350 - DNA, 939 bp, Shigella boydii
atgtctgaattaaaaatttcccctgaattattacaaatttccccggaagtgcaggacgctttaaaaaacaaaaaaccggttgtggcgctggaatcgaccattatttctcacgggatgccgttcccacaaaatgcccagaccgcaattgaagtagaagaaactattcgtaaacagggcgctgtacctgccactatcgccattattggcggcgtgatgaaagtgggtttaagcaaagaagaaattgaattactgggtcgtgaagggcataacgtgaccaaagttagtcgtcgcgatttaccttttgttgttgccgccggaaaaaatggcgcaaccactgtggcttcaacgatgattattgcggcgcttgccggaattaaagtatttgccaccgggggaattggtggtgtgcatcgcggggcggaacataccttcgatatttctgccgatttgcaagaactggcaaatactaatgtcaccgttgtttgtgccggggcgaaatctattctcgatttaggattaaccactgagtatttagaaaccttcggtgtgccgttaattggctatcagactaaagcgctgcctgcgtttttctgccgtaccagctcgtttgacgtcagtattcgtctcgacagcgccagtgaaattgcccgtgcaatggcggtgaaatggcaaagcgggctgaacggtggcctcgtggtagcgaacccgatcccggaacagtttgcgatgccggaggaatctatcaatgcagccatagatcaagccgtcgccgaagccgaagagcagggcgttattggtaaagaaagtacactgttcctgctggcgcgcgttgctgagctgaccggcggtgacagcctgaaatccaatatccagctggtgttcaacaacgccattctggcgagtgaaattgccaaagaataccagcgtctcgcgggttaa

SEQ ID NO: 461351 - DNA, 624 bp, Shigella boydii
atgctggttgctataaatgacatgaatattagcaacgctattacagctgaatatctcgcacagcaccgtgaatttattcagagggcaaaggtcattgtcgcggactgtaatatcagtgaagaggcactggcatggattctggataatgccgccaacgtacccgtatttgtcgatccggtttccgcatggaaatgtgtcaaagtgcgcgaccgtctaaatcagatccacactctgaagccaaaccgccttgaagcggaaaccctgagtgggattgcgctgtcagggcgtgaagatgtggcaaaagttgctgcctggttccatcaacatggcctgaaccgactggtattgagcatgggcggcgacggcgtttattacagcgatatcagcggtgaaaatggctggtctgcgccgatcaaaaccaatgttattaatgttaccggagcgggtgatgccatgatggcgggacttgcttcgtgttgggtagacggaatgccgtttgccgaatctgttcgtttcgcacagggatgttcgtcaatggcgctctcctgtgaatacaccaataaccccgatttatcgattgccaacgttatatcgttagtggagaacgcagaatgtctgaattaa

SEQ ID NO: 461352 - DNA, 219 bp, Shigella boydii
atggctcaagttattaatgaaatggatgttccgtcccattcgtttgtttttcatggtacaggtgagagatattttcttatttgtgtggtgaatgtgttgttaacgattataacgctaggtatctatttaccatgggcattaatgaaatgtaagcgttatctctatgctaatatggaagttaacggacaacgattttcggtaatgctgccaacttactga

SEQ ID NO: 461353 - DNA, 396 bp, Shigella boydii
atgaataacattgcgccgcaatcacctgtaatgcgtcgcctgacgctacaggataatcctgctattgcccgcgtcattcgtcaggtatccgccgaatacggtcttaccgctgataaaggctacaccgtcgccgatccgaatcttgacgaactgtatcaagtgtatagtcagccgggtcatgcatattgggtggttgagtacgagggtgaagtggtcggcggcggtgggattgcgccattagcaggtagtgaatcggacatttgcgaactgcaaaagatgtattttcttccggctattcgcggtaaagggctggcgaaaaaactggccttaatggcgatggagcaggcacgagagatgggcttcaaacgctgctatctggaaacgaccgctttttaa

SEQ ID NO: 461354 - DNA, 417 bp, Shigella boydii
atggcaaacccggaacaactggaagaacagcgtgaagaaactcgtttgattattgaagaattactggaagatggcagcgatccggacgcgctgtacaccatcgaacaccatctttccgcagacgatctggaaaccctggaaaaagcagcagttgaagcgtttaaactcggttacgaagtgaccgatccagaagagctggaagttgaagatggtgatatcgtgatttgctgcgacatcctcagcgagtgcgcgttgaatgccgatctgatcgatgcccaggttgaacaactgatgacattggcggagaaatttgacgttgagtacgacggttggggcacttattttgaagatcctaatggcgaagacggcgacgatgaagattttgtcgatgaagacgatgacggggttcgccactaa

SEQ ID NO: 461355 - DNA, 1005 bp, Shigella boydii
atgtccgggttttatcataagcatttcctgaaattactcgatttcacgccagctgaactcaacagcctgctgcagttagccgcgaagctgaaagccgataagaaaagcggcaaagaagaagccaaactcactggtaaaaacatcgcgctcatcttcgaaaaagactcgacccgtacccgatgctctttcgaagttgccgcatatgaccagggtgctcgcgttacttatctcggcccaagcggcagtcagattggtcataaagagtcgattaaagacactgcccgcgtgctgggtcgcatgtatgacggtattcagtatcgcggctatggtcaggagattgccgaaacactggcggaatacgctggcgtgccggtatggaacggcctgaccaatgagtttcaccccacgcagttgctggcggatctcctcaccatgcaggagcatttacccggtaaagcattcaacgaaatgacgctggtctatgcaggtgacgcacgtaacaacatgggcaattcgatgctcgaagctgcggcgcttaccggtctggatttgcgtctggtcgcgccacaggcatgctggccggaagctgcgctggttacggaatgccgcgccctggcacagcaaaatggcgggaatattacgctgacggaagatgtagccaaaggtgttgaaggtgctgactttatctataccgatgtatgggtgtcgatgggggaagcaaaagagaaatgggcagaacggattgcattactgcgtgattatcaggtgaacagcaagatgatgcagttgaccggtaacccggaggtcaaatacctccactgcctgcccgcgtttcatgacgaccagacgacgcttggtaagaaaatggcggaagagtttggcctacatggcggaatggaagtgactgatgaggtcttcgaatctgccgccagcattgtttttgatcaggcggaaaaccgcatgcataccatcaaagcggtgatggtcgcgacgctcagtaaataa

SEQ ID NO: 461356 - DNA, 324 bp, Shigella boydii
atgaagcaacctgattttgcgaagtggtacttctatcaattacttaagaagtatgagggcgaacagctgtatcttaatgagttaggatatgtttatggtaatgaagaaaaaacaaatgaaattgtaaataacaatccgggttatgtcgttgagatttttgaagaaaagatgggtaatgaattaaaaattagaacaagaatgatggaaatcctccgggatgggaaaataaatatatatgaatatattaataaagaacagttagaaaaattaaatcctccggaagatttacgtatagcaataaaaaaattggggtggaataattga

SEQ ID NO: 461357 - DNA, 1035 bp, Shigella boydii
atggtaggttttttcttcaccggtagcgctattatgggaattctggtcagtcaatttctggcaaggcactccgataaacaaggcgaccgtaaattactgattctgctatgttgcttatttggagtgctggcctgcacgctttttgcgtggaatcgcaactacttcattctcctctctacgggcgtacttctgagtagttttgcttctaccgcaaacccgcaaatgttcgccctcgcccgtgaacacgccgacagaacaggccgtgagacggtcatgttcagtacatttttacgtgctcagatctcgcttgcctgggttatcgggccaccgctcgcttatgaactgacaatgaggtttagttttaaagtgatgtatctcaccgctgccatcgcatttgttgtttgcgggctgatagtctggttgtttttgccatcaatacaaagaaatattcctgtcgttacccaacccgtagaaattttaccctccacccataggaagcgggatacgcggctactttttgtggtctgttcaatgatgtgggcggcgaataatctctacatgataaatatgccgctatttattattgatgaactgcatctaaccgataaactggctggagaaatgattggtatcgctgccggtctggaaattccgatgatgttaatcgcaggctattacatgaaacgtattggcaagcgactattaatgctcattgctatcgtgagtggtatgtgtttttacgccagcgtactcatggcgacgactccggcggttgagctggaattgcaaattctaaatgccatcttccttggtattctctgtggtatcggcatgctttattttcaggacttgatgcctgaaaaaataggctctgcgacaacgttatatgcaaatacttcacgcgtcggctggattatcgccggctctgttgacggaattatggttgaaatctggagctaccatgcgttgttctggctggcgatagggatgttgggtattgcgatgatttgcctgctgtttattaaagatatttag

SEQ ID NO: 461358 - DNA, 900 bp, Shigella boydii
atgggttccaccagaaaggggatgctgaacgttctgattgccgccgtgttgtggggaagttcaggggtctgcgcgcaatacatcatggagcaaagccagatgtcgtcgcagtttttgactatgacgcgtttgatattcgccggtttgattctactgacgctgtcatttgttcatggcgataaaatcttttctattattaacaatcataaagatgccattagcctgctgattttttccgtggttggcgcgctaactgtacagctcacttttttgctaaccatcgaaaaatcgaacgcagccacggcaacggtgctgcaattcctctcaccgacgattatcgtcgcctggttctcactggtgcgtaaatcgcgcccgggcattctggttttctgcgctattttgacatcgctggtcgggacttttttattggtgacacacggtaatccgacgtcattatcgctctctcctgccgcgttgttctggggcattgcctcggcatttgctgctgcattctataccacctatccctcaacgctaattgcccgctatggcacgttaccagtcgtcggctggagtatgctgattggcggtctgattctgttgcctttttatgccagacaaggaacaaactttgtcgttaacggcagtttgattctggcgtttttttatttggtggtcattggtacgtccctgacatttagtctgtacctgaaaggagcacaattaattggcggtccaaaagccagcattttgagctgtgcagaaccattaagtagcgcgctactctctttgctgttgctggggatcacgttcacattaccggactggctgggaacgctgctgattctgtcatcggtgattttgatttcaatggattcccgtcgccggccagaaaaataa

SEQ ID NO: 461359 - DNA, 609 bp, Shigella boydii
ttgctaccgaacgatgcgacaaatcatggcgaacttgatgcgaatgtcttccagcatcgaccctttcttgaacaagataatcaggcgcatggttataaacaggtagcggtgggaaatacgtttgtcttccctatggcgggttattccaaaaaaatcacaaccgtggcgcaaataaaagaaggcgcgacagtggcgatccccaacgacccgaccaaccttggtcgcgcacttttactgttgcaaaaagagaagctaattactctgaaagagggaaaagggttattacataccgcgctggatataaccgataatcctcgtcatttgcagattatggaactcgagggggcgcagcttccgcgcgtactggatgatcccaaagttgatgtagcgattatcagcaccacttacattcagcagacagggctttctccggtgcacgacagcgtatttattgaagataagaattcgccgtatgtgaatattttggtggcacgggaagataataagaatgcagaaaacgtgaaggaatttctgcaatcttatcaatcacccgaagtcgctaaagcggcagaaaccatttttaacggtggcgcggtgcctggctggtaa

SEQ ID NO: 461360 - DNA, 423 bp, Shigella boydii
atgctgaaaacaatttcgccgttaatttctcccgaactattgaaagtgctggcagagatgggacatggagatgaaattattttttccgatgctcactttcccgcccattcgatgggaccgcaggtgatccgcgctgatggcctgttggtgagcgacttgctccaggcgattatcccgttatttgaactggacagttatgcaccgccgctggtgatgatggcggcggtagaaggtgacactctcgatcctgaagtagaacgacgttaccgtaatgcgctttcactacaagccccgtgtcctgacatcatccgcatcaatcgttttgcgttttatgaacgggcgcaaaaagcctttgcgatcgttatcacaggcgaacgagcgaagtacgggaatattcttttaaaaaaaggggtaacaccgtaa

SEQ ID NO: 461361 - DNA, 459 bp, Shigella boydii
atgcaatggctggcatccggcgtgctggaatgggtgagaaaactgttctggacggctgaaacaccctggcaaatgttgattgaagaagctcgtctgatcgcgcctagcgcggatggcgtaaaaatgcagtgtgatttattgtcgtgtcagaacgctggctggcaaggagtgacgcttaataccacgcgggggcatttctatcgcgcggcgctggaagggttaactgcgcaattacagcgcaatctacagatgctggaaaaaatcgggcactttaaggcctctgaattattgttagtcggtggaggaagtcgcaacacattgtggaatcagattaaagccaatatgcttgatattccggtaaaagttctcgacgacgccgaaacgaccgtcgcaggagctgcgctgttcggttggtatggcgtaggggaatttaacagccctgaagaagcccgcgcatag

SEQ ID NO: 461362 - DNA, 819 bp, Shigella boydii
atgaaacaagaagttatcctggtactcgactgtggcgcgaccaatgtcagggccatcgcggttaatcggcagggaaaaattgttgcccgcgcctcaacgcctaatgccagcgatatcgcgatggaaaacaacacctggcaccagtggtctttagacgccattttgcaacgctttgctgattgctgtcggcaaatcaatagtgaactgactgaatgccacatccgcggtatcgccgtcaccacctttggtgtggatggcgctctggtagataagcaaggtaatctgctctatccgatcattagctggaaatgtccgcgaacagcagcggttatggacaatattgaacagttgatctccgcacagcggttgcaggctatttctggcgtcggagcctttagtttcaatacgttatataagttggtgtggttgaaagaaaatcatccacaactgctggaacgcgcgcacgcctggttctttatttcgtcgctgattaaccaccgtttaaccggcgaattcactactgatatcacgatggccggaaccagccagatgctggatatccagcaacgcgatttcagtccgcaaattttacaagccactggtattccacgccgactcttccctcgtctggtggaagcgggtgaacagattggtacgctacagaacagcgccgcagcaatgctcggcttacccgttggcataccggtgatttccgcaggtcacgatacccagttcgccctttttggcgctggtgccgaccaaaatgaacccgtgctctcttccggtacatgggaaattttaatggtccgtagcgcctag

SEQ ID NO: 461363 - DNA, 198 bp, Shigella boydii
gtgtactcggtaatggcgaactggggcgctaaccatggggttctgaccatcggccacgttggcgctgactttatcactctcgcctccatgctgcgtatcccggtatgtatgcacaacgttgaagagaccaaagtgtatcgtccttctgcctgggctgcgcacggcatggatattgaagtattgcaggagcgattatga

SEQ ID NO: 461364 - DNA, 132 bp, Shigella boydii
atgtcagacaaactcataacgctggcgaagatcctctgtgtaattgtcggcatttcattttcactaatgctggttgctctttttctttccatggcctggatgatgttgtcttcgtcggggctgctggggtga

SEQ ID NO: 461365 - DNA, 147 bp, Shigella boydii
atgaaaaacggccttgaactgaaagcgcctgtaactgatgacatcagcagagcactggcttttgccattaagtggatggcggtcggtgttgctgtgtccccgatgctgtatgggctggcaaaactggtcattgcgttgaaatcgtga

SEQ ID NO: 461366 - DNA, 534 bp, Shigella boydii
atgaacaccaaaatcaaatacggcctgtcggctgccgttctggcgctgattgccgcaggtgcgcctgcgcctgaaatcctcgaccagtttctggatgaaaaggaaggtaaccacaccacggcataccgtgatggcgcgggtatctggaccatctgccgcggtgccatcctggtggatagtaaacctgtcgtcccgggcatgaagttgtcgaaggaaaaatgcgaccaggtcaacgccattgagcgtgataaggcgctggcatgggtggagcgcaatattaaagtgccgctgaccgaaccccagaaagcgggtatcgcgtcattttgtccctataacattggccccggtaagtgtttcccgtcgacgttttacagacggattaatgctggtgaccgcaggggagcatgcgaagcgattcgctggtggattaaggacggtggcagagactgccgtatccgctcaaataattgctacggtcaggtatcccggcgagaccaggaaagtgcgctggcgtgctgggacatcgacagataa

SEQ ID NO: 461367 - DNA, 345 bp, Shigella boydii
atgaagaaaaaatacgaactggttgttaaagggataaataattacccgaataagattactgttactgtggcactggaaattggtgggtatccgtcactgttgttgccagatgtggcgattagtcttgaccgtactgaagatgccacgctggagttttacgaagctgaggcgaaaaagcaggcgaagcagtttttcatggatgttgctgccgggttatgtgaaggggatggtccgttgccggaaaagcgccccgtaattttagaggcgcaggatgtgttgataacctacagaggaaaactaccgggaataattacgggttctctgaagactccaccgctggcctga

SEQ ID NO: 461368 - DNA, 216 bp, Shigella boydii
atgtaccagatggaaaaaatcacaacaggtgtgtcatacaccacgtcagcggtgggaacgggctactggttcctgcagttgctggacagggtttccccgtctcagtgggcggcaataggcgtgctggggagtctgttgtttgggctgctgacatatctgactaacctgtatttcaaaatcagagaggaccgtcgtaaggcggcgcggggagagtaa

SEQ ID NO: 461369 - DNA, 228 bp, Shigella boydii
atgtcagaaatcacatccctggtcactgcagaggcagtgaaggaagtccggagcgcactgaaacagaaacttcgccagaatcttgagtcgcgtcttgatgcagaagtggatgccattctggatgagctgctgggcgtagcagcggttcctgagccggaaggtatcgcgggtgacgggagtgcttcagatggcggtgaacctacacctgacagcgacatgatgatgtaa

SEQ ID NO: 461370 - DNA, 504 bp, Shigella boydii
atgtactgtgatattgctgcagacaaggcaaaacttttactggaaaaaggcggggaaattgctgtccggtttaaaatccccgaaaacgtcaatcttgagacaaccagaaacaagtatgcctttggtttgtactggcgaatagcggaatggccgggtgagggtggtgaaggccatctgagttctttctttgtccagacagataaagccagtattaatattgcataccatcatacagttaatcaacaaaaagaacttggcacgtttggcgcattcgaccatgactggcatacgcttgcatttaaatttaagggcagtaacagcattaatgttactccggtgcttgatggtgtggatggacaggcgtttgacctggtgaaatgggccaatactgctaatggactcaacaggtttgtcattacggatattacaggtagtgcagaaacctaccctgtacttattgatacggtggaagttaaagcaaacaaagctggagcagccgcataa

SEQ ID NO: 461371 - DNA, 861 bp, Shigella boydii
atggacaacgacaaaattgatcaacacagcgacgaaattgaagttgagagcgaagaaaaagagcgcggcaaaaaaatagaaatagatgaagatcgactcccctcccgggcgatggcaattcatgaacatatccgccaggatggtgaaaaagagctggaacgcgacgcaatggcactactgtggtcagccattgcggcgggtctgtcgatgggcgcttcgttactggcaaaagggatatttcatgtcgaactggaaggcgtgccgggcagcttcttgttggagaatctcggttatacctttggttttattatcgtcattatggcccgccagcaattatttaccgaaaacaccgtgactgcggtactacccgtcatgcaaaaaccgacaatgagcaacgtcggcttacttatgcgattatggggcgtcgtgctgctgggtaatattctcgggacaggtattactgcatgggcatttgaatatatgcctatcttcaatgaagaaactcacgatgcatttgtcaaaatcggcatggatgtgatgaagaatacccccagcgagatgtttgccaacgcgatcatttccggctggctgatcgccactatggtttggatgtttcctgcagcgggtgcggcaaagattgtggtgattatattgatgacctggcttattgcactgggtgacaccacccacatcgttgtcggttctgtagaaatcctctatctggtgtttaacggcacgctgcactggagcgatttcatttggcccttcgcactacctactttagcggggaatatctgcggcggggaatatctgcggcggcacctttatcttcgcgttaatgagtcatgcacagatccgtaa

SEQ ID NO: 461372 - DNA, 756 bp, Shigella boydii
atgaagcttcgcctgtcggcgcttgctctgggaactacgcttctggtggggtgtgcgagttccggtacagatcagcaagggcgttctgacccgttagaagggttcaaccgcaccatgtacaacttcaacttcaatgtattagacccgtatattgttcgaccggtcgctgtcgcctggcgtgattatgttccgcaaccggcgcgtaacggtttgagcaactttaccggcaaccttgaagaacctgcggtgatggttaactacttcttgcagggcgacccttatcaggggatggtccactttacccgctttttcctgaacaccattttggggatgggcggctttattgatgttgcagggatggcgaacccgaaactgcaacggactgaacctcaccgcttcggtagtacgcttggtcattatggcgtgggttatgggccttacgttcagttaccgttctacggtagcttcacgctgcgtgatgacggtggtgatatggcggatggtctttacccggttctttcctggctgacctggccgatgtctgtgggtaaatggacgcttgaagggatcgaaacccgcgctcagctgctggattccgatggtctgctgcgtcagtcgtccgatccttatattatggtgcgcgaagcgtacttccagcgtcatgatttcatcgctaatggcggcgaactcaaaccgcaggaaaatccgaacgcacaagcgattcaggatgatttaaaagatattgattctgaataa

SEQ ID NO: 461373 - DNA, 162 bp, Shigella boydii
gtgctagaatattttatcaataatggattggttgatgtaaacaaaaaatttcaaaaagcaaatagtggggacactatgcttgacaatgcaatgaaaagcaaagattcaaaaatgattgatttttttattaaaaaatggagcggtatcaggcaaacgatttga

SEQ ID NO: 461374 - DNA, 123 bp, Shigella boydii
atgggcacaccacgttttacccctgaatttaagggattactggaaaggctgggacatatccctccggcagaagcagaaaaagcttattatgctgccatcggaaacgatgatctggcaacctga

SEQ ID NO: 461375 - DNA, 741 bp, Shigella boydii
atgaaaaccaaaaactttcttcttttttgtattgctacaaatatgattttgatcccctcagcaaatgctctgaaggcagaaggttttctcactcaacaaacttcaccagacagtttgtcaatacttccgccgcctccggcagaggattcagtagtatttcaggctgacaaagctcattatgaattcggccgctcgctccgggatgctaatcgtgtacgtctcgctagcgaagatgcatactacgagaattttggtcttgcattttcagatgcttatggcatggatatttcaagggaaaataccccaatcttatatcagttgttaacacaagtactacaggatagccatgattacgccgtgcgtaacgccaaagaatattataaaagagttcgtccattcgttatttataaagacgcaacctgtacacctgataaagatgagaaaatggctatcactggctcttatccctctggtcatgcatcctttggttgggcagtagcactgatacttgcggagattaatcctcaacgtaaagcggaaatacttcgacgtggatatgagtttggagaaagtcgggtcatctgcggtgcgcattggcaaagcgatgtagaggctgggcgtttaatgggagcatcggttgttgcagtacttcataatacacctgaatttaccaaaagccttagcgaagccaaaaaagagtttgaagaattaaatactcctaccaatgaactgaccccataa

SEQ ID NO: 461376 - DNA, 867 bp, Shigella boydii
atgaatttagatggtgttagaccatactgtagaatagtcaataaaaagaatgaaagcatatcagatattgcatttgcacatataataaaaagggtaaaaaattcatcatgtactcacccaaaagcagcattggtttttttaggagagaaaggtttttgtgatagcaatgatgttctatctattatgggacaacaaataccaagagtatttaagaacaagatgttatatgattatgtttttaaaaatgaaaaaagtaaaaatgattttctaaaaatggctgaatcatggctaccacagagtgaaccaatagtaataaataatgatgatgacgcattgaatgctgctgcttatttttctgtaaaaaaagcgaaaataaaaacagtaaacgatactgattttaaagagtataataaggtttatattcttgggcacggtagtcctggttctcatcaattaggccttggttcggaacttattgatgtacaaacaatcatttcaagaatgaaagactgtggtattctaaatgtgaaagatatccgttttacttcatgcggctccgctgataaagtggctcctaaaaattttaacaatgcccctgctgaaagtctttcttgtatccttaactctctgcctttttttaaggaaaaagaatctttgctagagcagataaaaaaacaccttgaaaacgatgagtcattgagtgatggtctaaaaatatccggctatcatggatatggagttcactatggtcaagagctttttccctactcacattatcgttcaacttcaattcctgctgatccggagcatacagtaaaaagaagctctcagaaaaagacttttattattaataaagaactggattag

SEQ ID NO: 461377 - DNA, 1497 bp, Shigella boydii
atgctgcctgtcggcttaagcatctggctggcccatcagcaggtagaaacatcgtttattgaagagctggatacctattcctcccgcgtcgctattcgggccaataaggtggcgacacaagggaaagatgcgctgcaagagctggaaagatggcaaggcgctgcctgtagcgaagcccatctcatggaaatgcgtcgggtatcttacagttatcgctatattcaggaagtggtttatatcgataacaacattccccagtgttcgtctctggagcatgaaagtccgcccgataccttccccgagccaggtaaaatttcgaaagatggttatcgtgtctggttaacatcgcataacgatttaggcattatccgttacatggtcgccatgggaacggcacattatgtcgtcatgatcgaccccgcttcctttattgatgtcattccctatagctcatggcaaattgatgccgccattattggcaatgcccataacgttgtcataaccagcagcgatgaaattgctcagggaattattaccaggctacaaaaaacacccggtgagcatatcgaaaataatggaatcatttacgatatcctgcccttcccggagatgaatatttcgatcatcacctgggcttcaacgaaaatgttgcagaaaggctggcatcggcaagtctttatttggttaccgctcgggttggtgattggcctgctggcagcgatgtttgtgctgcgtattttgcgccgtatccagtcaccgcatcatcggctgcaggatgctatcgaaaatcgtgatatttgcgtgcactatcagccgattgtctccttagccaatggcaaaattgtcggtgctgaggcactggcgcgctggccgcagacagacggtagttggttgtcaccagatagttttattccgctggcacagcaaacaggcctttctgagccattgacgctactgattataagaagcgtctttgaagatatgggcgactggctgcgtcagcatccacagcagcatatttcgatcaatcttgaatccaccgtgctcacctcggaaaaaatcccgcaattgctgcgtgaaatgatcaatcactatcaggttaatcccagacagatcgcgcttgaactcactgaacgcgagtttgccgatccgaaaaccagcgccccgataatttctcgctaccgggaggcgggccatgaaatttatcttgatgattttggtacgggatattcaagtttaagttatttacaggatctggatgtcgacattctgaagatcgataaatctttcgttgatgcgctggaatataaaaatgtcacgccgcatatcatcgaaatggcaaaaacactgaaactgaaaatggtagcggagggaatcgaaaccagtaaacaagaagagtggctacgccagcatggcgtgcactacggtcagggctggctctacagcaaggcattaccgaaagaagatttcttacgctgggccgagcaacatttgtga

SEQ ID NO: 461378 - DNA, 354 bp, Shigella boydii
atgaagtatgttgatggttttgtggttgccgttcctgccgataaaaaggatgcctatcgggaaatggccgctaaggctgcgccattgtttaaagagtttggcgcgcttcgtattgtcgaatgctgggccagcgatgtaccggatggcaaagtgaccgattttcgtatggcggtgaaagcggaagagaatgaagaggttgtctttagctggattgaatacccttcaaaagaggtccgcgacgctgctaatcaaaagatgatgtcggacccacggatgaaagagttcggcgagtccatgccgtttgacggcaagcgaatgatctatggcggattcgagtcaatcatcgacgaatag

SEQ ID NO: 461379 - DNA, 312 bp, Shigella boydii
atggaaaaagaagattcatttccccaacgcgtctggcaaatcgtcgccgctattcccgaaggctatgtcaccacttacggtgatgtggcgaaactggcgggatcgccccgcgccgcgcgccaggtgggcggtgtgttaaagcgtctccctgaaggcagcaccttaccctggcaccgggtggttaatcgccacggcacaatttcgctaaccggaccggatttacagcgtcagcgacaggcattactggcagaaggtgtgatggtatcgggaagcgggcaaatcgacttgcagcgttatcgctggaactactaa

SEQ ID NO: 461380 - DNA, 960 bp, Shigella boydii
atgctaaaagtatcatgcgatgatggttcaactaacgtaaaactggcctggcttgaagatggcgaggtaagaaccagtctgtcaggaaacagctttaaagaaggctggaacccgggactgtttaatgccggcaaagtgtacaattacgtcgtggatgaaaaaaaatacacctatgatttgggaagcactgctgtcataggtacaacacatgtcagttatcaatacagcaccaccaatctgcttgccatacatcatgcactgctgacatccggccttcagccacaggatgtagaactgacagtaacattacctgtgaccgaattctttgataatgacaatcaaccaaatgaagaaagaatagaaagaaaaaaggcaaatgttctccgtgagatatctctgaataaaggggaaacatttaaaattaaaaaagttaatgtaatgcctgaatctttgccagctgcatttgaatcactaaaaaaagataaagtaaacaaacttgaacgcagcctgattatcgatcttggaggaaccactctggattgtggtttaattctcggtgcatttgaaggcatttctgaaatccgtggctattcagaaatcgggacatcccgcatcactcataccgtcatgaatgcgctgacgaaagcctccacaccatgtaattattttattgctgatgagttaataaaaaacagacacgataatgaatatctccagacattaataaatgatgtagctgaaataaaaaacatttctcatataatagacagagaagtgaaatctctggcagaaagcatcaggcaggaaatttcaacattctcaggaatgaaccgaatctatctcactggcggaggagccgagcttatttaccctcacataaagcaatatttcccgaatctgaaagtgaacaaggtggatgaacctcagtttgcattggtgaaagcaatggtgcatgcgtaa

SEQ ID NO: 461381 - DNA, 396 bp, Shigella boydii
atggaaagcagtgatccaaaaaaaagaaagaaagttgtggcatacctgcacccggcactttatccgcaggacaacctgacacaacaaacaatagactctctcccagtacaaatgcggggagatttctacagacaatcccttatttgcggagcagctctttattctgttgacccccgactgttaacgctaatcagcggttttttcagtgagaaaatcactgcagaaaatctggtgaaacttatagaacaaacaacaggatacacatccacatcaattgatataagtgtgttaaaaaacatcatagaggcatcttcagaaaacaaatcagagagcatcacttcaaaagatgatttcgaagaacaaaccagacgcaatctttctatgttaaaaaaataa

SEQ ID NO: 461382 - DNA, 237 bp, Shigella boydii
atgttgcaacgtacgctgggcagtggctggggagtgttgctgccgggattgctgattgcagggctgatgtatgcggatttatcgccggatcagtggcggattgtcattctgatgggattagtattgacgccggtgatgctgtatcacaaacagttacggcattacgttttgctaccatcgtgcctggcgcttattgctgccatcatgctgatgataatgaatttgaatcagggatga

SEQ ID NO: 461383 - DNA, 789 bp, Shigella boydii
atggcctatcgttccgcaccgctctatgaagatatcatctggcgaacgcatctccagccgcaggatgctgggcttgcacaagccgtacgtgcgacgatcgccaaacatcgtgaacatttgctcgagtttatccgcctggatgaacccgctccgcttaacgccatgacgctggcgcaatggtcatcaccgaatgcgctaagttctctactcgcggtctattccgatcatatctatcgcaaccaaccaacgatgatccgcgagaacaaaccgctgatctcactatgggcacaatggtatatcggcctgatggtgccaccattaatgctggcgctactgacgcaggaaaaggcattagatgtgtcgccggaacatttccatgctgagtttcacgaaaccggacgcgtcgcctgtttctgggtcgatgtgtgtgaagataaaaacgcaacaccacattcgccgcagcagcgaatggaaacgttaatcagccaggcgctggttccggttgtgcaggcactagaagcgaccggagagatcaacggcaaacttatctggagtaataccggttatttgatcaactggtatctcactgagatgaagcaactgctcggcgaggtgacggttgaatcgctgcgccatgccctcttttttgagaaaacgctcacgaacggtgaagataatccactctggcgtaccgtcgtgctgcgcgatggcctgctggtgcgccgaacctgctgccagcgttatcgcttaccggatgtgcagcaatgtggcgattgtacgctgaaatga

SEQ ID NO: 461384 - DNA, 483 bp, Shigella boydii
atgagaagtgagcgcagagagggattatcttgcctgactgaactggcgattaagtttccgcgtacccggcgtttagttattgcggatgatgatattgaagctcggctgattggttcattgtcgccatcaccgctggacggtgtattaagtaaagcgtcaacgctggagatttttcatcaggaactctttttgtcattaaatggtgtacgtcaggcgaccgaccgactgaacaatcagtggtacattaaccaaagccggacgctaagcccgacggagagagaaatattgcgctttatgtcgcgtggctactcaatgacacaaattgccgagcagcttaaacgcaatatcaaaacgatccgtgcacataaatttaatgtgatgtcgaaactgggcgtcagttctgatgcagggttgttggaggccgcagatattctgttatgtatgcggcattgcgaagcaagtaatgtgttgcatccctattaa

SEQ ID NO: 461385 - DNA, 198 bp, Shigella boydii
atggaacacagccgaattaagaagagaaatgtcgcactcatagaaaaatgcgtcatgagcagtatcggtattgagagtttattcagaaagtttgcgggtaacccttataagctccatacctataccagtcaggagtcatttcaggatgccatgtcgcggatctcatttgcggcggtcatttttctttttctgccatga

SEQ ID NO: 461386 - DNA, 675 bp, Shigella boydii
atgcaagcagggttaaaagaggtcatgaggactcacttccctgaatatgaaataatatccagcgcctctgcggaggaccttaccttattacaattacgtcgttccggattagtcattgctgatttagccggtgaaagtgaagatccacgttctgtttgtgaacattattattctttaatctcacaatatcgggaaattcactgggttttcatggtgtcacgctcctggtattcccaggcagtagaattgctcatgtgccctacggcgacgttattgtctgatgttgaacccattgagaatctggtcaagaccgtacgttccggcaatacgcacgcagagcgtatcagcgccatgctgacctctccggcaatgaatgaaactcatgattttagctatcgctccgtcattctcactctttcagagcgcaaggtactgcggctattaggtaaaggatggggcatcaaccagatagtttcgttgcttaagaaaagtaataaaactatcagcgcccaaaaaaacagtgcgatgcgtcgactggcaattcacagcaacgctgaaatgtatgcatggataaatagcgcgcagggtgcaagagaacttaacttgccttctgtttatggagatgccgcagaatggaacacagccgaattaagaagagaaatgtcgcactcatag

SEQ ID NO: 461387 - DNA, 282 bp, Shigella boydii
atgatgagcaatgttaagaaaaaagatgtgccgctgataagcatcagcctggtggccattcttttcatcgcagctgcattaagccttttcccacaacaatcggccgacgcggccaacgcaatatacacttttgttacgcgtacgttaggttccgccgtacaggtattggttttgctggcaatgggactggtgatttatttagccaccagtaaatacggcaatattcgtcttggcgaaggaaaaccggaatacagcacgctggtaatgctgccaacttactga

SEQ ID NO: 461388 - DNA, 1086 bp, Shigella boydii
atgatgaaaacgatgcgtattgctgcgatcccgggagacgggattggtaaagaagtccttcctgaagggattcgcgtgttacaggctgccgctgagcgctggggcttcgacttgagttttgagcaaatggggtgggcgagctgcgagtattacagccatcacggtaaaatgatgccggacgactggcatgagcaacttagccgtttcgacgccatctattttggtgccgtcggctggccggataccgttccggaccatatttcgttgtggggttcgctgctgaaatttcgtcgtgaattcgaccagtacgtcaacctgcgcccggttcgtctctttcctggcgttccctgcccgctggcgggaaaacagcctggcgacatcgatttttacgtggtcagggaaaacaccgaaggcgaatattcctcgctcggcggtagagtgaatgaaggtacagagcatgaagtcgtcattcaggaatcggtatttacacgtcgtggtgtcgatcgcattttgcgttatgccttcgaacttgcgcaaagccgcccacgtaagacgctaacttctgccactaaatcgaacggtttagccatcagcatgccgtactgggatgagcgagtggaagcaatggccgagaattacccggagatccgctgggacaagcagcatattgatattctctgcgcgcgttttgtgatgcagccggaacgcttcgatgtggtggtggcgtccaatttgtttggcgatatcctttccgatcttggcccggcctgcaccggcaccattggcattgccccatccgccaacctgaatccggaacgcactttcccgtcgctcttcgagcctgtccacggttccgcgccggatatctacgggaaaaatattgctaaccctatcgccacgatttgggccggggcaatgatgctcgattttctcggcaatggcgatgagcgtttccagcaagcgcataacggtattctggcagcaattgaagaagtgattgctcacgggccgaaaacacctgatatgaaaggcaatgccaccacgccacaggttgccgacgcgatttgcaaaattattttgcgttaa

SEQ ID NO: 461389 - DNA, 735 bp, Shigella boydii
atgaataatttaccgctgctgaatgatttgcgcgtctttatgctggtggctcgtcgggctggttttgccgccgtggcggaagaactgggcgtttcaccggcgttcgtcagcaagcgcatcgccttgctggagcaaacgctaaacgtggtgttgttacaccgcaccacccgccgcgtcaccattaccgaagaaggagagcggatttatgaatgggcgcagcggattttgcaggatgtcggtcagatgatggacgaactttctgacgtgcgtcaggtgccacaggggatgctgcgtattatcagcagctttggttttggacgacaggtggtggctccggcgttatcagcgctggcgaaggcgtatccgcaactggaattacgttttgatgtggaagaccggctggtcgatttggtcaatgaaggtgtcgatctcgatattcgcattggcgatgacatcgcccctaatttaatcgcccgcaaactggcgaccaattaccgcattctctgcgcgtcgccggaatttattgcgcaacatggcgcgccgaaacatttaaccgatctttctgcattgccgtgcttggtcattaaagagcgcgatcatccttttggtgtctggcaattacgcaataaagaaggccaccatgcgattaaagtcaccggcccactgtcgtctaatcatggagaaattgtccatcagtggtgtctcgatgggcaggggattgctctgcgttcctag

SEQ ID NO: 461390 - DNA, 243 bp, Shigella boydii
atgctgacagatatctttaacagtaattaccagtgttatggctatcgtcgcctgcatgcgatgctcaggcatgagggggggcggctatcagaaaaggttgtacgcagacttatggtggaggaacagcttgtcgtcagtcgtaaccgtcgtcgttgctacagctcatattgcggagaaatcggaccggctccggataaccttatcgccagagattttaaggcggagcaacctaatcagaaatag

SEQ ID NO: 461391 - DNA, 1116 bp, Shigella boydii
atggctgacgttgccgacaggcgggaacttcgccagttcaggcagacaccggaacagcgcttcacgcaggaacaggagcatctgcagccgctgctgggtacggacttcgatatccgtcatgtctcctgggatggctatatcgaggttggcgggaaccgttacagtgtgccggaaagcctgtgtggtcagctggtatcaatacggatctcgctggatgatgaactgcggatctacagtaatgagcaacaggtagcatcgcaccgtctctgttcggctgcatacggctggcagaccgtgccggagcgtcacgctccactctggcagcaggcttcggagcgcatggccgaacggctgggggagatacagaaacgggtaatcactgtctgtgaccgggaagcggatatctggcattacctgtattataaagtcagccacggacagcgtggtgcgtgctgcacagaatcgccggctggaagaggcacccggcaagctcttcgaactgccggaagtcctggcaaccgcaggaagccacacgctgaatgtgatgcaaaaaggcgggcgggcagcccgtcaggcccggatgttcatcagttacagcgaagtcagcataaaaaatcccgacaacagcggccaggcgctcccgctcacgtatgtctgttgccgggagcaggcagaggacggtgcctgctggcatctgctgacgtcaggaaaagcggcgagtgccgccgatgcacgacgtattgtcagccattacgagcgacgctggctgacagaggaataccacaaggcgtggaaaagtggtggtacatggaatcgctgcgaatgcagacccgggataaccttgagcgcatggtggttatccaggcgtttatagcggtacgggtgctgggcctgcggcagggaggtgtcagtgaagaaacacaaaatgacagctgtgagaaaatactgacgccgacagagtggaaactacagtgggttaagctggaaggaaagccgcttccggtgcaggcaccgaccctgaaatgggcctggggcgatggcatgacagcaaacgcacaggtcgtcccggttggggcgtcatgtgggatggctggtcagacttcaggatatggttga

SEQ ID NO: 461392 - DNA, 273 bp, Shigella boydii
atgtcacacaacctggagcaccagaaagtccacaccagaatggtgaaagaggttctgaaagccgtcgccagagccaataatcacccttataagtccgtatttgcagactttatcaccggtcatccctcctgcacggtctgtttctgggaaaccttccacaaaatgtacccggattcaccgtacgaatacgtcacgttctgccatacctgccgtcgttttgatttatacaaaacagaagcggagatgaaggcggatgacccgaagtggtggtga

SEQ ID NO: 461393 - DNA, 219 bp, Shigella boydii
atgaagcagcgtattactgtcactatagacagtgacagctatcagttacttaaatccgcaaacgtgaatatctcaggcctggtaaatacggccatgcaaaaagaggcccgccgtctgcgtgcggaacgctggcaggctgaaaatcagcaggggatggctgagatcgcccgttttattgaaatgaacggctcttttgccgatgagaacagggactggtga

SEQ ID NO: 461394 - DNA, 306 bp, Shigella boydii
atgcagtttaaggtttacgcctataaaagagagagtcgttatcgtttgtttgtggatgtacagagtgacattattgacacgcccggacgacggatggtgatccccctggccagtgcccgcctgctgtcagataaagtctcccgtgagctttacccggtggtgcatgtcggggatgaaagctggcgcatgatgaccactgatatggccagtgtgccgatcttcgttatcggggaagaagtggctgatctcagccaccgcgaaaatgacatcaaaaacgccattaacctgatgttctggggaatataa

SEQ ID NO: 461395 - DNA, 1344 bp, Shigella boydii
atggatcagacatattctctggagtcattcctcaaccatgtccaaaagcgcgacccgaatcaaaccgagttcgcgcaagccgttcgtgaagtaatgaccacactctggccttttcttgaacaaaatccaaaatatcgccagatgtcattactggagcgtctggttgaaccggagcgcgtgatccagtttcgcgtggtatgggttgatgatcgcaaccaggtacaggtcaaccgtgcatggcgtgtgcagttcagctcagccatcggcccgtacaaaggcggtatgcgcttccatccgtcagttaacctctccattctcaaattcctcggcttcgaacaaaccttcaaaaatgccctgactaccctgccgatgggcggtggtaaaggcggtagcgattttgacccgaaaggtaaaagcgaaagcgaagtgatgcgtttctgccaggcgctgatgaccgagctttatcgtcatctgggcgcggataccgacgttccggcaggtgatatcggcgttggtggtcgtgaagtcggctttatggcggggatgatgaaaaagctctccaacaataccgcctgcgtcttcaccggtaagggcctttcatttggcggtagtcttattcgcccggaagctaccggctacggtctggtttatttcacagaagcaatgttaaaacgccacggtatgggttttgaagggatgcgcgtttccgtttctggctccggcaacgtcgcccagtacgctatcgaaaaagcgatggaatttggtgctcgtgtgatcactgcgtcagactccagcggcactgtagttgatgaaagcggattcacgaaagagaaactggcacgtcttatcgaaatcaaagccagccgcgatggtcgagtggcagattacgccaaagaatttggtctggtctatctcgaaggccaacagccgtggtctgtaccggttgatatcgccctgccttgcgccacccagaacgaactggatgttgacgccgcgcatcagcttatcgccaatggcgttaaagccgtcgccgaaggggcaaatatgccgaccaccatcgaagcgactgaactgttccagcaggcaggcgtactgtttgcaccgggtaaagcggctaatgctggcggtgtagcaacgtcaggccttgaaatggcgcaaaacgctgcgcgcctgggctggaaagccgagaaagttgacgcacgtttgcatcacatcatgctggatatccaccatgcctgtgttgagcatggtggtgaaggtgagcaaaccaactacgtgcagggcgcgaacattgccggttttgtgaaggttgccgatgcgatgctggcgcagggtgtgatttaa

SEQ ID NO: 461396 - DNA, 273 bp, Shigella boydii
gtgagtcgagcattgttcgccgtagtattagcatttccattaattgcactggctaacccgcattatcgtccggacgtggaggtaaacgtaccgccagaagtgttcagttcaggcgggcagtcagcgcagccctgtactcagtgctgcgtttatcaggatcaaaattattctgaaggggcggtaattaaagccgaaggaatactgctgcaatgccagcgggatgacaaaacccttagcactaatccgctgctctggcggcgcgtaaagccataa

SEQ ID NO: 461397 - DNA, 261 bp, Shigella boydii
gtgcgtgagttaaacgaagaattgggcatcgaagcaactgtgggtgagtatgttgccagccatcagcgagaagtttcgggccggattatccatcttcatgcctggcacgtacccgacttccacgggacgttacaggcacatgaacatcaggcgctggtctggtgctcacctgaagaggcgctgcaatatccgctggcccctactgacattccactattagaggcgtttatggctttacgcgccgccagagcagcggattag

SEQ ID NO: 461398 - DNA, 135 bp, Shigella boydii
atgaaaatgattgaagttgttgccgccatcattgaacgtgatggcaaaattttactcgcgcaacgccccgcccagagcgatcaggcgggattatgggagtttgccggtggtaaagtcgagctggatgaaagctag

SEQ ID NO: 461399 - DNA, 1407 bp, Shigella boydii
atgtcaaagcaacagatcggcgtcgtcggtatggcagtgatggggcgcaaccttgcgctcaacatcgaaagccgtggttataccgtctctattttcaaccgttcccgtgaaaaaacggaagaagtgattgccgaaaatccaggcaaaaaactggttccttactatacggtgaaagagtttgttgaatctctggaaacgcctcgtcgcatcctgttaatggtgaaagcaggtgcaggcacggatgctgctattgattccctcaagccatacctcgataaaggtgacatcatcattgatggtggtaacaccttcttccaggacaccattcgtcgtaaccgtgagctttctgccgaaggttttaactttatcggtaccggtgtttccggaggcgaagaaggcgcgttgaaaggtccttccattatgcctggtgggcagaaagaagcctatgaactggttgcgccgatcctgaccaaaatcgccgccgttgctgaagacggcgagccatgcgttacctatattggtaccgatggtgcaggtcactatgtgaagatggttcacaacggtattgaatacggcgatatgcaactgattgctgaagcctattctctcctgaaaggcggcctgaatctctctaacgaagaactggcacagacctttaccgagtggaataacggtgaactgagtagctacctgatcgacatcaccaaagacatcttcaccaaaaaagatgaagacggtaactacctggttgatgtgatcctggatgaagcagcaaacaaaggtacgggcaaatggaccagccagagcgcgctggatctcggcgaaccgctgtcgctgattaccgagtctgtgtttgcacgttatatctcgtctctgaaagatcagcgtgttgccgcgtctaaagttctctctggtccgcaagcgcagccagcaggcgacaaggctgagtttatcgagaaagttcgtcgtgcgctgtatctgggcaaaatcgtttcttatgctcagggcttctctcaactgcgtgctgcgtctgaagagtacaactgggatctgaactacggcgagatcgcgaagattttccgtgctggttgcatcatccgtgcgcagttcctgcagaaaatcaccgatgcttatgccgaaaatccgcaaatcgctaacctgctgctggctccgtacttcaagcaaattgcagatgactaccagcaggctctgcgtgatgtcgttgcttatgcagtacagaacggtatcccggttccgaccttcgccgctgcggttgcctattacgatagctaccgtgccgctgttctgcctgcgaacctgatccaggcacagcgtgactatttcggtgcacatacctataagcgcattgataaagaaggtgtgttccatactgaatggctggattaa
